United States Patent Application Publication US 2026/0256945 A1 - sequence listing, part 3

SEQ ID NO: 2048 - protein, 2096 aa, synthetic construct
MPAAKRVKLDGGDKKYSIGLDIGTNSVGWAVITDEYKVPSKKFKVLGNTDRHSIKKNLIGALLFDSGETAEATRLKRTARRRYTRRKNRICYLQEIFSNEMAKVDDSFFHRLEESFLVEEDKKHERHPIFGNIVDEVAYHEKYPTIYHLRKKLVDSTDKADLRLIYLALAHMIKFRGHFLIEGDLNPDNSDVDKLFIQLVQTYNQLFEENPINASGVDAKAILSARLSKSRRLENLIAQLPGEKKNGLFGNLIALSLGLTPNFKSNFDLAEDAKLQLSKDTYDDDLDNLLAQIGDQYADLFLAAKNLSDAILLSDILRVNTEITKAPLSASMIKRYDEHHQDLTLLKALVRQQLPEKYKEIFFDQSKNGYAGYIDGGASQEEFYKFIKPILEKMDGTEELLVKLNREDLLRKQRTFDNGSIPHQIHLGELHAILRRQEDFYPFLKDNREKIEKILTFRIPYYVGPLARGNSRFAWMTRKSEETITPWNFEEVVDKGASAQSFIERMTNFDKNLPNEKVLPKHSLLYEYFTVYNELTKVKYVTEGMRKPAFLSGEQKKAIVDLLFKTNRKVTVKQLKEDYFKKIECFDSVEISGVEDRFNASLGTYHDLLKIIKDKDFLDNEENEDILEDIVLTLTLFEDREMIEERLKTYAHLFDDKVMKQLKRRRYTGWGRLSRKLINGIRDKQSGKTILDFLKSDGFANRNFMQLIHDDSLTFKEDIQKAQVSGQGDSLHEHIANLAGSPAIKKGILQTVKVVDELVKVMGRHKPENIVIEMARENQTTQKGQKNSRERMKRIEEGIKELGSQILKEHPVENTQLQNEKLYLYYLQNGRDMYVDQELDINRLSDYDVDHIVPQSFLKDDSIDNKVLTRSDKARGKSDNVPSEEVVKKMKNYWRQLLNAKLITQRKFDNLTKAERGGLSELDKAGFIKRQLVETRQITKHVAQILDSRMNTKYDENDKLIREVKVITLKSKLVSDFRKDFQFYKVREINNYHHAHDAYLNAVVGTALIKKYPKLESEFVYGDYKVYDVRKMIAKSEQEIGKATAKYFFYSNIMNFFKTEITLANGEIRKRPLIETNGETGEIVWDKGRDFATVRKVLSMPQVNIVKKTEVQTGGFSKESILPKRNSDKLIARKKDWDPKKYGGFDSPTVAYSVLVVAKVEKGKSKKLKSVKELLGITIMERSSFEKNPIDFLEAKGYKEVKKDLIIKLPKYSLFELENGRKRMLASAGELQKGNELALPSKYVNFLYLASHYEKLKGSPEDNEQKQLFVEQHKHYLDEIIEQISEFSKRVILADANLDKVLSAYNKHRDKPIREQAENIIHLFTLTNLGAPAAFKYFDTTIDRKRYTSTKEVLDATLIHQSITGLYETRIDLSQLGGDGGPAPGGSEAAAKGGLGIEDEYRLHETSTEPDVSLGSTWLSDFPQAWAETGGMGLAVRQAPLIIPLKATSTPVSIQQYPMSHEARLGIKPHIQRLLDQGILVPCQSPWNTPLLPVKKPGTNDYRPVQDLREVNKRVEDIHPTVPNPYNLLSGLPPSHQWYTVLDLKDAFFCLRLHPTSQPLFAFEWRDPGMGISGQLTWTRLPQGFKNSPTLFNEALHRDLADFRIQHPDLILLQYVDDILLAATSELDCQQGTRALLQTLGDLGYRASAKKAQICQKQVKYLGYLLREGQRWLTEARKETVMGQPVPKTPRQLREFLGKAGFCRLFIPGFAEMAAPLYPLTKPGTLFSWGPDQQKAYQEIKQALLTAPALGLPDLTKPFELFVDEKQGYAKGVLTQKLGPWRRPVAYLSKKLDPVAAGWPPCLRMVAAIAVLTKDAGKLTMGQPLVILAPHAVEALVKQPPDRWLSNARMTHYQAMLLDTDRVQFGPVVALNPATLLPLPEEGAPHDCLEILAETHGTRPDLTDQPIPDADHTWYTDGSSFLQEGQRKAGAAVTTETEVIWAGALPAGTSAQRAELIALTQALKMAEGKRLNVYTDSRYAFATAHIHGEIYRRRGWLTSEGREIKNKSEILALLKALFLPKRLSIIHCLGHQKGDSAEARGNRLADQAAREAAIKTPPDTSTLLIAGKRTADGSEFEKRTADGSEFESPKKKAKVE

SEQ ID NO: 2049 - protein, 2100 aa, synthetic construct
MPAAKRVKLDGGDKKYSIGLDIGTNSVGWAVITDEYKVPSKKFKVLGNTDRHSIKKNLIGALLFDSGETAEATRLKRTARRRYTRRKNRICYLQEIFSNEMAKVDDSFFHRLEESFLVEEDKKHERHPIFGNIVDEVAYHEKYPTIYHLRKKLVDSTDKADLRLIYLALAHMIKFRGHFLIEGDLNPDNSDVDKLFIQLVQTYNQLFEENPINASGVDAKAILSARLSKSRRLENLIAQLPGEKKNGLFGNLIALSLGLTPNFKSNFDLAEDAKLQLSKDTYDDDLDNLLAQIGDQYADLFLAAKNLSDAILLSDILRVNTEITKAPLSASMIKRYDEHHQDLTLLKALVRQQLPEKYKEIFFDQSKNGYAGYIDGGASQEEFYKFIKPILEKMDGTEELLVKLNREDLLRKQRTFDNGSIPHQIHLGELHAILRRQEDFYPFLKDNREKIEKILTFRIPYYVGPLARGNSRFAWMTRKSEETITPWNFEEVVDKGASAQSFIERMTNFDKNLPNEKVLPKHSLLYEYFTVYNELTKVKYVTEGMRKPAFLSGEQKKAIVDLLFKTNRKVTVKQLKEDYFKKIECFDSVEISGVEDRFNASLGTYHDLLKIIKDKDFLDNEENEDILEDIVLTLTLFEDREMIEERLKTYAHLFDDKVMKQLKRRRYTGWGRLSRKLINGIRDKQSGKTILDFLKSDGFANRNFMQLIHDDSLTFKEDIQKAQVSGQGDSLHEHIANLAGSPAIKKGILQTVKVVDELVKVMGRHKPENIVIEMARENQTTQKGQKNSRERMKRIEEGIKELGSQILKEHPVENTQLQNEKLYLYYLQNGRDMYVDQELDINRLSDYDVDHIVPQSFLKDDSIDNKVLTRSDKARGKSDNVPSEEVVKKMKNYWRQLLNAKLITQRKFDNLTKAERGGLSELDKAGFIKRQLVETRQITKHVAQILDSRMNTKYDENDKLIREVKVITLKSKLVSDFRKDFQFYKVREINNYHHAHDAYLNAVVGTALIKKYPKLESEFVYGDYKVYDVRKMIAKSEQEIGKATAKYFFYSNIMNFFKTEITLANGEIRKRPLIETNGETGEIVWDKGRDFATVRKVLSMPQVNIVKKTEVQTGGFSKESILPKRNSDKLIARKKDWDPKKYGGFDSPTVAYSVLVVAKVEKGKSKKLKSVKELLGITIMERSSFEKNPIDFLEAKGYKEVKKDLIIKLPKYSLFELENGRKRMLASAGELQKGNELALPSKYVNFLYLASHYEKLKGSPEDNEQKQLFVEQHKHYLDEIIEQISEFSKRVILADANLDKVLSAYNKHRDKPIREQAENIIHLFTLTNLGAPAAFKYFDTTIDRKRYTSTKEVLDATLIHQSITGLYETRIDLSQLGGDGGEAAAKGGGGSEAAAKGGLGIEDEYRLHETSTEPDVSLGSTWLSDFPQAWAETGGMGLAVRQAPLIIPLKATSTPVSIQQYPMSHEARLGIKPHIQRLLDQGILVPCQSPWNTPLLPVKKPGTNDYRPVQDLREVNKRVEDIHPTVPNPYNLLSGLPPSHQWYTVLDLKDAFFCLRLHPTSQPLFAFEWRDPGMGISGQLTWTRLPQGFKNSPTLFNEALHRDLADFRIQHPDLILLQYVDDILLAATSELDCQQGTRALLQTLGDLGYRASAKKAQICQKQVKYLGYLLREGQRWLTEARKETVMGQPVPKTPRQLREFLGKAGFCRLFIPGFAEMAAPLYPLTKPGTLFSWGPDQQKAYQEIKQALLTAPALGLPDLTKPFELFVDEKQGYAKGVLTQKLGPWRRPVAYLSKKLDPVAAGWPPCLRMVAAIAVLTKDAGKLTMGQPLVILAPHAVEALVKQPPDRWLSNARMTHYQAMLLDTDRVQFGPVVALNPATLLPLPEEGAPHDCLEILAETHGTRPDLTDQPIPDADHTWYTDGSSFLQEGQRKAGAAVTTETEVIWAGALPAGTSAQRAELIALTQALKMAEGKRLNVYTDSRYAFATAHIHGEIYRRRGWLTSEGREIKNKSEILALLKALFLPKRLSIIHCLGHQKGDSAEARGNRLADQAAREAAIKTPPDTSTLLIAGKRTADGSEFEKRTADGSEFESPKKKAKVE

SEQ ID NO: 2050 - protein, 2096 aa, synthetic construct
MPAAKRVKLDGGDKKYSIGLDIGTNSVGWAVITDEYKVPSKKFKVLGNTDRHSIKKNLIGALLFDSGETAEATRLKRTARRRYTRRKNRICYLQEIFSNEMAKVDDSFFHRLEESFLVEEDKKHERHPIFGNIVDEVAYHEKYPTIYHLRKKLVDSTDKADLRLIYLALAHMIKFRGHFLIEGDLNPDNSDVDKLFIQLVQTYNQLFEENPINASGVDAKAILSARLSKSRRLENLIAQLPGEKKNGLFGNLIALSLGLTPNFKSNFDLAEDAKLQLSKDTYDDDLDNLLAQIGDQYADLFLAAKNLSDAILLSDILRVNTEITKAPLSASMIKRYDEHHQDLTLLKALVRQQLPEKYKEIFFDQSKNGYAGYIDGGASQEEFYKFIKPILEKMDGTEELLVKLNREDLLRKQRTFDNGSIPHQIHLGELHAILRRQEDFYPFLKDNREKIEKILTFRIPYYVGPLARGNSRFAWMTRKSEETITPWNFEEVVDKGASAQSFIERMTNFDKNLPNEKVLPKHSLLYEYFTVYNELTKVKYVTEGMRKPAFLSGEQKKAIVDLLFKTNRKVTVKQLKEDYFKKIECFDSVEISGVEDRFNASLGTYHDLLKIIKDKDFLDNEENEDILEDIVLTLTLFEDREMIEERLKTYAHLFDDKVMKQLKRRRYTGWGRLSRKLINGIRDKQSGKTILDFLKSDGFANRNFMQLIHDDSLTFKEDIQKAQVSGQGDSLHEHIANLAGSPAIKKGILQTVKVVDELVKVMGRHKPENIVIEMARENQTTQKGQKNSRERMKRIEEGIKELGSQILKEHPVENTQLQNEKLYLYYLQNGRDMYVDQELDINRLSDYDVDHIVPQSFLKDDSIDNKVLTRSDKARGKSDNVPSEEVVKKMKNYWRQLLNAKLITQRKFDNLTKAERGGLSELDKAGFIKRQLVETRQITKHVAQILDSRMNTKYDENDKLIREVKVITLKSKLVSDFRKDFQFYKVREINNYHHAHDAYLNAVVGTALIKKYPKLESEFVYGDYKVYDVRKMIAKSEQEIGKATAKYFFYSNIMNFFKTEITLANGEIRKRPLIETNGETGEIVWDKGRDFATVRKVLSMPQVNIVKKTEVQTGGFSKESILPKRNSDKLIARKKDWDPKKYGGFDSPTVAYSVLVVAKVEKGKSKKLKSVKELLGITIMERSSFEKNPIDFLEAKGYKEVKKDLIIKLPKYSLFELENGRKRMLASAGELQKGNELALPSKYVNFLYLASHYEKLKGSPEDNEQKQLFVEQHKHYLDEIIEQISEFSKRVILADANLDKVLSAYNKHRDKPIREQAENIIHLFTLTNLGAPAAFKYFDTTIDRKRYTSTKEVLDATLIHQSITGLYETRIDLSQLGGDGGPAPGSSEAAAKGGLGIEDEYRLHETSTEPDVSLGSTWLSDFPQAWAETGGMGLAVRQAPLIIPLKATSTPVSIQQYPMSHEARLGIKPHIQRLLDQGILVPCQSPWNTPLLPVKKPGTNDYRPVQDLREVNKRVEDIHPTVPNPYNLLSGLPPSHQWYTVLDLKDAFFCLRLHPTSQPLFAFEWRDPGMGISGQLTWTRLPQGFKNSPTLFNEALHRDLADFRIQHPDLILLQYVDDILLAATSELDCQQGTRALLQTLGDLGYRASAKKAQICQKQVKYLGYLLREGQRWLTEARKETVMGQPVPKTPRQLREFLGKAGFCRLFIPGFAEMAAPLYPLTKPGTLFSWGPDQQKAYQEIKQALLTAPALGLPDLTKPFELFVDEKQGYAKGVLTQKLGPWRRPVAYLSKKLDPVAAGWPPCLRMVAAIAVLTKDAGKLTMGQPLVILAPHAVEALVKQPPDRWLSNARMTHYQAMLLDTDRVQFGPVVALNPATLLPLPEEGAPHDCLEILAETHGTRPDLTDQPIPDADHTWYTDGSSFLQEGQRKAGAAVTTETEVIWAGALPAGTSAQRAELIALTQALKMAEGKRLNVYTDSRYAFATAHIHGEIYRRRGWLTSEGREIKNKSEILALLKALFLPKRLSIIHCLGHQKGDSAEARGNRLADQAAREAAIKTPPDTSTLLIAGKRTADGSEFEKRTADGSEFESPKKKAKVE

SEQ ID NO: 2051 - protein, 2094 aa, synthetic construct
MPAAKRVKLDGGDKKYSIGLDIGTNSVGWAVITDEYKVPSKKFKVLGNTDRHSIKKNLIGALLFDSGETAEATRLKRTARRRYTRRKNRICYLQEIFSNEMAKVDDSFFHRLEESFLVEEDKKHERHPIFGNIVDEVAYHEKYPTIYHLRKKLVDSTDKADLRLIYLALAHMIKFRGHFLIEGDLNPDNSDVDKLFIQLVQTYNQLFEENPINASGVDAKAILSARLSKSRRLENLIAQLPGEKKNGLFGNLIALSLGLTPNFKSNFDLAEDAKLQLSKDTYDDDLDNLLAQIGDQYADLFLAAKNLSDAILLSDILRVNTEITKAPLSASMIKRYDEHHQDLTLLKALVRQQLPEKYKEIFFDQSKNGYAGYIDGGASQEEFYKFIKPILEKMDGTEELLVKLNREDLLRKQRTFDNGSIPHQIHLGELHAILRRQEDFYPFLKDNREKIEKILTFRIPYYVGPLARGNSRFAWMTRKSEETITPWNFEEVVDKGASAQSFIERMTNFDKNLPNEKVLPKHSLLYEYFTVYNELTKVKYVTEGMRKPAFLSGEQKKAIVDLLFKTNRKVTVKQLKEDYFKKIECFDSVEISGVEDRFNASLGTYHDLLKIIKDKDFLDNEENEDILEDIVLTLTLFEDREMIEERLKTYAHLFDDKVMKQLKRRRYTGWGRLSRKLINGIRDKQSGKTILDFLKSDGFANRNFMQLIHDDSLTFKEDIQKAQVSGQGDSLHEHIANLAGSPAIKKGILQTVKVVDELVKVMGRHKPENIVIEMARENQTTQKGQKNSRERMKRIEEGIKELGSQILKEHPVENTQLQNEKLYLYYLQNGRDMYVDQELDINRLSDYDVDHIVPQSFLKDDSIDNKVLTRSDKARGKSDNVPSEEVVKKMKNYWRQLLNAKLITQRKFDNLTKAERGGLSELDKAGFIKRQLVETRQITKHVAQILDSRMNTKYDENDKLIREVKVITLKSKLVSDFRKDFQFYKVREINNYHHAHDAYLNAVVGTALIKKYPKLESEFVYGDYKVYDVRKMIAKSEQEIGKATAKYFFYSNIMNFFKTEITLANGEIRKRPLIETNGETGEIVWDKGRDFATVRKVLSMPQVNIVKKTEVQTGGFSKESILPKRNSDKLIARKKDWDPKKYGGFDSPTVAYSVLVVAKVEKGKSKKLKSVKELLGITIMERSSFEKNPIDFLEAKGYKEVKKDLIIKLPKYSLFELENGRKRMLASAGELQKGNELALPSKYVNFLYLASHYEKLKGSPEDNEQKQLFVEQHKHYLDEIIEQISEFSKRVILADANLDKVLSAYNKHRDKPIREQAENIIHLFTLTNLGAPAAFKYFDTTIDRKRYTSTKEVLDATLIHQSITGLYETRIDLSQLGGDGGGGSPAPGSSGGLGIEDEYRLHETSTEPDVSLGSTWLSDFPQAWAETGGMGLAVRQAPLIIPLKATSTPVSIQQYPMSHEARLGIKPHIQRLLDQGILVPCQSPWNTPLLPVKKPGTNDYRPVQDLREVNKRVEDIHPTVPNPYNLLSGLPPSHQWYTVLDLKDAFFCLRLHPTSQPLFAFEWRDPGMGISGQLTWTRLPQGFKNSPTLFNEALHRDLADFRIQHPDLILLQYVDDILLAATSELDCQQGTRALLQTLGDLGYRASAKKAQICQKQVKYLGYLLREGQRWLTEARKETVMGQPVPKTPRQLREFLGKAGFCRLFIPGFAEMAAPLYPLTKPGTLFSWGPDQQKAYQEIKQALLTAPALGLPDLTKPFELFVDEKQGYAKGVLTQKLGPWRRPVAYLSKKLDPVAAGWPPCLRMVAAIAVLTKDAGKLTMGQPLVILAPHAVEALVKQPPDRWLSNARMTHYQAMLLDTDRVQFGPVVALNPATLLPLPEEGAPHDCLEILAETHGTRPDLTDQPIPDADHTWYTDGSSFLQEGQRKAGAAVTTETEVIWAGALPAGTSAQRAELIALTQALKMAEGKRLNVYTDSRYAFATAHIHGEIYRRRGWLTSEGREIKNKSEILALLKALFLPKRLSIIHCLGHQKGDSAEARGNRLADQAAREAAIKTPPDTSTLLIAGKRTADGSEFEKRTADGSEFESPKKKAKVE

SEQ ID NO: 2052 - protein, 2096 aa, synthetic construct
MPAAKRVKLDGGDKKYSIGLDIGTNSVGWAVITDEYKVPSKKFKVLGNTDRHSIKKNLIGALLFDSGETAEATRLKRTARRRYTRRKNRICYLQEIFSNEMAKVDDSFFHRLEESFLVEEDKKHERHPIFGNIVDEVAYHEKYPTIYHLRKKLVDSTDKADLRLIYLALAHMIKFRGHFLIEGDLNPDNSDVDKLFIQLVQTYNQLFEENPINASGVDAKAILSARLSKSRRLENLIAQLPGEKKNGLFGNLIALSLGLTPNFKSNFDLAEDAKLQLSKDTYDDDLDNLLAQIGDQYADLFLAAKNLSDAILLSDILRVNTEITKAPLSASMIKRYDEHHQDLTLLKALVRQQLPEKYKEIFFDQSKNGYAGYIDGGASQEEFYKFIKPILEKMDGTEELLVKLNREDLLRKQRTFDNGSIPHQIHLGELHAILRRQEDFYPFLKDNREKIEKILTFRIPYYVGPLARGNSRFAWMTRKSEETITPWNFEEVVDKGASAQSFIERMTNFDKNLPNEKVLPKHSLLYEYFTVYNELTKVKYVTEGMRKPAFLSGEQKKAIVDLLFKTNRKVTVKQLKEDYFKKIECFDSVEISGVEDRFNASLGTYHDLLKIIKDKDFLDNEENEDILEDIVLTLTLFEDREMIEERLKTYAHLFDDKVMKQLKRRRYTGWGRLSRKLINGIRDKQSGKTILDFLKSDGFANRNFMQLIHDDSLTFKEDIQKAQVSGQGDSLHEHIANLAGSPAIKKGILQTVKVVDELVKVMGRHKPENIVIEMARENQTTQKGQKNSRERMKRIEEGIKELGSQILKEHPVENTQLQNEKLYLYYLQNGRDMYVDQELDINRLSDYDVDHIVPQSFLKDDSIDNKVLTRSDKARGKSDNVPSEEVVKKMKNYWRQLLNAKLITQRKFDNLTKAERGGLSELDKAGFIKRQLVETRQITKHVAQILDSRMNTKYDENDKLIREVKVITLKSKLVSDFRKDFQFYKVREINNYHHAHDAYLNAVVGTALIKKYPKLESEFVYGDYKVYDVRKMIAKSEQEIGKATAKYFFYSNIMNFFKTEITLANGEIRKRPLIETNGETGEIVWDKGRDFATVRKVLSMPQVNIVKKTEVQTGGFSKESILPKRNSDKLIARKKDWDPKKYGGFDSPTVAYSVLVVAKVEKGKSKKLKSVKELLGITIMERSSFEKNPIDFLEAKGYKEVKKDLIIKLPKYSLFELENGRKRMLASAGELQKGNELALPSKYVNFLYLASHYEKLKGSPEDNEQKQLFVEQHKHYLDEIIEQISEFSKRVILADANLDKVLSAYNKHRDKPIREQAENIIHLFTLTNLGAPAAFKYFDTTIDRKRYTSTKEVLDATLIHQSITGLYETRIDLSQLGGDGGEAAAKGSSPAPGGLGIEDEYRLHETSTEPDVSLGSTWLSDFPQAWAETGGMGLAVRQAPLIIPLKATSTPVSIQQYPMSHEARLGIKPHIQRLLDQGILVPCQSPWNTPLLPVKKPGTNDYRPVQDLREVNKRVEDIHPTVPNPYNLLSGLPPSHQWYTVLDLKDAFFCLRLHPTSQPLFAFEWRDPGMGISGQLTWTRLPQGFKNSPTLFNEALHRDLADFRIQHPDLILLQYVDDILLAATSELDCQQGTRALLQTLGDLGYRASAKKAQICQKQVKYLGYLLREGQRWLTEARKETVMGQPVPKTPRQLREFLGKAGFCRLFIPGFAEMAAPLYPLTKPGTLFSWGPDQQKAYQEIKQALLTAPALGLPDLTKPFELFVDEKQGYAKGVLTQKLGPWRRPVAYLSKKLDPVAAGWPPCLRMVAAIAVLTKDAGKLTMGQPLVILAPHAVEALVKQPPDRWLSNARMTHYQAMLLDTDRVQFGPVVALNPATLLPLPEEGAPHDCLEILAETHGTRPDLTDQPIPDADHTWYTDGSSFLQEGQRKAGAAVTTETEVIWAGALPAGTSAQRAELIALTQALKMAEGKRLNVYTDSRYAFATAHIHGEIYRRRGWLTSEGREIKNKSEILALLKALFLPKRLSIIHCLGHQKGDSAEARGNRLADQAAREAAIKTPPDTSTLLIAGKRTADGSEFEKRTADGSEFESPKKKAKVE

SEQ ID NO: 2053 - protein, 2088 aa, synthetic construct
MPAAKRVKLDGGDKKYSIGLDIGTNSVGWAVITDEYKVPSKKFKVLGNTDRHSIKKNLIGALLFDSGETAEATRLKRTARRRYTRRKNRICYLQEIFSNEMAKVDDSFFHRLEESFLVEEDKKHERHPIFGNIVDEVAYHEKYPTIYHLRKKLVDSTDKADLRLIYLALAHMIKFRGHFLIEGDLNPDNSDVDKLFIQLVQTYNQLFEENPINASGVDAKAILSARLSKSRRLENLIAQLPGEKKNGLFGNLIALSLGLTPNFKSNFDLAEDAKLQLSKDTYDDDLDNLLAQIGDQYADLFLAAKNLSDAILLSDILRVNTEITKAPLSASMIKRYDEHHQDLTLLKALVRQQLPEKYKEIFFDQSKNGYAGYIDGGASQEEFYKFIKPILEKMDGTEELLVKLNREDLLRKQRTFDNGSIPHQIHLGELHAILRRQEDFYPFLKDNREKIEKILTFRIPYYVGPLARGNSRFAWMTRKSEETITPWNFEEVVDKGASAQSFIERMTNFDKNLPNEKVLPKHSLLYEYFTVYNELTKVKYVTEGMRKPAFLSGEQKKAIVDLLFKTNRKVTVKQLKEDYFKKIECFDSVEISGVEDRFNASLGTYHDLLKIIKDKDFLDNEENEDILEDIVLTLTLFEDREMIEERLKTYAHLFDDKVMKQLKRRRYTGWGRLSRKLINGIRDKQSGKTILDFLKSDGFANRNFMQLIHDDSLTFKEDIQKAQVSGQGDSLHEHIANLAGSPAIKKGILQTVKVVDELVKVMGRHKPENIVIEMARENQTTQKGQKNSRERMKRIEEGIKELGSQILKEHPVENTQLQNEKLYLYYLQNGRDMYVDQELDINRLSDYDVDHIVPQSFLKDDSIDNKVLTRSDKARGKSDNVPSEEVVKKMKNYWRQLLNAKLITQRKFDNLTKAERGGLSELDKAGFIKRQLVETRQITKHVAQILDSRMNTKYDENDKLIREVKVITLKSKLVSDFRKDFQFYKVREINNYHHAHDAYLNAVVGTALIKKYPKLESEFVYGDYKVYDVRKMIAKSEQEIGKATAKYFFYSNIMNFFKTEITLANGEIRKRPLIETNGETGEIVWDKGRDFATVRKVLSMPQVNIVKKTEVQTGGFSKESILPKRNSDKLIARKKDWDPKKYGGFDSPTVAYSVLVVAKVEKGKSKKLKSVKELLGITIMERSSFEKNPIDFLEAKGYKEVKKDLIIKLPKYSLFELENGRKRMLASAGELQKGNELALPSKYVNFLYLASHYEKLKGSPEDNEQKQLFVEQHKHYLDEIIEQISEFSKRVILADANLDKVLSAYNKHRDKPIREQAENIIHLFTLTNLGAPAAFKYFDTTIDRKRYTSTKEVLDATLIHQSITGLYETRIDLSQLGGDGGGSSGGLGIEDEYRLHETSTEPDVSLGSTWLSDFPQAWAETGGMGLAVRQAPLIIPLKATSTPVSIQQYPMSHEARLGIKPHIQRLLDQGILVPCQSPWNTPLLPVKKPGTNDYRPVQDLREVNKRVEDIHPTVPNPYNLLSGLPPSHQWYTVLDLKDAFFCLRLHPTSQPLFAFEWRDPGMGISGQLTWTRLPQGFKNSPTLFNEALHRDLADFRIQHPDLILLQYVDDILLAATSELDCQQGTRALLQTLGDLGYRASAKKAQICQKQVKYLGYLLREGQRWLTEARKETVMGQPVPKTPRQLREFLGKAGFCRLFIPGFAEMAAPLYPLTKPGTLFSWGPDQQKAYQEIKQALLTAPALGLPDLTKPFELFVDEKQGYAKGVLTQKLGPWRRPVAYLSKKLDPVAAGWPPCLRMVAAIAVLTKDAGKLTMGQPLVILAPHAVEALVKQPPDRWLSNARMTHYQAMLLDTDRVQFGPVVALNPATLLPLPEEGAPHDCLEILAETHGTRPDLTDQPIPDADHTWYTDGSSFLQEGQRKAGAAVTTETEVIWAGALPAGTSAQRAELIALTQALKMAEGKRLNVYTDSRYAFATAHIHGEIYRRRGWLTSEGREIKNKSEILALLKALFLPKRLSIIHCLGHQKGDSAEARGNRLADQAAREAAIKTPPDTSTLLIAGKRTADGSEFEKRTADGSEFESPKKKAKVE

SEQ ID NO: 2054 - protein, 2096 aa, synthetic construct
MPAAKRVKLDGGDKKYSIGLDIGTNSVGWAVITDEYKVPSKKFKVLGNTDRHSIKKNLIGALLFDSGETAEATRLKRTARRRYTRRKNRICYLQEIFSNEMAKVDDSFFHRLEESFLVEEDKKHERHPIFGNIVDEVAYHEKYPTIYHLRKKLVDSTDKADLRLIYLALAHMIKFRGHFLIEGDLNPDNSDVDKLFIQLVQTYNQLFEENPINASGVDAKAILSARLSKSRRLENLIAQLPGEKKNGLFGNLIALSLGLTPNFKSNFDLAEDAKLQLSKDTYDDDLDNLLAQIGDQYADLFLAAKNLSDAILLSDILRVNTEITKAPLSASMIKRYDEHHQDLTLLKALVRQQLPEKYKEIFFDQSKNGYAGYIDGGASQEEFYKFIKPILEKMDGTEELLVKLNREDLLRKQRTFDNGSIPHQIHLGELHAILRRQEDFYPFLKDNREKIEKILTFRIPYYVGPLARGNSRFAWMTRKSEETITPWNFEEVVDKGASAQSFIERMTNFDKNLPNEKVLPKHSLLYEYFTVYNELTKVKYVTEGMRKPAFLSGEQKKAIVDLLFKTNRKVTVKQLKEDYFKKIECFDSVEISGVEDRFNASLGTYHDLLKIIKDKDFLDNEENEDILEDIVLTLTLFEDREMIEERLKTYAHLFDDKVMKQLKRRRYTGWGRLSRKLINGIRDKQSGKTILDFLKSDGFANRNFMQLIHDDSLTFKEDIQKAQVSGQGDSLHEHIANLAGSPAIKKGILQTVKVVDELVKVMGRHKPENIVIEMARENQTTQKGQKNSRERMKRIEEGIKELGSQILKEHPVENTQLQNEKLYLYYLQNGRDMYVDQELDINRLSDYDVDHIVPQSFLKDDSIDNKVLTRSDKARGKSDNVPSEEVVKKMKNYWRQLLNAKLITQRKFDNLTKAERGGLSELDKAGFIKRQLVETRQITKHVAQILDSRMNTKYDENDKLIREVKVITLKSKLVSDFRKDFQFYKVREINNYHHAHDAYLNAVVGTALIKKYPKLESEFVYGDYKVYDVRKMIAKSEQEIGKATAKYFFYSNIMNFFKTEITLANGEIRKRPLIETNGETGEIVWDKGRDFATVRKVLSMPQVNIVKKTEVQTGGFSKESILPKRNSDKLIARKKDWDPKKYGGFDSPTVAYSVLVVAKVEKGKSKKLKSVKELLGITIMERSSFEKNPIDFLEAKGYKEVKKDLIIKLPKYSLFELENGRKRMLASAGELQKGNELALPSKYVNFLYLASHYEKLKGSPEDNEQKQLFVEQHKHYLDEIIEQISEFSKRVILADANLDKVLSAYNKHRDKPIREQAENIIHLFTLTNLGAPAAFKYFDTTIDRKRYTSTKEVLDATLIHQSITGLYETRIDLSQLGGDGGEAAAKGGGPAPGGLGIEDEYRLHETSTEPDVSLGSTWLSDFPQAWAETGGMGLAVRQAPLIIPLKATSTPVSIQQYPMSHEARLGIKPHIQRLLDQGILVPCQSPWNTPLLPVKKPGTNDYRPVQDLREVNKRVEDIHPTVPNPYNLLSGLPPSHQWYTVLDLKDAFFCLRLHPTSQPLFAFEWRDPGMGISGQLTWTRLPQGFKNSPTLFNEALHRDLADFRIQHPDLILLQYVDDILLAATSELDCQQGTRALLQTLGDLGYRASAKKAQICQKQVKYLGYLLREGQRWLTEARKETVMGQPVPKTPRQLREFLGKAGFCRLFIPGFAEMAAPLYPLTKPGTLFSWGPDQQKAYQEIKQALLTAPALGLPDLTKPFELFVDEKQGYAKGVLTQKLGPWRRPVAYLSKKLDPVAAGWPPCLRMVAAIAVLTKDAGKLTMGQPLVILAPHAVEALVKQPPDRWLSNARMTHYQAMLLDTDRVQFGPVVALNPATLLPLPEEGAPHDCLEILAETHGTRPDLTDQPIPDADHTWYTDGSSFLQEGQRKAGAAVTTETEVIWAGALPAGTSAQRAELIALTQALKMAEGKRLNVYTDSRYAFATAHIHGEIYRRRGWLTSEGREIKNKSEILALLKALFLPKRLSIIHCLGHQKGDSAEARGNRLADQAAREAAIKTPPDTSTLLIAGKRTADGSEFEKRTADGSEFESPKKKAKVE

SEQ ID NO: 2055 - protein, 2096 aa, synthetic construct
MPAAKRVKLDGGDKKYSIGLDIGTNSVGWAVITDEYKVPSKKFKVLGNTDRHSIKKNLIGALLFDSGETAEATRLKRTARRRYTRRKNRICYLQEIFSNEMAKVDDSFFHRLEESFLVEEDKKHERHPIFGNIVDEVAYHEKYPTIYHLRKKLVDSTDKADLRLIYLALAHMIKFRGHFLIEGDLNPDNSDVDKLFIQLVQTYNQLFEENPINASGVDAKAILSARLSKSRRLENLIAQLPGEKKNGLFGNLIALSLGLTPNFKSNFDLAEDAKLQLSKDTYDDDLDNLLAQIGDQYADLFLAAKNLSDAILLSDILRVNTEITKAPLSASMIKRYDEHHQDLTLLKALVRQQLPEKYKEIFFDQSKNGYAGYIDGGASQEEFYKFIKPILEKMDGTEELLVKLNREDLLRKQRTFDNGSIPHQIHLGELHAILRRQEDFYPFLKDNREKIEKILTFRIPYYVGPLARGNSRFAWMTRKSEETITPWNFEEVVDKGASAQSFIERMTNFDKNLPNEKVLPKHSLLYEYFTVYNELTKVKYVTEGMRKPAFLSGEQKKAIVDLLFKTNRKVTVKQLKEDYFKKIECFDSVEISGVEDRFNASLGTYHDLLKIIKDKDFLDNEENEDILEDIVLTLTLFEDREMIEERLKTYAHLFDDKVMKQLKRRRYTGWGRLSRKLINGIRDKQSGKTILDFLKSDGFANRNFMQLIHDDSLTFKEDIQKAQVSGQGDSLHEHIANLAGSPAIKKGILQTVKVVDELVKVMGRHKPENIVIEMARENQTTQKGQKNSRERMKRIEEGIKELGSQILKEHPVENTQLQNEKLYLYYLQNGRDMYVDQELDINRLSDYDVDHIVPQSFLKDDSIDNKVLTRSDKARGKSDNVPSEEVVKKMKNYWRQLLNAKLITQRKFDNLTKAERGGLSELDKAGFIKRQLVETRQITKHVAQILDSRMNTKYDENDKLIREVKVITLKSKLVSDFRKDFQFYKVREINNYHHAHDAYLNAVVGTALIKKYPKLESEFVYGDYKVYDVRKMIAKSEQEIGKATAKYFFYSNIMNFFKTEITLANGEIRKRPLIETNGETGEIVWDKGRDFATVRKVLSMPQVNIVKKTEVQTGGFSKESILPKRNSDKLIARKKDWDPKKYGGFDSPTVAYSVLVVAKVEKGKSKKLKSVKELLGITIMERSSFEKNPIDFLEAKGYKEVKKDLIIKLPKYSLFELENGRKRMLASAGELQKGNELALPSKYVNFLYLASHYEKLKGSPEDNEQKQLFVEQHKHYLDEIIEQISEFSKRVILADANLDKVLSAYNKHRDKPIREQAENIIHLFTLTNLGAPAAFKYFDTTIDRKRYTSTKEVLDATLIHQSITGLYETRIDLSQLGGDGGEAAAKGGSGSSGGLGIEDEYRLHETSTEPDVSLGSTWLSDFPQAWAETGGMGLAVRQAPLIIPLKATSTPVSIQQYPMSHEARLGIKPHIQRLLDQGILVPCQSPWNTPLLPVKKPGTNDYRPVQDLREVNKRVEDIHPTVPNPYNLLSGLPPSHQWYTVLDLKDAFFCLRLHPTSQPLFAFEWRDPGMGISGQLTWTRLPQGFKNSPTLFNEALHRDLADFRIQHPDLILLQYVDDILLAATSELDCQQGTRALLQTLGDLGYRASAKKAQICQKQVKYLGYLLREGQRWLTEARKETVMGQPVPKTPRQLREFLGKAGFCRLFIPGFAEMAAPLYPLTKPGTLFSWGPDQQKAYQEIKQALLTAPALGLPDLTKPFELFVDEKQGYAKGVLTQKLGPWRRPVAYLSKKLDPVAAGWPPCLRMVAAIAVLTKDAGKLTMGQPLVILAPHAVEALVKQPPDRWLSNARMTHYQAMLLDTDRVQFGPVVALNPATLLPLPEEGAPHDCLEILAETHGTRPDLTDQPIPDADHTWYTDGSSFLQEGQRKAGAAVTTETEVIWAGALPAGTSAQRAELIALTQALKMAEGKRLNVYTDSRYAFATAHIHGEIYRRRGWLTSEGREIKNKSEILALLKALFLPKRLSIIHCLGHQKGDSAEARGNRLADQAAREAAIKTPPDTSTLLIAGKRTADGSEFEKRTADGSEFESPKKKAKVE

SEQ ID NO: 2056 - protein, 2097 aa, synthetic construct
MPAAKRVKLDGGDKKYSIGLDIGTNSVGWAVITDEYKVPSKKFKVLGNTDRHSIKKNLIGALLFDSGETAEATRLKRTARRRYTRRKNRICYLQEIFSNEMAKVDDSFFHRLEESFLVEEDKKHERHPIFGNIVDEVAYHEKYPTIYHLRKKLVDSTDKADLRLIYLALAHMIKFRGHFLIEGDLNPDNSDVDKLFIQLVQTYNQLFEENPINASGVDAKAILSARLSKSRRLENLIAQLPGEKKNGLFGNLIALSLGLTPNFKSNFDLAEDAKLQLSKDTYDDDLDNLLAQIGDQYADLFLAAKNLSDAILLSDILRVNTEITKAPLSASMIKRYDEHHQDLTLLKALVRQQLPEKYKEIFFDQSKNGYAGYIDGGASQEEFYKFIKPILEKMDGTEELLVKLNREDLLRKQRTFDNGSIPHQIHLGELHAILRRQEDFYPFLKDNREKIEKILTFRIPYYVGPLARGNSRFAWMTRKSEETITPWNFEEVVDKGASAQSFIERMTNFDKNLPNEKVLPKHSLLYEYFTVYNELTKVKYVTEGMRKPAFLSGEQKKAIVDLLFKTNRKVTVKQLKEDYFKKIECFDSVEISGVEDRFNASLGTYHDLLKIIKDKDFLDNEENEDILEDIVLTLTLFEDREMIEERLKTYAHLFDDKVMKQLKRRRYTGWGRLSRKLINGIRDKQSGKTILDFLKSDGFANRNFMQLIHDDSLTFKEDIQKAQVSGQGDSLHEHIANLAGSPAIKKGILQTVKVVDELVKVMGRHKPENIVIEMARENQTTQKGQKNSRERMKRIEEGIKELGSQILKEHPVENTQLQNEKLYLYYLQNGRDMYVDQELDINRLSDYDVDHIVPQSFLKDDSIDNKVLTRSDKARGKSDNVPSEEVVKKMKNYWRQLLNAKLITQRKFDNLTKAERGGLSELDKAGFIKRQLVETRQITKHVAQILDSRMNTKYDENDKLIREVKVITLKSKLVSDFRKDFQFYKVREINNYHHAHDAYLNAVVGTALIKKYPKLESEFVYGDYKVYDVRKMIAKSEQEIGKATAKYFFYSNIMNFFKTEITLANGEIRKRPLIETNGETGEIVWDKGRDFATVRKVLSMPQVNIVKKTEVQTGGFSKESILPKRNSDKLIARKKDWDPKKYGGFDSPTVAYSVLVVAKVEKGKSKKLKSVKELLGITIMERSSFEKNPIDFLEAKGYKEVKKDLIIKLPKYSLFELENGRKRMLASAGELQKGNELALPSKYVNFLYLASHYEKLKGSPEDNEQKQLFVEQHKHYLDEIIEQISEFSKRVILADANLDKVLSAYNKHRDKPIREQAENIIHLFTLTNLGAPAAFKYFDTTIDRKRYTSTKEVLDATLIHQSITGLYETRIDLSQLGGDGGGSAGSAAGSGEFGGLGIEDEYRLHETSTEPDVSLGSTWLSDFPQAWAETGGMGLAVRQAPLIIPLKATSTPVSIQQYPMSHEARLGIKPHIQRLLDQGILVPCQSPWNTPLLPVKKPGTNDYRPVQDLREVNKRVEDIHPTVPNPYNLLSGLPPSHQWYTVLDLKDAFFCLRLHPTSQPLFAFEWRDPGMGISGQLTWTRLPQGFKNSPTLFNEALHRDLADFRIQHPDLILLQYVDDILLAATSELDCQQGTRALLQTLGDLGYRASAKKAQICQKQVKYLGYLLREGQRWLTEARKETVMGQPVPKTPRQLREFLGKAGFCRLFIPGFAEMAAPLYPLTKPGTLFSWGPDQQKAYQEIKQALLTAPALGLPDLTKPFELFVDEKQGYAKGVLTQKLGPWRRPVAYLSKKLDPVAAGWPPCLRMVAAIAVLTKDAGKLTMGQPLVILAPHAVEALVKQPPDRWLSNARMTHYQAMLLDTDRVQFGPVVALNPATLLPLPEEGAPHDCLEILAETHGTRPDLTDQPIPDADHTWYTDGSSFLQEGQRKAGAAVTTETEVIWAGALPAGTSAQRAELIALTQALKMAEGKRLNVYTDSRYAFATAHIHGEIYRRRGWLTSEGREIKNKSEILALLKALFLPKRLSIIHCLGHQKGDSAEARGNRLADQAAREAAIKTPPDTSTLLIAGKRTADGSEFEKRTADGSEFESPKKKAKVE

SEQ ID NO: 2057 - protein, 2091 aa, synthetic construct
MPAAKRVKLDGGDKKYSIGLDIGTNSVGWAVITDEYKVPSKKFKVLGNTDRHSIKKNLIGALLFDSGETAEATRLKRTARRRYTRRKNRICYLQEIFSNEMAKVDDSFFHRLEESFLVEEDKKHERHPIFGNIVDEVAYHEKYPTIYHLRKKLVDSTDKADLRLIYLALAHMIKFRGHFLIEGDLNPDNSDVDKLFIQLVQTYNQLFEENPINASGVDAKAILSARLSKSRRLENLIAQLPGEKKNGLFGNLIALSLGLTPNFKSNFDLAEDAKLQLSKDTYDDDLDNLLAQIGDQYADLFLAAKNLSDAILLSDILRVNTEITKAPLSASMIKRYDEHHQDLTLLKALVRQQLPEKYKEIFFDQSKNGYAGYIDGGASQEEFYKFIKPILEKMDGTEELLVKLNREDLLRKQRTFDNGSIPHQIHLGELHAILRRQEDFYPFLKDNREKIEKILTFRIPYYVGPLARGNSRFAWMTRKSEETITPWNFEEVVDKGASAQSFIERMTNFDKNLPNEKVLPKHSLLYEYFTVYNELTKVKYVTEGMRKPAFLSGEQKKAIVDLLFKTNRKVTVKQLKEDYFKKIECFDSVEISGVEDRFNASLGTYHDLLKIIKDKDFLDNEENEDILEDIVLTLTLFEDREMIEERLKTYAHLFDDKVMKQLKRRRYTGWGRLSRKLINGIRDKQSGKTILDFLKSDGFANRNFMQLIHDDSLTFKEDIQKAQVSGQGDSLHEHIANLAGSPAIKKGILQTVKVVDELVKVMGRHKPENIVIEMARENQTTQKGQKNSRERMKRIEEGIKELGSQILKEHPVENTQLQNEKLYLYYLQNGRDMYVDQELDINRLSDYDVDHIVPQSFLKDDSIDNKVLTRSDKARGKSDNVPSEEVVKKMKNYWRQLLNAKLITQRKFDNLTKAERGGLSELDKAGFIKRQLVETRQITKHVAQILDSRMNTKYDENDKLIREVKVITLKSKLVSDFRKDFQFYKVREINNYHHAHDAYLNAVVGTALIKKYPKLESEFVYGDYKVYDVRKMIAKSEQEIGKATAKYFFYSNIMNFFKTEITLANGEIRKRPLIETNGETGEIVWDKGRDFATVRKVLSMPQVNIVKKTEVQTGGFSKESILPKRNSDKLIARKKDWDPKKYGGFDSPTVAYSVLVVAKVEKGKSKKLKSVKELLGITIMERSSFEKNPIDFLEAKGYKEVKKDLIIKLPKYSLFELENGRKRMLASAGELQKGNELALPSKYVNFLYLASHYEKLKGSPEDNEQKQLFVEQHKHYLDEIIEQISEFSKRVILADANLDKVLSAYNKHRDKPIREQAENIIHLFTLTNLGAPAAFKYFDTTIDRKRYTSTKEVLDATLIHQSITGLYETRIDLSQLGGDGGPAPGSSGGLGIEDEYRLHETSTEPDVSLGSTWLSDFPQAWAETGGMGLAVRQAPLIIPLKATSTPVSIQQYPMSHEARLGIKPHIQRLLDQGILVPCQSPWNTPLLPVKKPGTNDYRPVQDLREVNKRVEDIHPTVPNPYNLLSGLPPSHQWYTVLDLKDAFFCLRLHPTSQPLFAFEWRDPGMGISGQLTWTRLPQGFKNSPTLFNEALHRDLADFRIQHPDLILLQYVDDILLAATSELDCQQGTRALLQTLGDLGYRASAKKAQICQKQVKYLGYLLREGQRWLTEARKETVMGQPVPKTPRQLREFLGKAGFCRLFIPGFAEMAAPLYPLTKPGTLFSWGPDQQKAYQEIKQALLTAPALGLPDLTKPFELFVDEKQGYAKGVLTQKLGPWRRPVAYLSKKLDPVAAGWPPCLRMVAAIAVLTKDAGKLTMGQPLVILAPHAVEALVKQPPDRWLSNARMTHYQAMLLDTDRVQFGPVVALNPATLLPLPEEGAPHDCLEILAETHGTRPDLTDQPIPDADHTWYTDGSSFLQEGQRKAGAAVTTETEVIWAGALPAGTSAQRAELIALTQALKMAEGKRLNVYTDSRYAFATAHIHGEIYRRRGWLTSEGREIKNKSEILALLKALFLPKRLSIIHCLGHQKGDSAEARGNRLADQAAREAAIKTPPDTSTLLIAGKRTADGSEFEKRTADGSEFESPKKKAKVE

SEQ ID NO: 2058 - protein, 2094 aa, synthetic construct
MPAAKRVKLDGGDKKYSIGLDIGTNSVGWAVITDEYKVPSKKFKVLGNTDRHSIKKNLIGALLFDSGETAEATRLKRTARRRYTRRKNRICYLQEIFSNEMAKVDDSFFHRLEESFLVEEDKKHERHPIFGNIVDEVAYHEKYPTIYHLRKKLVDSTDKADLRLIYLALAHMIKFRGHFLIEGDLNPDNSDVDKLFIQLVQTYNQLFEENPINASGVDAKAILSARLSKSRRLENLIAQLPGEKKNGLFGNLIALSLGLTPNFKSNFDLAEDAKLQLSKDTYDDDLDNLLAQIGDQYADLFLAAKNLSDAILLSDILRVNTEITKAPLSASMIKRYDEHHQDLTLLKALVRQQLPEKYKEIFFDQSKNGYAGYIDGGASQEEFYKFIKPILEKMDGTEELLVKLNREDLLRKQRTFDNGSIPHQIHLGELHAILRRQEDFYPFLKDNREKIEKILTFRIPYYVGPLARGNSRFAWMTRKSEETITPWNFEEVVDKGASAQSFIERMTNFDKNLPNEKVLPKHSLLYEYFTVYNELTKVKYVTEGMRKPAFLSGEQKKAIVDLLFKTNRKVTVKQLKEDYFKKIECFDSVEISGVEDRFNASLGTYHDLLKIIKDKDFLDNEENEDILEDIVLTLTLFEDREMIEERLKTYAHLFDDKVMKQLKRRRYTGWGRLSRKLINGIRDKQSGKTILDFLKSDGFANRNFMQLIHDDSLTFKEDIQKAQVSGQGDSLHEHIANLAGSPAIKKGILQTVKVVDELVKVMGRHKPENIVIEMARENQTTQKGQKNSRERMKRIEEGIKELGSQILKEHPVENTQLQNEKLYLYYLQNGRDMYVDQELDINRLSDYDVDHIVPQSFLKDDSIDNKVLTRSDKARGKSDNVPSEEVVKKMKNYWRQLLNAKLITQRKFDNLTKAERGGLSELDKAGFIKRQLVETRQITKHVAQILDSRMNTKYDENDKLIREVKVITLKSKLVSDFRKDFQFYKVREINNYHHAHDAYLNAVVGTALIKKYPKLESEFVYGDYKVYDVRKMIAKSEQEIGKATAKYFFYSNIMNFFKTEITLANGEIRKRPLIETNGETGEIVWDKGRDFATVRKVLSMPQVNIVKKTEVQTGGFSKESILPKRNSDKLIARKKDWDPKKYGGFDSPTVAYSVLVVAKVEKGKSKKLKSVKELLGITIMERSSFEKNPIDFLEAKGYKEVKKDLIIKLPKYSLFELENGRKRMLASAGELQKGNELALPSKYVNFLYLASHYEKLKGSPEDNEQKQLFVEQHKHYLDEIIEQISEFSKRVILADANLDKVLSAYNKHRDKPIREQAENIIHLFTLTNLGAPAAFKYFDTTIDRKRYTSTKEVLDATLIHQSITGLYETRIDLSQLGGDGGGGSPAPGGGGGLGIEDEYRLHETSTEPDVSLGSTWLSDFPQAWAETGGMGLAVRQAPLIIPLKATSTPVSIQQYPMSHEARLGIKPHIQRLLDQGILVPCQSPWNTPLLPVKKPGTNDYRPVQDLREVNKRVEDIHPTVPNPYNLLSGLPPSHQWYTVLDLKDAFFCLRLHPTSQPLFAFEWRDPGMGISGQLTWTRLPQGFKNSPTLFNEALHRDLADFRIQHPDLILLQYVDDILLAATSELDCQQGTRALLQTLGDLGYRASAKKAQICQKQVKYLGYLLREGQRWLTEARKETVMGQPVPKTPRQLREFLGKAGFCRLFIPGFAEMAAPLYPLTKPGTLFSWGPDQQKAYQEIKQALLTAPALGLPDLTKPFELFVDEKQGYAKGVLTQKLGPWRRPVAYLSKKLDPVAAGWPPCLRMVAAIAVLTKDAGKLTMGQPLVILAPHAVEALVKQPPDRWLSNARMTHYQAMLLDTDRVQFGPVVALNPATLLPLPEEGAPHDCLEILAETHGTRPDLTDQPIPDADHTWYTDGSSFLQEGQRKAGAAVTTETEVIWAGALPAGTSAQRAELIALTQALKMAEGKRLNVYTDSRYAFATAHIHGEIYRRRGWLTSEGREIKNKSEILALLKALFLPKRLSIIHCLGHQKGDSAEARGNRLADQAAREAAIKTPPDTSTLLIAGKRTADGSEFEKRTADGSEFESPKKKAKVE

SEQ ID NO: 2059 - protein, 2096 aa, synthetic construct
MPAAKRVKLDGGDKKYSIGLDIGTNSVGWAVITDEYKVPSKKFKVLGNTDRHSIKKNLIGALLFDSGETAEATRLKRTARRRYTRRKNRICYLQEIFSNEMAKVDDSFFHRLEESFLVEEDKKHERHPIFGNIVDEVAYHEKYPTIYHLRKKLVDSTDKADLRLIYLALAHMIKFRGHFLIEGDLNPDNSDVDKLFIQLVQTYNQLFEENPINASGVDAKAILSARLSKSRRLENLIAQLPGEKKNGLFGNLIALSLGLTPNFKSNFDLAEDAKLQLSKDTYDDDLDNLLAQIGDQYADLFLAAKNLSDAILLSDILRVNTEITKAPLSASMIKRYDEHHQDLTLLKALVRQQLPEKYKEIFFDQSKNGYAGYIDGGASQEEFYKFIKPILEKMDGTEELLVKLNREDLLRKQRTFDNGSIPHQIHLGELHAILRRQEDFYPFLKDNREKIEKILTFRIPYYVGPLARGNSRFAWMTRKSEETITPWNFEEVVDKGASAQSFIERMTNFDKNLPNEKVLPKHSLLYEYFTVYNELTKVKYVTEGMRKPAFLSGEQKKAIVDLLFKTNRKVTVKQLKEDYFKKIECFDSVEISGVEDRFNASLGTYHDLLKIIKDKDFLDNEENEDILEDIVLTLTLFEDREMIEERLKTYAHLFDDKVMKQLKRRRYTGWGRLSRKLINGIRDKQSGKTILDFLKSDGFANRNFMQLIHDDSLTFKEDIQKAQVSGQGDSLHEHIANLAGSPAIKKGILQTVKVVDELVKVMGRHKPENIVIEMARENQTTQKGQKNSRERMKRIEEGIKELGSQILKEHPVENTQLQNEKLYLYYLQNGRDMYVDQELDINRLSDYDVDHIVPQSFLKDDSIDNKVLTRSDKARGKSDNVPSEEVVKKMKNYWRQLLNAKLITQRKFDNLTKAERGGLSELDKAGFIKRQLVETRQITKHVAQILDSRMNTKYDENDKLIREVKVITLKSKLVSDFRKDFQFYKVREINNYHHAHDAYLNAVVGTALIKKYPKLESEFVYGDYKVYDVRKMIAKSEQEIGKATAKYFFYSNIMNFFKTEITLANGEIRKRPLIETNGETGEIVWDKGRDFATVRKVLSMPQVNIVKKTEVQTGGFSKESILPKRNSDKLIARKKDWDPKKYGGFDSPTVAYSVLVVAKVEKGKSKKLKSVKELLGITIMERSSFEKNPIDFLEAKGYKEVKKDLIIKLPKYSLFELENGRKRMLASAGELQKGNELALPSKYVNFLYLASHYEKLKGSPEDNEQKQLFVEQHKHYLDEIIEQISEFSKRVILADANLDKVLSAYNKHRDKPIREQAENIIHLFTLTNLGAPAAFKYFDTTIDRKRYTSTKEVLDATLIHQSITGLYETRIDLSQLGGDGGGGGGGSEAAAKGGLGIEDEYRLHETSTEPDVSLGSTWLSDFPQAWAETGGMGLAVRQAPLIIPLKATSTPVSIQQYPMSHEARLGIKPHIQRLLDQGILVPCQSPWNTPLLPVKKPGTNDYRPVQDLREVNKRVEDIHPTVPNPYNLLSGLPPSHQWYTVLDLKDAFFCLRLHPTSQPLFAFEWRDPGMGISGQLTWTRLPQGFKNSPTLFNEALHRDLADFRIQHPDLILLQYVDDILLAATSELDCQQGTRALLQTLGDLGYRASAKKAQICQKQVKYLGYLLREGQRWLTEARKETVMGQPVPKTPRQLREFLGKAGFCRLFIPGFAEMAAPLYPLTKPGTLFSWGPDQQKAYQEIKQALLTAPALGLPDLTKPFELFVDEKQGYAKGVLTQKLGPWRRPVAYLSKKLDPVAAGWPPCLRMVAAIAVLTKDAGKLTMGQPLVILAPHAVEALVKQPPDRWLSNARMTHYQAMLLDTDRVQFGPVVALNPATLLPLPEEGAPHDCLEILAETHGTRPDLTDQPIPDADHTWYTDGSSFLQEGQRKAGAAVTTETEVIWAGALPAGTSAQRAELIALTQALKMAEGKRLNVYTDSRYAFATAHIHGEIYRRRGWLTSEGREIKNKSEILALLKALFLPKRLSIIHCLGHQKGDSAEARGNRLADQAAREAAIKTPPDTSTLLIAGKRTADGSEFEKRTADGSEFESPKKKAKVE

SEQ ID NO: 2060 - protein, 2094 aa, synthetic construct
MPAAKRVKLDGGDKKYSIGLDIGTNSVGWAVITDEYKVPSKKFKVLGNTDRHSIKKNLIGALLFDSGETAEATRLKRTARRRYTRRKNRICYLQEIFSNEMAKVDDSFFHRLEESFLVEEDKKHERHPIFGNIVDEVAYHEKYPTIYHLRKKLVDSTDKADLRLIYLALAHMIKFRGHFLIEGDLNPDNSDVDKLFIQLVQTYNQLFEENPINASGVDAKAILSARLSKSRRLENLIAQLPGEKKNGLFGNLIALSLGLTPNFKSNFDLAEDAKLQLSKDTYDDDLDNLLAQIGDQYADLFLAAKNLSDAILLSDILRVNTEITKAPLSASMIKRYDEHHQDLTLLKALVRQQLPEKYKEIFFDQSKNGYAGYIDGGASQEEFYKFIKPILEKMDGTEELLVKLNREDLLRKQRTFDNGSIPHQIHLGELHAILRRQEDFYPFLKDNREKIEKILTFRIPYYVGPLARGNSRFAWMTRKSEETITPWNFEEVVDKGASAQSFIERMTNFDKNLPNEKVLPKHSLLYEYFTVYNELTKVKYVTEGMRKPAFLSGEQKKAIVDLLFKTNRKVTVKQLKEDYFKKIECFDSVEISGVEDRFNASLGTYHDLLKIIKDKDFLDNEENEDILEDIVLTLTLFEDREMIEERLKTYAHLFDDKVMKQLKRRRYTGWGRLSRKLINGIRDKQSGKTILDFLKSDGFANRNFMQLIHDDSLTFKEDIQKAQVSGQGDSLHEHIANLAGSPAIKKGILQTVKVVDELVKVMGRHKPENIVIEMARENQTTQKGQKNSRERMKRIEEGIKELGSQILKEHPVENTQLQNEKLYLYYLQNGRDMYVDQELDINRLSDYDVDHIVPQSFLKDDSIDNKVLTRSDKARGKSDNVPSEEVVKKMKNYWRQLLNAKLITQRKFDNLTKAERGGLSELDKAGFIKRQLVETRQITKHVAQILDSRMNTKYDENDKLIREVKVITLKSKLVSDFRKDFQFYKVREINNYHHAHDAYLNAVVGTALIKKYPKLESEFVYGDYKVYDVRKMIAKSEQEIGKATAKYFFYSNIMNFFKTEITLANGEIRKRPLIETNGETGEIVWDKGRDFATVRKVLSMPQVNIVKKTEVQTGGFSKESILPKRNSDKLIARKKDWDPKKYGGFDSPTVAYSVLVVAKVEKGKSKKLKSVKELLGITIMERSSFEKNPIDFLEAKGYKEVKKDLIIKLPKYSLFELENGRKRMLASAGELQKGNELALPSKYVNFLYLASHYEKLKGSPEDNEQKQLFVEQHKHYLDEIIEQISEFSKRVILADANLDKVLSAYNKHRDKPIREQAENIIHLFTLTNLGAPAAFKYFDTTIDRKRYTSTKEVLDATLIHQSITGLYETRIDLSQLGGDGGGSSPAPGGGGGLGIEDEYRLHETSTEPDVSLGSTWLSDFPQAWAETGGMGLAVRQAPLIIPLKATSTPVSIQQYPMSHEARLGIKPHIQRLLDQGILVPCQSPWNTPLLPVKKPGTNDYRPVQDLREVNKRVEDIHPTVPNPYNLLSGLPPSHQWYTVLDLKDAFFCLRLHPTSQPLFAFEWRDPGMGISGQLTWTRLPQGFKNSPTLFNEALHRDLADFRIQHPDLILLQYVDDILLAATSELDCQQGTRALLQTLGDLGYRASAKKAQICQKQVKYLGYLLREGQRWLTEARKETVMGQPVPKTPRQLREFLGKAGFCRLFIPGFAEMAAPLYPLTKPGTLFSWGPDQQKAYQEIKQALLTAPALGLPDLTKPFELFVDEKQGYAKGVLTQKLGPWRRPVAYLSKKLDPVAAGWPPCLRMVAAIAVLTKDAGKLTMGQPLVILAPHAVEALVKQPPDRWLSNARMTHYQAMLLDTDRVQFGPVVALNPATLLPLPEEGAPHDCLEILAETHGTRPDLTDQPIPDADHTWYTDGSSFLQEGQRKAGAAVTTETEVIWAGALPAGTSAQRAELIALTQALKMAEGKRLNVYTDSRYAFATAHIHGEIYRRRGWLTSEGREIKNKSEILALLKALFLPKRLSIIHCLGHQKGDSAEARGNRLADQAAREAAIKTPPDTSTLLIAGKRTADGSEFEKRTADGSEFESPKKKAKVE

SEQ ID NO: 2061 - protein, 2094 aa, synthetic construct
MPAAKRVKLDGGDKKYSIGLDIGTNSVGWAVITDEYKVPSKKFKVLGNTDRHSIKKNLIGALLFDSGETAEATRLKRTARRRYTRRKNRICYLQEIFSNEMAKVDDSFFHRLEESFLVEEDKKHERHPIFGNIVDEVAYHEKYPTIYHLRKKLVDSTDKADLRLIYLALAHMIKFRGHFLIEGDLNPDNSDVDKLFIQLVQTYNQLFEENPINASGVDAKAILSARLSKSRRLENLIAQLPGEKKNGLFGNLIALSLGLTPNFKSNFDLAEDAKLQLSKDTYDDDLDNLLAQIGDQYADLFLAAKNLSDAILLSDILRVNTEITKAPLSASMIKRYDEHHQDLTLLKALVRQQLPEKYKEIFFDQSKNGYAGYIDGGASQEEFYKFIKPILEKMDGTEELLVKLNREDLLRKQRTFDNGSIPHQIHLGELHAILRRQEDFYPFLKDNREKIEKILTFRIPYYVGPLARGNSRFAWMTRKSEETITPWNFEEVVDKGASAQSFIERMTNFDKNLPNEKVLPKHSLLYEYFTVYNELTKVKYVTEGMRKPAFLSGEQKKAIVDLLFKTNRKVTVKQLKEDYFKKIECFDSVEISGVEDRFNASLGTYHDLLKIIKDKDFLDNEENEDILEDIVLTLTLFEDREMIEERLKTYAHLFDDKVMKQLKRRRYTGWGRLSRKLINGIRDKQSGKTILDFLKSDGFANRNFMQLIHDDSLTFKEDIQKAQVSGQGDSLHEHIANLAGSPAIKKGILQTVKVVDELVKVMGRHKPENIVIEMARENQTTQKGQKNSRERMKRIEEGIKELGSQILKEHPVENTQLQNEKLYLYYLQNGRDMYVDQELDINRLSDYDVDHIVPQSFLKDDSIDNKVLTRSDKARGKSDNVPSEEVVKKMKNYWRQLLNAKLITQRKFDNLTKAERGGLSELDKAGFIKRQLVETRQITKHVAQILDSRMNTKYDENDKLIREVKVITLKSKLVSDFRKDFQFYKVREINNYHHAHDAYLNAVVGTALIKKYPKLESEFVYGDYKVYDVRKMIAKSEQEIGKATAKYFFYSNIMNFFKTEITLANGEIRKRPLIETNGETGEIVWDKGRDFATVRKVLSMPQVNIVKKTEVQTGGFSKESILPKRNSDKLIARKKDWDPKKYGGFDSPTVAYSVLVVAKVEKGKSKKLKSVKELLGITIMERSSFEKNPIDFLEAKGYKEVKKDLIIKLPKYSLFELENGRKRMLASAGELQKGNELALPSKYVNFLYLASHYEKLKGSPEDNEQKQLFVEQHKHYLDEIIEQISEFSKRVILADANLDKVLSAYNKHRDKPIREQAENIIHLFTLTNLGAPAAFKYFDTTIDRKRYTSTKEVLDATLIHQSITGLYETRIDLSQLGGDGGGGSGGGPAPGGLGIEDEYRLHETSTEPDVSLGSTWLSDFPQAWAETGGMGLAVRQAPLIIPLKATSTPVSIQQYPMSHEARLGIKPHIQRLLDQGILVPCQSPWNTPLLPVKKPGTNDYRPVQDLREVNKRVEDIHPTVPNPYNLLSGLPPSHQWYTVLDLKDAFFCLRLHPTSQPLFAFEWRDPGMGISGQLTWTRLPQGFKNSPTLFNEALHRDLADFRIQHPDLILLQYVDDILLAATSELDCQQGTRALLQTLGDLGYRASAKKAQICQKQVKYLGYLLREGQRWLTEARKETVMGQPVPKTPRQLREFLGKAGFCRLFIPGFAEMAAPLYPLTKPGTLFSWGPDQQKAYQEIKQALLTAPALGLPDLTKPFELFVDEKQGYAKGVLTQKLGPWRRPVAYLSKKLDPVAAGWPPCLRMVAAIAVLTKDAGKLTMGQPLVILAPHAVEALVKQPPDRWLSNARMTHYQAMLLDTDRVQFGPVVALNPATLLPLPEEGAPHDCLEILAETHGTRPDLTDQPIPDADHTWYTDGSSFLQEGQRKAGAAVTTETEVIWAGALPAGTSAQRAELIALTQALKMAEGKRLNVYTDSRYAFATAHIHGEIYRRRGWLTSEGREIKNKSEILALLKALFLPKRLSIIHCLGHQKGDSAEARGNRLADQAAREAAIKTPPDTSTLLIAGKRTADGSEFEKRTADGSEFESPKKKAKVE

SEQ ID NO: 2062 - protein, 2096 aa, synthetic construct
MPAAKRVKLDGGDKKYSIGLDIGTNSVGWAVITDEYKVPSKKFKVLGNTDRHSIKKNLIGALLFDSGETAEATRLKRTARRRYTRRKNRICYLQEIFSNEMAKVDDSFFHRLEESFLVEEDKKHERHPIFGNIVDEVAYHEKYPTIYHLRKKLVDSTDKADLRLIYLALAHMIKFRGHFLIEGDLNPDNSDVDKLFIQLVQTYNQLFEENPINASGVDAKAILSARLSKSRRLENLIAQLPGEKKNGLFGNLIALSLGLTPNFKSNFDLAEDAKLQLSKDTYDDDLDNLLAQIGDQYADLFLAAKNLSDAILLSDILRVNTEITKAPLSASMIKRYDEHHQDLTLLKALVRQQLPEKYKEIFFDQSKNGYAGYIDGGASQEEFYKFIKPILEKMDGTEELLVKLNREDLLRKQRTFDNGSIPHQIHLGELHAILRRQEDFYPFLKDNREKIEKILTFRIPYYVGPLARGNSRFAWMTRKSEETITPWNFEEVVDKGASAQSFIERMTNFDKNLPNEKVLPKHSLLYEYFTVYNELTKVKYVTEGMRKPAFLSGEQKKAIVDLLFKTNRKVTVKQLKEDYFKKIECFDSVEISGVEDRFNASLGTYHDLLKIIKDKDFLDNEENEDILEDIVLTLTLFEDREMIEERLKTYAHLFDDKVMKQLKRRRYTGWGRLSRKLINGIRDKQSGKTILDFLKSDGFANRNFMQLIHDDSLTFKEDIQKAQVSGQGDSLHEHIANLAGSPAIKKGILQTVKVVDELVKVMGRHKPENIVIEMARENQTTQKGQKNSRERMKRIEEGIKELGSQILKEHPVENTQLQNEKLYLYYLQNGRDMYVDQELDINRLSDYDVDHIVPQSFLKDDSIDNKVLTRSDKARGKSDNVPSEEVVKKMKNYWRQLLNAKLITQRKFDNLTKAERGGLSELDKAGFIKRQLVETRQITKHVAQILDSRMNTKYDENDKLIREVKVITLKSKLVSDFRKDFQFYKVREINNYHHAHDAYLNAVVGTALIKKYPKLESEFVYGDYKVYDVRKMIAKSEQEIGKATAKYFFYSNIMNFFKTEITLANGEIRKRPLIETNGETGEIVWDKGRDFATVRKVLSMPQVNIVKKTEVQTGGFSKESILPKRNSDKLIARKKDWDPKKYGGFDSPTVAYSVLVVAKVEKGKSKKLKSVKELLGITIMERSSFEKNPIDFLEAKGYKEVKKDLIIKLPKYSLFELENGRKRMLASAGELQKGNELALPSKYVNFLYLASHYEKLKGSPEDNEQKQLFVEQHKHYLDEIIEQISEFSKRVILADANLDKVLSAYNKHRDKPIREQAENIIHLFTLTNLGAPAAFKYFDTTIDRKRYTSTKEVLDATLIHQSITGLYETRIDLSQLGGDGGGSSPAPEAAAKGGTLGIEDEYRLHETSTEPDVSLGSTWLSDFPQAWAETGGMGLAVRQAPLIIPLKATSTPVSIQQYPMSHEARLGIKPHIQRLLDQGILVPCQSPWNTPLLPVKKPGTNDYRPVQDLREVNKRVEDIHPTVPNPYNLLSGLPPSHQWYTVLDLKDAFFCLRLHPTSQPLFAFEWRDPGMGISGQLTWTRLPQGFKNSPTLFDEALHRDLADFRIQHPDLILLQYVDDILLAATSELDCQQGTRALLQTLGDLGYRASAKKAQICQKQVKYLGYLLREGQRWLTEARKETVMGQPVPKTPRQLREFLGTAGFCRLWIPGFAEMAAPLYPLTKTGTLFSWGPDQQKAYQEIKQALLTAPALGLPDLTKPFELFVDEKQGYAKGVLTQKLGPWRRPVAYLSKKLDPVAAGWPPCLRMVAAIAVLTKDAGKLTMGQPLVILAPHAVEALVKQPPDRWLSNARMTHYQAMLLDTDRVQFGPVVALNPATLLPLPEEGAPHDCLEILAETHGTRPDLTDQPIPDADHTWYTDGSSFLQEGQRKAGAAVTTETEVIWAGALPAGTSAQRAELIALTQALKMAEGKRLNVYTDSRYAFATAHIHGEIYRRRGLLTSEGREIKNKSEILALLKALFLPKRLSIIHCLGHQKGDSAEARGNRLADQAAREAAIKTPPDTSTLLAGKRTADGSEFEKRTADGSEFESPKKKAKVE

SEQ ID NO: 2063 - protein, 2105 aa, synthetic construct
MPAAKRVKLDGGDKKYSIGLDIGTNSVGWAVITDEYKVPSKKFKVLGNTDRHSIKKNLIGALLFDSGETAEATRLKRTARRRYTRRKNRICYLQEIFSNEMAKVDDSFFHRLEESFLVEEDKKHERHPIFGNIVDEVAYHEKYPTIYHLRKKLVDSTDKADLRLIYLALAHMIKFRGHFLIEGDLNPDNSDVDKLFIQLVQTYNQLFEENPINASGVDAKAILSARLSKSRRLENLIAQLPGEKKNGLFGNLIALSLGLTPNFKSNFDLAEDAKLQLSKDTYDDDLDNLLAQIGDQYADLFLAAKNLSDAILLSDILRVNTEITKAPLSASMIKRYDEHHQDLTLLKALVRQQLPEKYKEIFFDQSKNGYAGYIDGGASQEEFYKFIKPILEKMDGTEELLVKLNREDLLRKQRTFDNGSIPHQIHLGELHAILRRQEDFYPFLKDNREKIEKILTFRIPYYVGPLARGNSRFAWMTRKSEETITPWNFEEVVDKGASAQSFIERMTNFDKNLPNEKVLPKHSLLYEYFTVYNELTKVKYVTEGMRKPAFLSGEQKKAIVDLLFKTNRKVTVKQLKEDYFKKIECFDSVEISGVEDRFNASLGTYHDLLKIIKDKDFLDNEENEDILEDIVLTLTLFEDREMIEERLKTYAHLFDDKVMKQLKRRRYTGWGRLSRKLINGIRDKQSGKTILDFLKSDGFANRNFMQLIHDDSLTFKEDIQKAQVSGQGDSLHEHIANLAGSPAIKKGILQTVKVVDELVKVMGRHKPENIVIEMARENQTTQKGQKNSRERMKRIEEGIKELGSQILKEHPVENTQLQNEKLYLYYLQNGRDMYVDQELDINRLSDYDVDHIVPQSFLKDDSIDNKVLTRSDKARGKSDNVPSEEVVKKMKNYWRQLLNAKLITQRKFDNLTKAERGGLSELDKAGFIKRQLVETRQITKHVAQILDSRMNTKYDENDKLIREVKVITLKSKLVSDFRKDFQFYKVREINNYHHAHDAYLNAVVGTALIKKYPKLESEFVYGDYKVYDVRKMIAKSEQEIGKATAKYFFYSNIMNFFKTEITLANGEIRKRPLIETNGETGEIVWDKGRDFATVRKVLSMPQVNIVKKTEVQTGGFSKESILPKRNSDKLIARKKDWDPKKYGGFDSPTVAYSVLVVAKVEKGKSKKLKSVKELLGITIMERSSFEKNPIDFLEAKGYKEVKKDLIIKLPKYSLFELENGRKRMLASAGELQKGNELALPSKYVNFLYLASHYEKLKGSPEDNEQKQLFVEQHKHYLDEIIEQISEFSKRVILADANLDKVLSAYNKHRDKPIREQAENIIHLFTLTNLGAPAAFKYFDTTIDRKRYTSTKEVLDATLIHQSITGLYETRIDLSQLGGDGGGGGGSGGGGSGGGGSGGGGSGGTLGIEDEYRLHETSTEPDVSLGSTWLSDFPQAWAETGGMGLAVRQAPLIIPLKATSTPVSIQQYPMSHEARLGIKPHIQRLLDQGILVPCQSPWNTPLLPVKKPGTNDYRPVQDLREVNKRVEDIHPTVPNPYNLLSGLPPSHQWYTVLDLKDAFFCLRLHPTSQPLFAFEWRDPGMGISGQLTWTRLPQGFKNSPTLFDEALHRDLADFRIQHPDLILLQYVDDILLAATSELDCQQGTRALLQTLGDLGYRASAKKAQICQKQVKYLGYLLREGQRWLTEARKETVMGQPVPKTPRQLREFLGTAGFCRLWIPGFAEMAAPLYPLTKTGTLFSWGPDQQKAYQEIKQALLTAPALGLPDLTKPFELFVDEKQGYAKGVLTQKLGPWRRPVAYLSKKLDPVAAGWPPCLRMVAAIAVLTKDAGKLTMGQPLVILAPHAVEALVKQPPDRWLSNARMTHYQAMLLDTDRVQFGPVVALNPATLLPLPEEGAPHDCLEILAETHGTRPDLTDQPIPDADHTWYTDGSSFLQEGQRKAGAAVTTETEVIWAGALPAGTSAQRAELIALTQALKMAEGKRLNVYTDSRYAFATAHIHGEIYRRRGLLTSEGREIKNKSEILALLKALFLPKRLSIIHCLGHQKGDSAEARGNRLADQAAREAAIKTPPDTSTLLAGKRTADGSEFEKRTADGSEFESPKKKAKVE

SEQ ID NO: 2064 - protein, 2095 aa, synthetic construct
MPAAKRVKLDGGDKKYSIGLDIGTNSVGWAVITDEYKVPSKKFKVLGNTDRHSIKKNLIGALLFDSGETAEATRLKRTARRRYTRRKNRICYLQEIFSNEMAKVDDSFFHRLEESFLVEEDKKHERHPIFGNIVDEVAYHEKYPTIYHLRKKLVDSTDKADLRLIYLALAHMIKFRGHFLIEGDLNPDNSDVDKLFIQLVQTYNQLFEENPINASGVDAKAILSARLSKSRRLENLIAQLPGEKKNGLFGNLIALSLGLTPNFKSNFDLAEDAKLQLSKDTYDDDLDNLLAQIGDQYADLFLAAKNLSDAILLSDILRVNTEITKAPLSASMIKRYDEHHQDLTLLKALVRQQLPEKYKEIFFDQSKNGYAGYIDGGASQEEFYKFIKPILEKMDGTEELLVKLNREDLLRKQRTFDNGSIPHQIHLGELHAILRRQEDFYPFLKDNREKIEKILTFRIPYYVGPLARGNSRFAWMTRKSEETITPWNFEEVVDKGASAQSFIERMTNFDKNLPNEKVLPKHSLLYEYFTVYNELTKVKYVTEGMRKPAFLSGEQKKAIVDLLFKTNRKVTVKQLKEDYFKKIECFDSVEISGVEDRFNASLGTYHDLLKIIKDKDFLDNEENEDILEDIVLTLTLFEDREMIEERLKTYAHLFDDKVMKQLKRRRYTGWGRLSRKLINGIRDKQSGKTILDFLKSDGFANRNFMQLIHDDSLTFKEDIQKAQVSGQGDSLHEHIANLAGSPAIKKGILQTVKVVDELVKVMGRHKPENIVIEMARENQTTQKGQKNSRERMKRIEEGIKELGSQILKEHPVENTQLQNEKLYLYYLQNGRDMYVDQELDINRLSDYDVDHIVPQSFLKDDSIDNKVLTRSDKARGKSDNVPSEEVVKKMKNYWRQLLNAKLITQRKFDNLTKAERGGLSELDKAGFIKRQLVETRQITKHVAQILDSRMNTKYDENDKLIREVKVITLKSKLVSDFRKDFQFYKVREINNYHHAHDAYLNAVVGTALIKKYPKLESEFVYGDYKVYDVRKMIAKSEQEIGKATAKYFFYSNIMNFFKTEITLANGEIRKRPLIETNGETGEIVWDKGRDFATVRKVLSMPQVNIVKKTEVQTGGFSKESILPKRNSDKLIARKKDWDPKKYGGFDSPTVAYSVLVVAKVEKGKSKKLKSVKELLGITIMERSSFEKNPIDFLEAKGYKEVKKDLIIKLPKYSLFELENGRKRMLASAGELQKGNELALPSKYVNFLYLASHYEKLKGSPEDNEQKQLFVEQHKHYLDEIIEQISEFSKRVILADANLDKVLSAYNKHRDKPIREQAENIIHLFTLTNLGAPAAFKYFDTTIDRKRYTSTKEVLDATLIHQSITGLYETRIDLSQLGGDGGEAAAKEAAAKGGTLGIEDEYRLHETSTEPDVSLGSTWLSDFPQAWAETGGMGLAVRQAPLIIPLKATSTPVSIQQYPMSHEARLGIKPHIQRLLDQGILVPCQSPWNTPLLPVKKPGTNDYRPVQDLREVNKRVEDIHPTVPNPYNLLSGLPPSHQWYTVLDLKDAFFCLRLHPTSQPLFAFEWRDPGMGISGQLTWTRLPQGFKNSPTLFDEALHRDLADFRIQHPDLILLQYVDDILLAATSELDCQQGTRALLQTLGDLGYRASAKKAQICQKQVKYLGYLLREGQRWLTEARKETVMGQPVPKTPRQLREFLGTAGFCRLWIPGFAEMAAPLYPLTKTGTLFSWGPDQQKAYQEIKQALLTAPALGLPDLTKPFELFVDEKQGYAKGVLTQKLGPWRRPVAYLSKKLDPVAAGWPPCLRMVAAIAVLTKDAGKLTMGQPLVILAPHAVEALVKQPPDRWLSNARMTHYQAMLLDTDRVQFGPVVALNPATLLPLPEEGAPHDCLEILAETHGTRPDLTDQPIPDADHTWYTDGSSFLQEGQRKAGAAVTTETEVIWAGALPAGTSAQRAELIALTQALKMAEGKRLNVYTDSRYAFATAHIHGEIYRRRGLLTSEGREIKNKSEILALLKALFLPKRLSIIHCLGHQKGDSAEARGNRLADQAAREAAIKTPPDTSTLLAGKRTADGSEFEKRTADGSEFESPKKKAKVE

SEQ ID NO: 2065 - protein, 2096 aa, synthetic construct
MPAAKRVKLDGGDKKYSIGLDIGTNSVGWAVITDEYKVPSKKFKVLGNTDRHSIKKNLIGALLFDSGETAEATRLKRTARRRYTRRKNRICYLQEIFSNEMAKVDDSFFHRLEESFLVEEDKKHERHPIFGNIVDEVAYHEKYPTIYHLRKKLVDSTDKADLRLIYLALAHMIKFRGHFLIEGDLNPDNSDVDKLFIQLVQTYNQLFEENPINASGVDAKAILSARLSKSRRLENLIAQLPGEKKNGLFGNLIALSLGLTPNFKSNFDLAEDAKLQLSKDTYDDDLDNLLAQIGDQYADLFLAAKNLSDAILLSDILRVNTEITKAPLSASMIKRYDEHHQDLTLLKALVRQQLPEKYKEIFFDQSKNGYAGYIDGGASQEEFYKFIKPILEKMDGTEELLVKLNREDLLRKQRTFDNGSIPHQIHLGELHAILRRQEDFYPFLKDNREKIEKILTFRIPYYVGPLARGNSRFAWMTRKSEETITPWNFEEVVDKGASAQSFIERMTNFDKNLPNEKVLPKHSLLYEYFTVYNELTKVKYVTEGMRKPAFLSGEQKKAIVDLLFKTNRKVTVKQLKEDYFKKIECFDSVEISGVEDRFNASLGTYHDLLKIIKDKDFLDNEENEDILEDIVLTLTLFEDREMIEERLKTYAHLFDDKVMKQLKRRRYTGWGRLSRKLINGIRDKQSGKTILDFLKSDGFANRNFMQLIHDDSLTFKEDIQKAQVSGQGDSLHEHIANLAGSPAIKKGILQTVKVVDELVKVMGRHKPENIVIEMARENQTTQKGQKNSRERMKRIEEGIKELGSQILKEHPVENTQLQNEKLYLYYLQNGRDMYVDQELDINRLSDYDVDHIVPQSFLKDDSIDNKVLTRSDKARGKSDNVPSEEVVKKMKNYWRQLLNAKLITQRKFDNLTKAERGGLSELDKAGFIKRQLVETRQITKHVAQILDSRMNTKYDENDKLIREVKVITLKSKLVSDFRKDFQFYKVREINNYHHAHDAYLNAVVGTALIKKYPKLESEFVYGDYKVYDVRKMIAKSEQEIGKATAKYFFYSNIMNFFKTEITLANGEIRKRPLIETNGETGEIVWDKGRDFATVRKVLSMPQVNIVKKTEVQTGGFSKESILPKRNSDKLIARKKDWDPKKYGGFDSPTVAYSVLVVAKVEKGKSKKLKSVKELLGITIMERSSFEKNPIDFLEAKGYKEVKKDLIIKLPKYSLFELENGRKRMLASAGELQKGNELALPSKYVNFLYLASHYEKLKGSPEDNEQKQLFVEQHKHYLDEIIEQISEFSKRVILADANLDKVLSAYNKHRDKPIREQAENIIHLFTLTNLGAPAAFKYFDTTIDRKRYTSTKEVLDATLIHQSITGLYETRIDLSQLGGDGGPAPGSSEAAAKGGTLGIEDEYRLHETSTEPDVSLGSTWLSDFPQAWAETGGMGLAVRQAPLIIPLKATSTPVSIQQYPMSHEARLGIKPHIQRLLDQGILVPCQSPWNTPLLPVKKPGTNDYRPVQDLREVNKRVEDIHPTVPNPYNLLSGLPPSHQWYTVLDLKDAFFCLRLHPTSQPLFAFEWRDPGMGISGQLTWTRLPQGFKNSPTLFDEALHRDLADFRIQHPDLILLQYVDDILLAATSELDCQQGTRALLQTLGDLGYRASAKKAQICQKQVKYLGYLLREGQRWLTEARKETVMGQPVPKTPRQLREFLGTAGFCRLWIPGFAEMAAPLYPLTKTGTLFSWGPDQQKAYQEIKQALLTAPALGLPDLTKPFELFVDEKQGYAKGVLTQKLGPWRRPVAYLSKKLDPVAAGWPPCLRMVAAIAVLTKDAGKLTMGQPLVILAPHAVEALVKQPPDRWLSNARMTHYQAMLLDTDRVQFGPVVALNPATLLPLPEEGAPHDCLEILAETHGTRPDLTDQPIPDADHTWYTDGSSFLQEGQRKAGAAVTTETEVIWAGALPAGTSAQRAELIALTQALKMAEGKRLNVYTDSRYAFATAHIHGEIYRRRGLLTSEGREIKNKSEILALLKALFLPKRLSIIHCLGHQKGDSAEARGNRLADQAAREAAIKTPPDTSTLLAGKRTADGSEFEKRTADGSEFESPKKKAKVE

SEQ ID NO: 2066 - protein, 2115 aa, synthetic construct
MPAAKRVKLDGGDKKYSIGLDIGTNSVGWAVITDEYKVPSKKFKVLGNTDRHSIKKNLIGALLFDSGETAEATRLKRTARRRYTRRKNRICYLQEIFSNEMAKVDDSFFHRLEESFLVEEDKKHERHPIFGNIVDEVAYHEKYPTIYHLRKKLVDSTDKADLRLIYLALAHMIKFRGHFLIEGDLNPDNSDVDKLFIQLVQTYNQLFEENPINASGVDAKAILSARLSKSRRLENLIAQLPGEKKNGLFGNLIALSLGLTPNFKSNFDLAEDAKLQLSKDTYDDDLDNLLAQIGDQYADLFLAAKNLSDAILLSDILRVNTEITKAPLSASMIKRYDEHHQDLTLLKALVRQQLPEKYKEIFFDQSKNGYAGYIDGGASQEEFYKFIKPILEKMDGTEELLVKLNREDLLRKQRTFDNGSIPHQIHLGELHAILRRQEDFYPFLKDNREKIEKILTFRIPYYVGPLARGNSRFAWMTRKSEETITPWNFEEVVDKGASAQSFIERMTNFDKNLPNEKVLPKHSLLYEYFTVYNELTKVKYVTEGMRKPAFLSGEQKKAIVDLLFKTNRKVTVKQLKEDYFKKIECFDSVEISGVEDRFNASLGTYHDLLKIIKDKDFLDNEENEDILEDIVLTLTLFEDREMIEERLKTYAHLFDDKVMKQLKRRRYTGWGRLSRKLINGIRDKQSGKTILDFLKSDGFANRNFMQLIHDDSLTFKEDIQKAQVSGQGDSLHEHIANLAGSPAIKKGILQTVKVVDELVKVMGRHKPENIVIEMARENQTTQKGQKNSRERMKRIEEGIKELGSQILKEHPVENTQLQNEKLYLYYLQNGRDMYVDQELDINRLSDYDVDHIVPQSFLKDDSIDNKVLTRSDKARGKSDNVPSEEVVKKMKNYWRQLLNAKLITQRKFDNLTKAERGGLSELDKAGFIKRQLVETRQITKHVAQILDSRMNTKYDENDKLIREVKVITLKSKLVSDFRKDFQFYKVREINNYHHAHDAYLNAVVGTALIKKYPKLESEFVYGDYKVYDVRKMIAKSEQEIGKATAKYFFYSNIMNFFKTEITLANGEIRKRPLIETNGETGEIVWDKGRDFATVRKVLSMPQVNIVKKTEVQTGGFSKESILPKRNSDKLIARKKDWDPKKYGGFDSPTVAYSVLVVAKVEKGKSKKLKSVKELLGITIMERSSFEKNPIDFLEAKGYKEVKKDLIIKLPKYSLFELENGRKRMLASAGELQKGNELALPSKYVNFLYLASHYEKLKGSPEDNEQKQLFVEQHKHYLDEIIEQISEFSKRVILADANLDKVLSAYNKHRDKPIREQAENIIHLFTLTNLGAPAAFKYFDTTIDRKRYTSTKEVLDATLIHQSITGLYETRIDLSQLGGDGGGGGGSGGGGSGGGGSGGGGSGGGGSGGGGSGGTLGIEDEYRLHETSTEPDVSLGSTWLSDFPQAWAETGGMGLAVRQAPLIIPLKATSTPVSIQQYPMSHEARLGIKPHIQRLLDQGILVPCQSPWNTPLLPVKKPGTNDYRPVQDLREVNKRVEDIHPTVPNPYNLLSGLPPSHQWYTVLDLKDAFFCLRLHPTSQPLFAFEWRDPGMGISGQLTWTRLPQGFKNSPTLFDEALHRDLADFRIQHPDLILLQYVDDILLAATSELDCQQGTRALLQTLGDLGYRASAKKAQICQKQVKYLGYLLREGQRWLTEARKETVMGQPVPKTPRQLREFLGTAGFCRLWIPGFAEMAAPLYPLTKTGTLFSWGPDQQKAYQEIKQALLTAPALGLPDLTKPFELFVDEKQGYAKGVLTQKLGPWRRPVAYLSKKLDPVAAGWPPCLRMVAAIAVLTKDAGKLTMGQPLVILAPHAVEALVKQPPDRWLSNARMTHYQAMLLDTDRVQFGPVVALNPATLLPLPEEGAPHDCLEILAETHGTRPDLTDQPIPDADHTWYTDGSSFLQEGQRKAGAAVTTETEVIWAGALPAGTSAQRAELIALTQALKMAEGKRLNVYTDSRYAFATAHIHGEIYRRRGLLTSEGREIKNKSEILALLKALFLPKRLSIIHCLGHQKGDSAEARGNRLADQAAREAAIKTPPDTSTLLAGKRTADGSEFEKRTADGSEFESPKKKAKVE

SEQ ID NO: 2067 - protein, 2093 aa, synthetic construct
MPAAKRVKLDGGDKKYSIGLDIGTNSVGWAVITDEYKVPSKKFKVLGNTDRHSIKKNLIGALLFDSGETAEATRLKRTARRRYTRRKNRICYLQEIFSNEMAKVDDSFFHRLEESFLVEEDKKHERHPIFGNIVDEVAYHEKYPTIYHLRKKLVDSTDKADLRLIYLALAHMIKFRGHFLIEGDLNPDNSDVDKLFIQLVQTYNQLFEENPINASGVDAKAILSARLSKSRRLENLIAQLPGEKKNGLFGNLIALSLGLTPNFKSNFDLAEDAKLQLSKDTYDDDLDNLLAQIGDQYADLFLAAKNLSDAILLSDILRVNTEITKAPLSASMIKRYDEHHQDLTLLKALVRQQLPEKYKEIFFDQSKNGYAGYIDGGASQEEFYKFIKPILEKMDGTEELLVKLNREDLLRKQRTFDNGSIPHQIHLGELHAILRRQEDFYPFLKDNREKIEKILTFRIPYYVGPLARGNSRFAWMTRKSEETITPWNFEEVVDKGASAQSFIERMTNFDKNLPNEKVLPKHSLLYEYFTVYNELTKVKYVTEGMRKPAFLSGEQKKAIVDLLFKTNRKVTVKQLKEDYFKKIECFDSVEISGVEDRFNASLGTYHDLLKIIKDKDFLDNEENEDILEDIVLTLTLFEDREMIEERLKTYAHLFDDKVMKQLKRRRYTGWGRLSRKLINGIRDKQSGKTILDFLKSDGFANRNFMQLIHDDSLTFKEDIQKAQVSGQGDSLHEHIANLAGSPAIKKGILQTVKVVDELVKVMGRHKPENIVIEMARENQTTQKGQKNSRERMKRIEEGIKELGSQILKEHPVENTQLQNEKLYLYYLQNGRDMYVDQELDINRLSDYDVDHIVPQSFLKDDSIDNKVLTRSDKARGKSDNVPSEEVVKKMKNYWRQLLNAKLITQRKFDNLTKAERGGLSELDKAGFIKRQLVETRQITKHVAQILDSRMNTKYDENDKLIREVKVITLKSKLVSDFRKDFQFYKVREINNYHHAHDAYLNAVVGTALIKKYPKLESEFVYGDYKVYDVRKMIAKSEQEIGKATAKYFFYSNIMNFFKTEITLANGEIRKRPLIETNGETGEIVWDKGRDFATVRKVLSMPQVNIVKKTEVQTGGFSKESILPKRNSDKLIARKKDWDPKKYGGFDSPTVAYSVLVVAKVEKGKSKKLKSVKELLGITIMERSSFEKNPIDFLEAKGYKEVKKDLIIKLPKYSLFELENGRKRMLASAGELQKGNELALPSKYVNFLYLASHYEKLKGSPEDNEQKQLFVEQHKHYLDEIIEQISEFSKRVILADANLDKVLSAYNKHRDKPIREQAENIIHLFTLTNLGAPAAFKYFDTTIDRKRYTSTKEVLDATLIHQSITGLYETRIDLSQLGGDGGEAAAKPAPGGTLGIEDEYRLHETSTEPDVSLGSTWLSDFPQAWAETGGMGLAVRQAPLIIPLKATSTPVSIQQYPMSHEARLGIKPHIQRLLDQGILVPCQSPWNTPLLPVKKPGTNDYRPVQDLREVNKRVEDIHPTVPNPYNLLSGLPPSHQWYTVLDLKDAFFCLRLHPTSQPLFAFEWRDPGMGISGQLTWTRLPQGFKNSPTLFDEALHRDLADFRIQHPDLILLQYVDDILLAATSELDCQQGTRALLQTLGDLGYRASAKKAQICQKQVKYLGYLLREGQRWLTEARKETVMGQPVPKTPRQLREFLGTAGFCRLWIPGFAEMAAPLYPLTKTGTLFSWGPDQQKAYQEIKQALLTAPALGLPDLTKPFELFVDEKQGYAKGVLTQKLGPWRRPVAYLSKKLDPVAAGWPPCLRMVAAIAVLTKDAGKLTMGQPLVILAPHAVEALVKQPPDRWLSNARMTHYQAMLLDTDRVQFGPVVALNPATLLPLPEEGAPHDCLEILAETHGTRPDLTDQPIPDADHTWYTDGSSFLQEGQRKAGAAVTTETEVIWAGALPAGTSAQRAELIALTQALKMAEGKRLNVYTDSRYAFATAHIHGEIYRRRGLLTSEGREIKNKSEILALLKALFLPKRLSIIHCLGHQKGDSAEARGNRLADQAAREAAIKTPPDTSTLLAGKRTADGSEFEKRTADGSEFESPKKKAKVE

SEQ ID NO: 2068 - protein, 2096 aa, synthetic construct
MPAAKRVKLDGGDKKYSIGLDIGTNSVGWAVITDEYKVPSKKFKVLGNTDRHSIKKNLIGALLFDSGETAEATRLKRTARRRYTRRKNRICYLQEIFSNEMAKVDDSFFHRLEESFLVEEDKKHERHPIFGNIVDEVAYHEKYPTIYHLRKKLVDSTDKADLRLIYLALAHMIKFRGHFLIEGDLNPDNSDVDKLFIQLVQTYNQLFEENPINASGVDAKAILSARLSKSRRLENLIAQLPGEKKNGLFGNLIALSLGLTPNFKSNFDLAEDAKLQLSKDTYDDDLDNLLAQIGDQYADLFLAAKNLSDAILLSDILRVNTEITKAPLSASMIKRYDEHHQDLTLLKALVRQQLPEKYKEIFFDQSKNGYAGYIDGGASQEEFYKFIKPILEKMDGTEELLVKLNREDLLRKQRTFDNGSIPHQIHLGELHAILRRQEDFYPFLKDNREKIEKILTFRIPYYVGPLARGNSRFAWMTRKSEETITPWNFEEVVDKGASAQSFIERMTNFDKNLPNEKVLPKHSLLYEYFTVYNELTKVKYVTEGMRKPAFLSGEQKKAIVDLLFKTNRKVTVKQLKEDYFKKIECFDSVEISGVEDRFNASLGTYHDLLKIIKDKDFLDNEENEDILEDIVLTLTLFEDREMIEERLKTYAHLFDDKVMKQLKRRRYTGWGRLSRKLINGIRDKQSGKTILDFLKSDGFANRNFMQLIHDDSLTFKEDIQKAQVSGQGDSLHEHIANLAGSPAIKKGILQTVKVVDELVKVMGRHKPENIVIEMARENQTTQKGQKNSRERMKRIEEGIKELGSQILKEHPVENTQLQNEKLYLYYLQNGRDMYVDQELDINRLSDYDVDHIVPQSFLKDDSIDNKVLTRSDKARGKSDNVPSEEVVKKMKNYWRQLLNAKLITQRKFDNLTKAERGGLSELDKAGFIKRQLVETRQITKHVAQILDSRMNTKYDENDKLIREVKVITLKSKLVSDFRKDFQFYKVREINNYHHAHDAYLNAVVGTALIKKYPKLESEFVYGDYKVYDVRKMIAKSEQEIGKATAKYFFYSNIMNFFKTEITLANGEIRKRPLIETNGETGEIVWDKGRDFATVRKVLSMPQVNIVKKTEVQTGGFSKESILPKRNSDKLIARKKDWDPKKYGGFDSPTVAYSVLVVAKVEKGKSKKLKSVKELLGITIMERSSFEKNPIDFLEAKGYKEVKKDLIIKLPKYSLFELENGRKRMLASAGELQKGNELALPSKYVNFLYLASHYEKLKGSPEDNEQKQLFVEQHKHYLDEIIEQISEFSKRVILADANLDKVLSAYNKHRDKPIREQAENIIHLFTLTNLGAPAAFKYFDTTIDRKRYTSTKEVLDATLIHQSITGLYETRIDLSQLGGDGGGGGGGSEAAAKGGTLGIEDEYRLHETSTEPDVSLGSTWLSDFPQAWAETGGMGLAVRQAPLIIPLKATSTPVSIQQYPMSHEARLGIKPHIQRLLDQGILVPCQSPWNTPLLPVKKPGTNDYRPVQDLREVNKRVEDIHPTVPNPYNLLSGLPPSHQWYTVLDLKDAFFCLRLHPTSQPLFAFEWRDPGMGISGQLTWTRLPQGFKNSPTLFDEALHRDLADFRIQHPDLILLQYVDDILLAATSELDCQQGTRALLQTLGDLGYRASAKKAQICQKQVKYLGYLLREGQRWLTEARKETVMGQPVPKTPRQLREFLGTAGFCRLWIPGFAEMAAPLYPLTKTGTLFSWGPDQQKAYQEIKQALLTAPALGLPDLTKPFELFVDEKQGYAKGVLTQKLGPWRRPVAYLSKKLDPVAAGWPPCLRMVAAIAVLTKDAGKLTMGQPLVILAPHAVEALVKQPPDRWLSNARMTHYQAMLLDTDRVQFGPVVALNPATLLPLPEEGAPHDCLEILAETHGTRPDLTDQPIPDADHTWYTDGSSFLQEGQRKAGAAVTTETEVIWAGALPAGTSAQRAELIALTQALKMAEGKRLNVYTDSRYAFATAHIHGEIYRRRGLLTSEGREIKNKSEILALLKALFLPKRLSIIHCLGHQKGDSAEARGNRLADQAAREAAIKTPPDTSTLLAGKRTADGSEFEKRTADGSEFESPKKKAKVE

SEQ ID NO: 2069 - protein, 2096 aa, synthetic construct
MPAAKRVKLDGGDKKYSIGLDIGTNSVGWAVITDEYKVPSKKFKVLGNTDRHSIKKNLIGALLFDSGETAEATRLKRTARRRYTRRKNRICYLQEIFSNEMAKVDDSFFHRLEESFLVEEDKKHERHPIFGNIVDEVAYHEKYPTIYHLRKKLVDSTDKADLRLIYLALAHMIKFRGHFLIEGDLNPDNSDVDKLFIQLVQTYNQLFEENPINASGVDAKAILSARLSKSRRLENLIAQLPGEKKNGLFGNLIALSLGLTPNFKSNFDLAEDAKLQLSKDTYDDDLDNLLAQIGDQYADLFLAAKNLSDAILLSDILRVNTEITKAPLSASMIKRYDEHHQDLTLLKALVRQQLPEKYKEIFFDQSKNGYAGYIDGGASQEEFYKFIKPILEKMDGTEELLVKLNREDLLRKQRTFDNGSIPHQIHLGELHAILRRQEDFYPFLKDNREKIEKILTFRIPYYVGPLARGNSRFAWMTRKSEETITPWNFEEVVDKGASAQSFIERMTNFDKNLPNEKVLPKHSLLYEYFTVYNELTKVKYVTEGMRKPAFLSGEQKKAIVDLLFKTNRKVTVKQLKEDYFKKIECFDSVEISGVEDRFNASLGTYHDLLKIIKDKDFLDNEENEDILEDIVLTLTLFEDREMIEERLKTYAHLFDDKVMKQLKRRRYTGWGRLSRKLINGIRDKQSGKTILDFLKSDGFANRNFMQLIHDDSLTFKEDIQKAQVSGQGDSLHEHIANLAGSPAIKKGILQTVKVVDELVKVMGRHKPENIVIEMARENQTTQKGQKNSRERMKRIEEGIKELGSQILKEHPVENTQLQNEKLYLYYLQNGRDMYVDQELDINRLSDYDVDHIVPQSFLKDDSIDNKVLTRSDKARGKSDNVPSEEVVKKMKNYWRQLLNAKLITQRKFDNLTKAERGGLSELDKAGFIKRQLVETRQITKHVAQILDSRMNTKYDENDKLIREVKVITLKSKLVSDFRKDFQFYKVREINNYHHAHDAYLNAVVGTALIKKYPKLESEFVYGDYKVYDVRKMIAKSEQEIGKATAKYFFYSNIMNFFKTEITLANGEIRKRPLIETNGETGEIVWDKGRDFATVRKVLSMPQVNIVKKTEVQTGGFSKESILPKRNSDKLIARKKDWDPKKYGGFDSPTVAYSVLVVAKVEKGKSKKLKSVKELLGITIMERSSFEKNPIDFLEAKGYKEVKKDLIIKLPKYSLFELENGRKRMLASAGELQKGNELALPSKYVNFLYLASHYEKLKGSPEDNEQKQLFVEQHKHYLDEIIEQISEFSKRVILADANLDKVLSAYNKHRDKPIREQAENIIHLFTLTNLGAPAAFKYFDTTIDRKRYTSTKEVLDATLIHQSITGLYETRIDLSQLGGDGGGGSEAAAKPAPGGTLGIEDEYRLHETSTEPDVSLGSTWLSDFPQAWAETGGMGLAVRQAPLIIPLKATSTPVSIQQYPMSHEARLGIKPHIQRLLDQGILVPCQSPWNTPLLPVKKPGTNDYRPVQDLREVNKRVEDIHPTVPNPYNLLSGLPPSHQWYTVLDLKDAFFCLRLHPTSQPLFAFEWRDPGMGISGQLTWTRLPQGFKNSPTLFDEALHRDLADFRIQHPDLILLQYVDDILLAATSELDCQQGTRALLQTLGDLGYRASAKKAQICQKQVKYLGYLLREGQRWLTEARKETVMGQPVPKTPRQLREFLGTAGFCRLWIPGFAEMAAPLYPLTKTGTLFSWGPDQQKAYQEIKQALLTAPALGLPDLTKPFELFVDEKQGYAKGVLTQKLGPWRRPVAYLSKKLDPVAAGWPPCLRMVAAIAVLTKDAGKLTMGQPLVILAPHAVEALVKQPPDRWLSNARMTHYQAMLLDTDRVQFGPVVALNPATLLPLPEEGAPHDCLEILAETHGTRPDLTDQPIPDADHTWYTDGSSFLQEGQRKAGAAVTTETEVIWAGALPAGTSAQRAELIALTQALKMAEGKRLNVYTDSRYAFATAHIHGEIYRRRGLLTSEGREIKNKSEILALLKALFLPKRLSIIHCLGHQKGDSAEARGNRLADQAAREAAIKTPPDTSTLLAGKRTADGSEFEKRTADGSEFESPKKKAKVE

SEQ ID NO: 2070 - protein, 2105 aa, synthetic construct
MPAAKRVKLDGGDKKYSIGLDIGTNSVGWAVITDEYKVPSKKFKVLGNTDRHSIKKNLIGALLFDSGETAEATRLKRTARRRYTRRKNRICYLQEIFSNEMAKVDDSFFHRLEESFLVEEDKKHERHPIFGNIVDEVAYHEKYPTIYHLRKKLVDSTDKADLRLIYLALAHMIKFRGHFLIEGDLNPDNSDVDKLFIQLVQTYNQLFEENPINASGVDAKAILSARLSKSRRLENLIAQLPGEKKNGLFGNLIALSLGLTPNFKSNFDLAEDAKLQLSKDTYDDDLDNLLAQIGDQYADLFLAAKNLSDAILLSDILRVNTEITKAPLSASMIKRYDEHHQDLTLLKALVRQQLPEKYKEIFFDQSKNGYAGYIDGGASQEEFYKFIKPILEKMDGTEELLVKLNREDLLRKQRTFDNGSIPHQIHLGELHAILRRQEDFYPFLKDNREKIEKILTFRIPYYVGPLARGNSRFAWMTRKSEETITPWNFEEVVDKGASAQSFIERMTNFDKNLPNEKVLPKHSLLYEYFTVYNELTKVKYVTEGMRKPAFLSGEQKKAIVDLLFKTNRKVTVKQLKEDYFKKIECFDSVEISGVEDRFNASLGTYHDLLKIIKDKDFLDNEENEDILEDIVLTLTLFEDREMIEERLKTYAHLFDDKVMKQLKRRRYTGWGRLSRKLINGIRDKQSGKTILDFLKSDGFANRNFMQLIHDDSLTFKEDIQKAQVSGQGDSLHEHIANLAGSPAIKKGILQTVKVVDELVKVMGRHKPENIVIEMARENQTTQKGQKNSRERMKRIEEGIKELGSQILKEHPVENTQLQNEKLYLYYLQNGRDMYVDQELDINRLSDYDVDHIVPQSFLKDDSIDNKVLTRSDKARGKSDNVPSEEVVKKMKNYWRQLLNAKLITQRKFDNLTKAERGGLSELDKAGFIKRQLVETRQITKHVAQILDSRMNTKYDENDKLIREVKVITLKSKLVSDFRKDFQFYKVREINNYHHAHDAYLNAVVGTALIKKYPKLESEFVYGDYKVYDVRKMIAKSEQEIGKATAKYFFYSNIMNFFKTEITLANGEIRKRPLIETNGETGEIVWDKGRDFATVRKVLSMPQVNIVKKTEVQTGGFSKESILPKRNSDKLIARKKDWDPKKYGGFDSPTVAYSVLVVAKVEKGKSKKLKSVKELLGITIMERSSFEKNPIDFLEAKGYKEVKKDLIIKLPKYSLFELENGRKRMLASAGELQKGNELALPSKYVNFLYLASHYEKLKGSPEDNEQKQLFVEQHKHYLDEIIEQISEFSKRVILADANLDKVLSAYNKHRDKPIREQAENIIHLFTLTNLGAPAAFKYFDTTIDRKRYTSTKEVLDATLIHQSITGLYETRIDLSQLGGDGGEAAAKEAAAKEAAAKEAAAKGGTLGIEDEYRLHETSTEPDVSLGSTWLSDFPQAWAETGGMGLAVRQAPLIIPLKATSTPVSIQQYPMSHEARLGIKPHIQRLLDQGILVPCQSPWNTPLLPVKKPGTNDYRPVQDLREVNKRVEDIHPTVPNPYNLLSGLPPSHQWYTVLDLKDAFFCLRLHPTSQPLFAFEWRDPGMGISGQLTWTRLPQGFKNSPTLFNEALHRDLADFRIQHPDLILLQYVDDILLAATSELDCQQGTRALLQTLGDLGYRASAKKAQICQKQVKYLGYLLREGQRWLTEARKETVMGQPVPKTPRQLREFLGTAGFCRLWIPGFAEMAAPLYPLTKPGTLFSWGPDQQKAYQEIKQALLTAPALGLPDLTKPFELFVDEKQGYAKGVLTQKLGPWRRPVAYLSKKLDPVAAGWPPCLRMVAAIAVLTKDAGKLTMGQPLVILAPHAVEALVKQPPDRWLSNARMTHYQAMLLDTDRVQFGPVVALNPATLLPLPEEGAPHDCLEILAETHGTRPDLTDQPIPDADHTWYTDGSSFLQEGQRKAGAAVTTETEVIWAGALPAGTSAQRAELIALTQALKMAEGKRLNVYTDSRYAFATAHIHGEIYRRRGWLTSEGREIKNKSEILALLKALFLPKRLSIIHCLGHQKGDSAEARGNRLADQAAREAAIKTPPDTSTLLAGKRTADGSEFEKRTADGSEFESPKKKAKVE

SEQ ID NO: 2071 - protein, 2096 aa, synthetic construct
MPAAKRVKLDGGDKKYSIGLDIGTNSVGWAVITDEYKVPSKKFKVLGNTDRHSIKKNLIGALLFDSGETAEATRLKRTARRRYTRRKNRICYLQEIFSNEMAKVDDSFFHRLEESFLVEEDKKHERHPIFGNIVDEVAYHEKYPTIYHLRKKLVDSTDKADLRLIYLALAHMIKFRGHFLIEGDLNPDNSDVDKLFIQLVQTYNQLFEENPINASGVDAKAILSARLSKSRRLENLIAQLPGEKKNGLFGNLIALSLGLTPNFKSNFDLAEDAKLQLSKDTYDDDLDNLLAQIGDQYADLFLAAKNLSDAILLSDILRVNTEITKAPLSASMIKRYDEHHQDLTLLKALVRQQLPEKYKEIFFDQSKNGYAGYIDGGASQEEFYKFIKPILEKMDGTEELLVKLNREDLLRKQRTFDNGSIPHQIHLGELHAILRRQEDFYPFLKDNREKIEKILTFRIPYYVGPLARGNSRFAWMTRKSEETITPWNFEEVVDKGASAQSFIERMTNFDKNLPNEKVLPKHSLLYEYFTVYNELTKVKYVTEGMRKPAFLSGEQKKAIVDLLFKTNRKVTVKQLKEDYFKKIECFDSVEISGVEDRFNASLGTYHDLLKIIKDKDFLDNEENEDILEDIVLTLTLFEDREMIEERLKTYAHLFDDKVMKQLKRRRYTGWGRLSRKLINGIRDKQSGKTILDFLKSDGFANRNFMQLIHDDSLTFKEDIQKAQVSGQGDSLHEHIANLAGSPAIKKGILQTVKVVDELVKVMGRHKPENIVIEMARENQTTQKGQKNSRERMKRIEEGIKELGSQILKEHPVENTQLQNEKLYLYYLQNGRDMYVDQELDINRLSDYDVDHIVPQSFLKDDSIDNKVLTRSDKARGKSDNVPSEEVVKKMKNYWRQLLNAKLITQRKFDNLTKAERGGLSELDKAGFIKRQLVETRQITKHVAQILDSRMNTKYDENDKLIREVKVITLKSKLVSDFRKDFQFYKVREINNYHHAHDAYLNAVVGTALIKKYPKLESEFVYGDYKVYDVRKMIAKSEQEIGKATAKYFFYSNIMNFFKTEITLANGEIRKRPLIETNGETGEIVWDKGRDFATVRKVLSMPQVNIVKKTEVQTGGFSKESILPKRNSDKLIARKKDWDPKKYGGFDSPTVAYSVLVVAKVEKGKSKKLKSVKELLGITIMERSSFEKNPIDFLEAKGYKEVKKDLIIKLPKYSLFELENGRKRMLASAGELQKGNELALPSKYVNFLYLASHYEKLKGSPEDNEQKQLFVEQHKHYLDEIIEQISEFSKRVILADANLDKVLSAYNKHRDKPIREQAENIIHLFTLTNLGAPAAFKYFDTTIDRKRYTSTKEVLDATLIHQSITGLYETRIDLSQLGGDGGGGSEAAAKPAPGGTLGIEDEYRLHETSTEPDVSLGSTWLSDFPQAWAETGGMGLAVRQAPLIIPLKATSTPVSIQQYPMSHEARLGIKPHIQRLLDQGILVPCQSPWNTPLLPVKKPGTNDYRPVQDLREVNKRVEDIHPTVPNPYNLLSGLPPSHQWYTVLDLKDAFFCLRLHPTSQPLFAFEWRDPGMGISGQLTWTRLPQGFKNSPTLFNEALHRDLADFRIQHPDLILLQYVDDILLAATSELDCQQGTRALLQTLGDLGYRASAKKAQICQKQVKYLGYLLREGQRWLTEARKETVMGQPVPKTPRQLREFLGTAGFCRLWIPGFAEMAAPLYPLTKPGTLFSWGPDQQKAYQEIKQALLTAPALGLPDLTKPFELFVDEKQGYAKGVLTQKLGPWRRPVAYLSKKLDPVAAGWPPCLRMVAAIAVLTKDAGKLTMGQPLVILAPHAVEALVKQPPDRWLSNARMTHYQAMLLDTDRVQFGPVVALNPATLLPLPEEGAPHDCLEILAETHGTRPDLTDQPIPDADHTWYTDGSSFLQEGQRKAGAAVTTETEVIWAGALPAGTSAQRAELIALTQALKMAEGKRLNVYTDSRYAFATAHIHGEIYRRRGWLTSEGREIKNKSEILALLKALFLPKRLSIIHCLGHQKGDSAEARGNRLADQAAREAAIKTPPDTSTLLAGKRTADGSEFEKRTADGSEFESPKKKAKVE

SEQ ID NO: 2072 - protein, 2105 aa, synthetic construct
MPAAKRVKLDGGDKKYSIGLDIGTNSVGWAVITDEYKVPSKKFKVLGNTDRHSIKKNLIGALLFDSGETAEATRLKRTARRRYTRRKNRICYLQEIFSNEMAKVDDSFFHRLEESFLVEEDKKHERHPIFGNIVDEVAYHEKYPTIYHLRKKLVDSTDKADLRLIYLALAHMIKFRGHFLIEGDLNPDNSDVDKLFIQLVQTYNQLFEENPINASGVDAKAILSARLSKSRRLENLIAQLPGEKKNGLFGNLIALSLGLTPNFKSNFDLAEDAKLQLSKDTYDDDLDNLLAQIGDQYADLFLAAKNLSDAILLSDILRVNTEITKAPLSASMIKRYDEHHQDLTLLKALVRQQLPEKYKEIFFDQSKNGYAGYIDGGASQEEFYKFIKPILEKMDGTEELLVKLNREDLLRKQRTFDNGSIPHQIHLGELHAILRRQEDFYPFLKDNREKIEKILTFRIPYYVGPLARGNSRFAWMTRKSEETITPWNFEEVVDKGASAQSFIERMTNFDKNLPNEKVLPKHSLLYEYFTVYNELTKVKYVTEGMRKPAFLSGEQKKAIVDLLFKTNRKVTVKQLKEDYFKKIECFDSVEISGVEDRFNASLGTYHDLLKIIKDKDFLDNEENEDILEDIVLTLTLFEDREMIEERLKTYAHLFDDKVMKQLKRRRYTGWGRLSRKLINGIRDKQSGKTILDFLKSDGFANRNFMQLIHDDSLTFKEDIQKAQVSGQGDSLHEHIANLAGSPAIKKGILQTVKVVDELVKVMGRHKPENIVIEMARENQTTQKGQKNSRERMKRIEEGIKELGSQILKEHPVENTQLQNEKLYLYYLQNGRDMYVDQELDINRLSDYDVDHIVPQSFLKDDSIDNKVLTRSDKARGKSDNVPSEEVVKKMKNYWRQLLNAKLITQRKFDNLTKAERGGLSELDKAGFIKRQLVETRQITKHVAQILDSRMNTKYDENDKLIREVKVITLKSKLVSDFRKDFQFYKVREINNYHHAHDAYLNAVVGTALIKKYPKLESEFVYGDYKVYDVRKMIAKSEQEIGKATAKYFFYSNIMNFFKTEITLANGEIRKRPLIETNGETGEIVWDKGRDFATVRKVLSMPQVNIVKKTEVQTGGFSKESILPKRNSDKLIARKKDWDPKKYGGFDSPTVAYSVLVVAKVEKGKSKKLKSVKELLGITIMERSSFEKNPIDFLEAKGYKEVKKDLIIKLPKYSLFELENGRKRMLASAGELQKGNELALPSKYVNFLYLASHYEKLKGSPEDNEQKQLFVEQHKHYLDEIIEQISEFSKRVILADANLDKVLSAYNKHRDKPIREQAENIIHLFTLTNLGAPAAFKYFDTTIDRKRYTSTKEVLDATLIHQSITGLYETRIDLSQLGGDGGGGGGSGGGGSGGGGSGGGGSGGTLGIEDEYRLHETSTEPDVSLGSTWLSDFPQAWAETGGMGLAVRQAPLIIPLKATSTPVSIQQYPMSHEARLGIKPHIQRLLDQGILVPCQSPWNTPLLPVKKPGTNDYRPVQDLREVNKRVEDIHPTVPNPYNLLSGLPPSHQWYTVLDLKDAFFCLRLHPTSQPLFAFEWRDPGMGISGQLTWTRLPQGFKNSPTLFNEALHRDLADFRIQHPDLILLQYVDDILLAATSELDCQQGTRALLQTLGDLGYRASAKKAQICQKQVKYLGYLLREGQRWLTEARKETVMGQPVPKTPRQLREFLGTAGFCRLWIPGFAEMAAPLYPLTKPGTLFSWGPDQQKAYQEIKQALLTAPALGLPDLTKPFELFVDEKQGYAKGVLTQKLGPWRRPVAYLSKKLDPVAAGWPPCLRMVAAIAVLTKDAGKLTMGQPLVILAPHAVEALVKQPPDRWLSNARMTHYQAMLLDTDRVQFGPVVALNPATLLPLPEEGAPHDCLEILAETHGTRPDLTDQPIPDADHTWYTDGSSFLQEGQRKAGAAVTTETEVIWAGALPAGTSAQRAELIALTQALKMAEGKRLNVYTDSRYAFATAHIHGEIYRRRGWLTSEGREIKNKSEILALLKALFLPKRLSIIHCLGHQKGDSAEARGNRLADQAAREAAIKTPPDTSTLLAGKRTADGSEFEKRTADGSEFESPKKKAKVE

SEQ ID NO: 2073 - protein, 2093 aa, synthetic construct
MPAAKRVKLDGGDKKYSIGLDIGTNSVGWAVITDEYKVPSKKFKVLGNTDRHSIKKNLIGALLFDSGETAEATRLKRTARRRYTRRKNRICYLQEIFSNEMAKVDDSFFHRLEESFLVEEDKKHERHPIFGNIVDEVAYHEKYPTIYHLRKKLVDSTDKADLRLIYLALAHMIKFRGHFLIEGDLNPDNSDVDKLFIQLVQTYNQLFEENPINASGVDAKAILSARLSKSRRLENLIAQLPGEKKNGLFGNLIALSLGLTPNFKSNFDLAEDAKLQLSKDTYDDDLDNLLAQIGDQYADLFLAAKNLSDAILLSDILRVNTEITKAPLSASMIKRYDEHHQDLTLLKALVRQQLPEKYKEIFFDQSKNGYAGYIDGGASQEEFYKFIKPILEKMDGTEELLVKLNREDLLRKQRTFDNGSIPHQIHLGELHAILRRQEDFYPFLKDNREKIEKILTFRIPYYVGPLARGNSRFAWMTRKSEETITPWNFEEVVDKGASAQSFIERMTNFDKNLPNEKVLPKHSLLYEYFTVYNELTKVKYVTEGMRKPAFLSGEQKKAIVDLLFKTNRKVTVKQLKEDYFKKIECFDSVEISGVEDRFNASLGTYHDLLKIIKDKDFLDNEENEDILEDIVLTLTLFEDREMIEERLKTYAHLFDDKVMKQLKRRRYTGWGRLSRKLINGIRDKQSGKTILDFLKSDGFANRNFMQLIHDDSLTFKEDIQKAQVSGQGDSLHEHIANLAGSPAIKKGILQTVKVVDELVKVMGRHKPENIVIEMARENQTTQKGQKNSRERMKRIEEGIKELGSQILKEHPVENTQLQNEKLYLYYLQNGRDMYVDQELDINRLSDYDVDHIVPQSFLKDDSIDNKVLTRSDKARGKSDNVPSEEVVKKMKNYWRQLLNAKLITQRKFDNLTKAERGGLSELDKAGFIKRQLVETRQITKHVAQILDSRMNTKYDENDKLIREVKVITLKSKLVSDFRKDFQFYKVREINNYHHAHDAYLNAVVGTALIKKYPKLESEFVYGDYKVYDVRKMIAKSEQEIGKATAKYFFYSNIMNFFKTEITLANGEIRKRPLIETNGETGEIVWDKGRDFATVRKVLSMPQVNIVKKTEVQTGGFSKESILPKRNSDKLIARKKDWDPKKYGGFDSPTVAYSVLVVAKVEKGKSKKLKSVKELLGITIMERSSFEKNPIDFLEAKGYKEVKKDLIIKLPKYSLFELENGRKRMLASAGELQKGNELALPSKYVNFLYLASHYEKLKGSPEDNEQKQLFVEQHKHYLDEIIEQISEFSKRVILADANLDKVLSAYNKHRDKPIREQAENIIHLFTLTNLGAPAAFKYFDTTIDRKRYTSTKEVLDATLIHQSITGLYETRIDLSQLGGDGGGSSEAAAKGGTLGIEDEYRLHETSTEPDVSLGSTWLSDFPQAWAETGGMGLAVRQAPLIIPLKATSTPVSIQQYPMSHEARLGIKPHIQRLLDQGILVPCQSPWNTPLLPVKKPGTNDYRPVQDLREVNKRVEDIHPTVPNPYNLLSGLPPSHQWYTVLDLKDAFFCLRLHPTSQPLFAFEWRDPGMGISGQLTWTRLPQGFKNSPTLFNEALHRDLADFRIQHPDLILLQYVDDILLAATSELDCQQGTRALLQTLGDLGYRASAKKAQICQKQVKYLGYLLREGQRWLTEARKETVMGQPVPKTPRQLREFLGTAGFCRLWIPGFAEMAAPLYPLTKPGTLFSWGPDQQKAYQEIKQALLTAPALGLPDLTKPFELFVDEKQGYAKGVLTQKLGPWRRPVAYLSKKLDPVAAGWPPCLRMVAAIAVLTKDAGKLTMGQPLVILAPHAVEALVKQPPDRWLSNARMTHYQAMLLDTDRVQFGPVVALNPATLLPLPEEGAPHDCLEILAETHGTRPDLTDQPIPDADHTWYTDGSSFLQEGQRKAGAAVTTETEVIWAGALPAGTSAQRAELIALTQALKMAEGKRLNVYTDSRYAFATAHIHGEIYRRRGWLTSEGREIKNKSEILALLKALFLPKRLSIIHCLGHQKGDSAEARGNRLADQAAREAAIKTPPDTSTLLAGKRTADGSEFEKRTADGSEFESPKKKAKVE

SEQ ID NO: 2074 - protein, 2096 aa, synthetic construct
MPAAKRVKLDGGDKKYSIGLDIGTNSVGWAVITDEYKVPSKKFKVLGNTDRHSIKKNLIGALLFDSGETAEATRLKRTARRRYTRRKNRICYLQEIFSNEMAKVDDSFFHRLEESFLVEEDKKHERHPIFGNIVDEVAYHEKYPTIYHLRKKLVDSTDKADLRLIYLALAHMIKFRGHFLIEGDLNPDNSDVDKLFIQLVQTYNQLFEENPINASGVDAKAILSARLSKSRRLENLIAQLPGEKKNGLFGNLIALSLGLTPNFKSNFDLAEDAKLQLSKDTYDDDLDNLLAQIGDQYADLFLAAKNLSDAILLSDILRVNTEITKAPLSASMIKRYDEHHQDLTLLKALVRQQLPEKYKEIFFDQSKNGYAGYIDGGASQEEFYKFIKPILEKMDGTEELLVKLNREDLLRKQRTFDNGSIPHQIHLGELHAILRRQEDFYPFLKDNREKIEKILTFRIPYYVGPLARGNSRFAWMTRKSEETITPWNFEEVVDKGASAQSFIERMTNFDKNLPNEKVLPKHSLLYEYFTVYNELTKVKYVTEGMRKPAFLSGEQKKAIVDLLFKTNRKVTVKQLKEDYFKKIECFDSVEISGVEDRFNASLGTYHDLLKIIKDKDFLDNEENEDILEDIVLTLTLFEDREMIEERLKTYAHLFDDKVMKQLKRRRYTGWGRLSRKLINGIRDKQSGKTILDFLKSDGFANRNFMQLIHDDSLTFKEDIQKAQVSGQGDSLHEHIANLAGSPAIKKGILQTVKVVDELVKVMGRHKPENIVIEMARENQTTQKGQKNSRERMKRIEEGIKELGSQILKEHPVENTQLQNEKLYLYYLQNGRDMYVDQELDINRLSDYDVDHIVPQSFLKDDSIDNKVLTRSDKARGKSDNVPSEEVVKKMKNYWRQLLNAKLITQRKFDNLTKAERGGLSELDKAGFIKRQLVETRQITKHVAQILDSRMNTKYDENDKLIREVKVITLKSKLVSDFRKDFQFYKVREINNYHHAHDAYLNAVVGTALIKKYPKLESEFVYGDYKVYDVRKMIAKSEQEIGKATAKYFFYSNIMNFFKTEITLANGEIRKRPLIETNGETGEIVWDKGRDFATVRKVLSMPQVNIVKKTEVQTGGFSKESILPKRNSDKLIARKKDWDPKKYGGFDSPTVAYSVLVVAKVEKGKSKKLKSVKELLGITIMERSSFEKNPIDFLEAKGYKEVKKDLIIKLPKYSLFELENGRKRMLASAGELQKGNELALPSKYVNFLYLASHYEKLKGSPEDNEQKQLFVEQHKHYLDEIIEQISEFSKRVILADANLDKVLSAYNKHRDKPIREQAENIIHLFTLTNLGAPAAFKYFDTTIDRKRYTSTKEVLDATLIHQSITGLYETRIDLSQLGGDGGGGSEAAAKGGGGGTLGIEDEYRLHETSTEPDVSLGSTWLSDFPQAWAETGGMGLAVRQAPLIIPLKATSTPVSIQQYPMSHEARLGIKPHIQRLLDQGILVPCQSPWNTPLLPVKKPGTNDYRPVQDLREVNKRVEDIHPTVPNPYNLLSGLPPSHQWYTVLDLKDAFFCLRLHPTSQPLFAFEWRDPGMGISGQLTWTRLPQGFKNSPTLFNEALHRDLADFRIQHPDLILLQYVDDILLAATSELDCQQGTRALLQTLGDLGYRASAKKAQICQKQVKYLGYLLREGQRWLTEARKETVMGQPVPKTPRQLREFLGTAGFCRLWIPGFAEMAAPLYPLTKPGTLFSWGPDQQKAYQEIKQALLTAPALGLPDLTKPFELFVDEKQGYAKGVLTQKLGPWRRPVAYLSKKLDPVAAGWPPCLRMVAAIAVLTKDAGKLTMGQPLVILAPHAVEALVKQPPDRWLSNARMTHYQAMLLDTDRVQFGPVVALNPATLLPLPEEGAPHDCLEILAETHGTRPDLTDQPIPDADHTWYTDGSSFLQEGQRKAGAAVTTETEVIWAGALPAGTSAQRAELIALTQALKMAEGKRLNVYTDSRYAFATAHIHGEIYRRRGWLTSEGREIKNKSEILALLKALFLPKRLSIIHCLGHQKGDSAEARGNRLADQAAREAAIKTPPDTSTLLAGKRTADGSEFEKRTADGSEFESPKKKAKVE

SEQ ID NO: 2075 - protein, 2096 aa, synthetic construct
MPAAKRVKLDGGDKKYSIGLDIGTNSVGWAVITDEYKVPSKKFKVLGNTDRHSIKKNLIGALLFDSGETAEATRLKRTARRRYTRRKNRICYLQEIFSNEMAKVDDSFFHRLEESFLVEEDKKHERHPIFGNIVDEVAYHEKYPTIYHLRKKLVDSTDKADLRLIYLALAHMIKFRGHFLIEGDLNPDNSDVDKLFIQLVQTYNQLFEENPINASGVDAKAILSARLSKSRRLENLIAQLPGEKKNGLFGNLIALSLGLTPNFKSNFDLAEDAKLQLSKDTYDDDLDNLLAQIGDQYADLFLAAKNLSDAILLSDILRVNTEITKAPLSASMIKRYDEHHQDLTLLKALVRQQLPEKYKEIFFDQSKNGYAGYIDGGASQEEFYKFIKPILEKMDGTEELLVKLNREDLLRKQRTFDNGSIPHQIHLGELHAILRRQEDFYPFLKDNREKIEKILTFRIPYYVGPLARGNSRFAWMTRKSEETITPWNFEEVVDKGASAQSFIERMTNFDKNLPNEKVLPKHSLLYEYFTVYNELTKVKYVTEGMRKPAFLSGEQKKAIVDLLFKTNRKVTVKQLKEDYFKKIECFDSVEISGVEDRFNASLGTYHDLLKIIKDKDFLDNEENEDILEDIVLTLTLFEDREMIEERLKTYAHLFDDKVMKQLKRRRYTGWGRLSRKLINGIRDKQSGKTILDFLKSDGFANRNFMQLIHDDSLTFKEDIQKAQVSGQGDSLHEHIANLAGSPAIKKGILQTVKVVDELVKVMGRHKPENIVIEMARENQTTQKGQKNSRERMKRIEEGIKELGSQILKEHPVENTQLQNEKLYLYYLQNGRDMYVDQELDINRLSDYDVDHIVPQSFLKDDSIDNKVLTRSDKARGKSDNVPSEEVVKKMKNYWRQLLNAKLITQRKFDNLTKAERGGLSELDKAGFIKRQLVETRQITKHVAQILDSRMNTKYDENDKLIREVKVITLKSKLVSDFRKDFQFYKVREINNYHHAHDAYLNAVVGTALIKKYPKLESEFVYGDYKVYDVRKMIAKSEQEIGKATAKYFFYSNIMNFFKTEITLANGEIRKRPLIETNGETGEIVWDKGRDFATVRKVLSMPQVNIVKKTEVQTGGFSKESILPKRNSDKLIARKKDWDPKKYGGFDSPTVAYSVLVVAKVEKGKSKKLKSVKELLGITIMERSSFEKNPIDFLEAKGYKEVKKDLIIKLPKYSLFELENGRKRMLASAGELQKGNELALPSKYVNFLYLASHYEKLKGSPEDNEQKQLFVEQHKHYLDEIIEQISEFSKRVILADANLDKVLSAYNKHRDKPIREQAENIIHLFTLTNLGAPAAFKYFDTTIDRKRYTSTKEVLDATLIHQSITGLYETRIDLSQLGGDGGGSSEAAAKGGGGGTLGIEDEYRLHETSTEPDVSLGSTWLSDFPQAWAETGGMGLAVRQAPLIIPLKATSTPVSIQQYPMSHEARLGIKPHIQRLLDQGILVPCQSPWNTPLLPVKKPGTNDYRPVQDLREVNKRVEDIHPTVPNPYNLLSGLPPSHQWYTVLDLKDAFFCLRLHPTSQPLFAFEWRDPGMGISGQLTWTRLPQGFKNSPTLFNEALHRDLADFRIQHPDLILLQYVDDILLAATSELDCQQGTRALLQTLGDLGYRASAKKAQICQKQVKYLGYLLREGQRWLTEARKETVMGQPVPKTPRQLREFLGTAGFCRLWIPGFAEMAAPLYPLTKPGTLFSWGPDQQKAYQEIKQALLTAPALGLPDLTKPFELFVDEKQGYAKGVLTQKLGPWRRPVAYLSKKLDPVAAGWPPCLRMVAAIAVLTKDAGKLTMGQPLVILAPHAVEALVKQPPDRWLSNARMTHYQAMLLDTDRVQFGPVVALNPATLLPLPEEGAPHDCLEILAETHGTRPDLTDQPIPDADHTWYTDGSSFLQEGQRKAGAAVTTETEVIWAGALPAGTSAQRAELIALTQALKMAEGKRLNVYTDSRYAFATAHIHGEIYRRRGWLTSEGREIKNKSEILALLKALFLPKRLSIIHCLGHQKGDSAEARGNRLADQAAREAAIKTPPDTSTLLAGKRTADGSEFEKRTADGSEFESPKKKAKVE

SEQ ID NO: 2076 - protein, 2096 aa, synthetic construct
MPAAKRVKLDGGDKKYSIGLDIGTNSVGWAVITDEYKVPSKKFKVLGNTDRHSIKKNLIGALLFDSGETAEATRLKRTARRRYTRRKNRICYLQEIFSNEMAKVDDSFFHRLEESFLVEEDKKHERHPIFGNIVDEVAYHEKYPTIYHLRKKLVDSTDKADLRLIYLALAHMIKFRGHFLIEGDLNPDNSDVDKLFIQLVQTYNQLFEENPINASGVDAKAILSARLSKSRRLENLIAQLPGEKKNGLFGNLIALSLGLTPNFKSNFDLAEDAKLQLSKDTYDDDLDNLLAQIGDQYADLFLAAKNLSDAILLSDILRVNTEITKAPLSASMIKRYDEHHQDLTLLKALVRQQLPEKYKEIFFDQSKNGYAGYIDGGASQEEFYKFIKPILEKMDGTEELLVKLNREDLLRKQRTFDNGSIPHQIHLGELHAILRRQEDFYPFLKDNREKIEKILTFRIPYYVGPLARGNSRFAWMTRKSEETITPWNFEEVVDKGASAQSFIERMTNFDKNLPNEKVLPKHSLLYEYFTVYNELTKVKYVTEGMRKPAFLSGEQKKAIVDLLFKTNRKVTVKQLKEDYFKKIECFDSVEISGVEDRFNASLGTYHDLLKIIKDKDFLDNEENEDILEDIVLTLTLFEDREMIEERLKTYAHLFDDKVMKQLKRRRYTGWGRLSRKLINGIRDKQSGKTILDFLKSDGFANRNFMQLIHDDSLTFKEDIQKAQVSGQGDSLHEHIANLAGSPAIKKGILQTVKVVDELVKVMGRHKPENIVIEMARENQTTQKGQKNSRERMKRIEEGIKELGSQILKEHPVENTQLQNEKLYLYYLQNGRDMYVDQELDINRLSDYDVDHIVPQSFLKDDSIDNKVLTRSDKARGKSDNVPSEEVVKKMKNYWRQLLNAKLITQRKFDNLTKAERGGLSELDKAGFIKRQLVETRQITKHVAQILDSRMNTKYDENDKLIREVKVITLKSKLVSDFRKDFQFYKVREINNYHHAHDAYLNAVVGTALIKKYPKLESEFVYGDYKVYDVRKMIAKSEQEIGKATAKYFFYSNIMNFFKTEITLANGEIRKRPLIETNGETGEIVWDKGRDFATVRKVLSMPQVNIVKKTEVQTGGFSKESILPKRNSDKLIARKKDWDPKKYGGFDSPTVAYSVLVVAKVEKGKSKKLKSVKELLGITIMERSSFEKNPIDFLEAKGYKEVKKDLIIKLPKYSLFELENGRKRMLASAGELQKGNELALPSKYVNFLYLASHYEKLKGSPEDNEQKQLFVEQHKHYLDEIIEQISEFSKRVILADANLDKVLSAYNKHRDKPIREQAENIIHLFTLTNLGAPAAFKYFDTTIDRKRYTSTKEVLDATLIHQSITGLYETRIDLSQLGGDGGGSSGGSEAAAKGGTLGIEDEYRLHETSTEPDVSLGSTWLSDFPQAWAETGGMGLAVRQAPLIIPLKATSTPVSIQQYPMSHEARLGIKPHIQRLLDQGILVPCQSPWNTPLLPVKKPGTNDYRPVQDLREVNKRVEDIHPTVPNPYNLLSGLPPSHQWYTVLDLKDAFFCLRLHPTSQPLFAFEWRDPGMGISGQLTWTRLPQGFKNSPTLFNEALHRDLADFRIQHPDLILLQYVDDILLAATSELDCQQGTRALLQTLGDLGYRASAKKAQICQKQVKYLGYLLREGQRWLTEARKETVMGQPVPKTPRQLREFLGTAGFCRLWIPGFAEMAAPLYPLTKPGTLFSWGPDQQKAYQEIKQALLTAPALGLPDLTKPFELFVDEKQGYAKGVLTQKLGPWRRPVAYLSKKLDPVAAGWPPCLRMVAAIAVLTKDAGKLTMGQPLVILAPHAVEALVKQPPDRWLSNARMTHYQAMLLDTDRVQFGPVVALNPATLLPLPEEGAPHDCLEILAETHGTRPDLTDQPIPDADHTWYTDGSSFLQEGQRKAGAAVTTETEVIWAGALPAGTSAQRAELIALTQALKMAEGKRLNVYTDSRYAFATAHIHGEIYRRRGWLTSEGREIKNKSEILALLKALFLPKRLSIIHCLGHQKGDSAEARGNRLADQAAREAAIKTPPDTSTLLAGKRTADGSEFEKRTADGSEFESPKKKAKVE

SEQ ID NO: 2077 - protein, 2090 aa, synthetic construct
MPAAKRVKLDGGDKKYSIGLDIGTNSVGWAVITDEYKVPSKKFKVLGNTDRHSIKKNLIGALLFDSGETAEATRLKRTARRRYTRRKNRICYLQEIFSNEMAKVDDSFFHRLEESFLVEEDKKHERHPIFGNIVDEVAYHEKYPTIYHLRKKLVDSTDKADLRLIYLALAHMIKFRGHFLIEGDLNPDNSDVDKLFIQLVQTYNQLFEENPINASGVDAKAILSARLSKSRRLENLIAQLPGEKKNGLFGNLIALSLGLTPNFKSNFDLAEDAKLQLSKDTYDDDLDNLLAQIGDQYADLFLAAKNLSDAILLSDILRVNTEITKAPLSASMIKRYDEHHQDLTLLKALVRQQLPEKYKEIFFDQSKNGYAGYIDGGASQEEFYKFIKPILEKMDGTEELLVKLNREDLLRKQRTFDNGSIPHQIHLGELHAILRRQEDFYPFLKDNREKIEKILTFRIPYYVGPLARGNSRFAWMTRKSEETITPWNFEEVVDKGASAQSFIERMTNFDKNLPNEKVLPKHSLLYEYFTVYNELTKVKYVTEGMRKPAFLSGEQKKAIVDLLFKTNRKVTVKQLKEDYFKKIECFDSVEISGVEDRFNASLGTYHDLLKIIKDKDFLDNEENEDILEDIVLTLTLFEDREMIEERLKTYAHLFDDKVMKQLKRRRYTGWGRLSRKLINGIRDKQSGKTILDFLKSDGFANRNFMQLIHDDSLTFKEDIQKAQVSGQGDSLHEHIANLAGSPAIKKGILQTVKVVDELVKVMGRHKPENIVIEMARENQTTQKGQKNSRERMKRIEEGIKELGSQILKEHPVENTQLQNEKLYLYYLQNGRDMYVDQELDINRLSDYDVDHIVPQSFLKDDSIDNKVLTRSDKARGKSDNVPSEEVVKKMKNYWRQLLNAKLITQRKFDNLTKAERGGLSELDKAGFIKRQLVETRQITKHVAQILDSRMNTKYDENDKLIREVKVITLKSKLVSDFRKDFQFYKVREINNYHHAHDAYLNAVVGTALIKKYPKLESEFVYGDYKVYDVRKMIAKSEQEIGKATAKYFFYSNIMNFFKTEITLANGEIRKRPLIETNGETGEIVWDKGRDFATVRKVLSMPQVNIVKKTEVQTGGFSKESILPKRNSDKLIARKKDWDPKKYGGFDSPTVAYSVLVVAKVEKGKSKKLKSVKELLGITIMERSSFEKNPIDFLEAKGYKEVKKDLIIKLPKYSLFELENGRKRMLASAGELQKGNELALPSKYVNFLYLASHYEKLKGSPEDNEQKQLFVEQHKHYLDEIIEQISEFSKRVILADANLDKVLSAYNKHRDKPIREQAENIIHLFTLTNLGAPAAFKYFDTTIDRKRYTSTKEVLDATLIHQSITGLYETRIDLSQLGGDGGPAPAPGGTLGIEDEYRLHETSTEPDVSLGSTWLSDFPQAWAETGGMGLAVRQAPLIIPLKATSTPVSIQQYPMSHEARLGIKPHIQRLLDQGILVPCQSPWNTPLLPVKKPGTNDYRPVQDLREVNKRVEDIHPTVPNPYNLLSGLPPSHQWYTVLDLKDAFFCLRLHPTSQPLFAFEWRDPGMGISGQLTWTRLPQGFKNSPTLFNEALHRDLADFRIQHPDLILLQYVDDILLAATSELDCQQGTRALLQTLGDLGYRASAKKAQICQKQVKYLGYLLREGQRWLTEARKETVMGQPVPKTPRQLREFLGTAGFCRLWIPGFAEMAAPLYPLTKPGTLFSWGPDQQKAYQEIKQALLTAPALGLPDLTKPFELFVDEKQGYAKGVLTQKLGPWRRPVAYLSKKLDPVAAGWPPCLRMVAAIAVLTKDAGKLTMGQPLVILAPHAVEALVKQPPDRWLSNARMTHYQAMLLDTDRVQFGPVVALNPATLLPLPEEGAPHDCLEILAETHGTRPDLTDQPIPDADHTWYTDGSSFLQEGQRKAGAAVTTETEVIWAGALPAGTSAQRAELIALTQALKMAEGKRLNVYTDSRYAFATAHIHGEIYRRRGWLTSEGREIKNKSEILALLKALFLPKRLSIIHCLGHQKGDSAEARGNRLADQAAREAAIKTPPDTSTLLAGKRTADGSEFEKRTADGSEFESPKKKAKVE

SEQ ID NO: 2078 - protein, 2091 aa, synthetic construct
MPAAKRVKLDGGDKKYSIGLDIGTNSVGWAVITDEYKVPSKKFKVLGNTDRHSIKKNLIGALLFDSGETAEATRLKRTARRRYTRRKNRICYLQEIFSNEMAKVDDSFFHRLEESFLVEEDKKHERHPIFGNIVDEVAYHEKYPTIYHLRKKLVDSTDKADLRLIYLALAHMIKFRGHFLIEGDLNPDNSDVDKLFIQLVQTYNQLFEENPINASGVDAKAILSARLSKSRRLENLIAQLPGEKKNGLFGNLIALSLGLTPNFKSNFDLAEDAKLQLSKDTYDDDLDNLLAQIGDQYADLFLAAKNLSDAILLSDILRVNTEITKAPLSASMIKRYDEHHQDLTLLKALVRQQLPEKYKEIFFDQSKNGYAGYIDGGASQEEFYKFIKPILEKMDGTEELLVKLNREDLLRKQRTFDNGSIPHQIHLGELHAILRRQEDFYPFLKDNREKIEKILTFRIPYYVGPLARGNSRFAWMTRKSEETITPWNFEEVVDKGASAQSFIERMTNFDKNLPNEKVLPKHSLLYEYFTVYNELTKVKYVTEGMRKPAFLSGEQKKAIVDLLFKTNRKVTVKQLKEDYFKKIECFDSVEISGVEDRFNASLGTYHDLLKIIKDKDFLDNEENEDILEDIVLTLTLFEDREMIEERLKTYAHLFDDKVMKQLKRRRYTGWGRLSRKLINGIRDKQSGKTILDFLKSDGFANRNFMQLIHDDSLTFKEDIQKAQVSGQGDSLHEHIANLAGSPAIKKGILQTVKVVDELVKVMGRHKPENIVIEMARENQTTQKGQKNSRERMKRIEEGIKELGSQILKEHPVENTQLQNEKLYLYYLQNGRDMYVDQELDINRLSDYDVDHIVPQSFLKDDSIDNKVLTRSDKARGKSDNVPSEEVVKKMKNYWRQLLNAKLITQRKFDNLTKAERGGLSELDKAGFIKRQLVETRQITKHVAQILDSRMNTKYDENDKLIREVKVITLKSKLVSDFRKDFQFYKVREINNYHHAHDAYLNAVVGTALIKKYPKLESEFVYGDYKVYDVRKMIAKSEQEIGKATAKYFFYSNIMNFFKTEITLANGEIRKRPLIETNGETGEIVWDKGRDFATVRKVLSMPQVNIVKKTEVQTGGFSKESILPKRNSDKLIARKKDWDPKKYGGFDSPTVAYSVLVVAKVEKGKSKKLKSVKELLGITIMERSSFEKNPIDFLEAKGYKEVKKDLIIKLPKYSLFELENGRKRMLASAGELQKGNELALPSKYVNFLYLASHYEKLKGSPEDNEQKQLFVEQHKHYLDEIIEQISEFSKRVILADANLDKVLSAYNKHRDKPIREQAENIIHLFTLTNLGAPAAFKYFDTTIDRKRYTSTKEVLDATLIHQSITGLYETRIDLSQLGGDGGPAPGGSGGTLGIEDEYRLHETSTEPDVSLGSTWLSDFPQAWAETGGMGLAVRQAPLIIPLKATSTPVSIQQYPMSHEARLGIKPHIQRLLDQGILVPCQSPWNTPLLPVKKPGTNDYRPVQDLREVNKRVEDIHPTVPNPYNLLSGLPPSHQWYTVLDLKDAFFCLRLHPTSQPLFAFEWRDPGMGISGQLTWTRLPQGFKNSPTLFNEALHRDLADFRIQHPDLILLQYVDDILLAATSELDCQQGTRALLQTLGDLGYRASAKKAQICQKQVKYLGYLLREGQRWLTEARKETVMGQPVPKTPRQLREFLGTAGFCRLWIPGFAEMAAPLYPLTKPGTLFSWGPDQQKAYQEIKQALLTAPALGLPDLTKPFELFVDEKQGYAKGVLTQKLGPWRRPVAYLSKKLDPVAAGWPPCLRMVAAIAVLTKDAGKLTMGQPLVILAPHAVEALVKQPPDRWLSNARMTHYQAMLLDTDRVQFGPVVALNPATLLPLPEEGAPHDCLEILAETHGTRPDLTDQPIPDADHTWYTDGSSFLQEGQRKAGAAVTTETEVIWAGALPAGTSAQRAELIALTQALKMAEGKRLNVYTDSRYAFATAHIHGEIYRRRGWLTSEGREIKNKSEILALLKALFLPKRLSIIHCLGHQKGDSAEARGNRLADQAAREAAIKTPPDTSTLLAGKRTADGSEFEKRTADGSEFESPKKKAKVE

SEQ ID NO: 2079 - protein, 2094 aa, synthetic construct
MPAAKRVKLDGGDKKYSIGLDIGTNSVGWAVITDEYKVPSKKFKVLGNTDRHSIKKNLIGALLFDSGETAEATRLKRTARRRYTRRKNRICYLQEIFSNEMAKVDDSFFHRLEESFLVEEDKKHERHPIFGNIVDEVAYHEKYPTIYHLRKKLVDSTDKADLRLIYLALAHMIKFRGHFLIEGDLNPDNSDVDKLFIQLVQTYNQLFEENPINASGVDAKAILSARLSKSRRLENLIAQLPGEKKNGLFGNLIALSLGLTPNFKSNFDLAEDAKLQLSKDTYDDDLDNLLAQIGDQYADLFLAAKNLSDAILLSDILRVNTEITKAPLSASMIKRYDEHHQDLTLLKALVRQQLPEKYKEIFFDQSKNGYAGYIDGGASQEEFYKFIKPILEKMDGTEELLVKLNREDLLRKQRTFDNGSIPHQIHLGELHAILRRQEDFYPFLKDNREKIEKILTFRIPYYVGPLARGNSRFAWMTRKSEETITPWNFEEVVDKGASAQSFIERMTNFDKNLPNEKVLPKHSLLYEYFTVYNELTKVKYVTEGMRKPAFLSGEQKKAIVDLLFKTNRKVTVKQLKEDYFKKIECFDSVEISGVEDRFNASLGTYHDLLKIIKDKDFLDNEENEDILEDIVLTLTLFEDREMIEERLKTYAHLFDDKVMKQLKRRRYTGWGRLSRKLINGIRDKQSGKTILDFLKSDGFANRNFMQLIHDDSLTFKEDIQKAQVSGQGDSLHEHIANLAGSPAIKKGILQTVKVVDELVKVMGRHKPENIVIEMARENQTTQKGQKNSRERMKRIEEGIKELGSQILKEHPVENTQLQNEKLYLYYLQNGRDMYVDQELDINRLSDYDVDHIVPQSFLKDDSIDNKVLTRSDKARGKSDNVPSEEVVKKMKNYWRQLLNAKLITQRKFDNLTKAERGGLSELDKAGFIKRQLVETRQITKHVAQILDSRMNTKYDENDKLIREVKVITLKSKLVSDFRKDFQFYKVREINNYHHAHDAYLNAVVGTALIKKYPKLESEFVYGDYKVYDVRKMIAKSEQEIGKATAKYFFYSNIMNFFKTEITLANGEIRKRPLIETNGETGEIVWDKGRDFATVRKVLSMPQVNIVKKTEVQTGGFSKESILPKRNSDKLIARKKDWDPKKYGGFDSPTVAYSVLVVAKVEKGKSKKLKSVKELLGITIMERSSFEKNPIDFLEAKGYKEVKKDLIIKLPKYSLFELENGRKRMLASAGELQKGNELALPSKYVNFLYLASHYEKLKGSPEDNEQKQLFVEQHKHYLDEIIEQISEFSKRVILADANLDKVLSAYNKHRDKPIREQAENIIHLFTLTNLGAPAAFKYFDTTIDRKRYTSTKEVLDATLIHQSITGLYETRIDLSQLGGDGGPAPGSSGGGGGTLGIEDEYRLHETSTEPDVSLGSTWLSDFPQAWAETGGMGLAVRQAPLIIPLKATSTPVSIQQYPMSHEARLGIKPHIQRLLDQGILVPCQSPWNTPLLPVKKPGTNDYRPVQDLREVNKRVEDIHPTVPNPYNLLSGLPPSHQWYTVLDLKDAFFCLRLHPTSQPLFAFEWRDPGMGISGQLTWTRLPQGFKNSPTLFNEALHRDLADFRIQHPDLILLQYVDDILLAATSELDCQQGTRALLQTLGDLGYRASAKKAQICQKQVKYLGYLLREGQRWLTEARKETVMGQPVPKTPRQLREFLGTAGFCRLWIPGFAEMAAPLYPLTKPGTLFSWGPDQQKAYQEIKQALLTAPALGLPDLTKPFELFVDEKQGYAKGVLTQKLGPWRRPVAYLSKKLDPVAAGWPPCLRMVAAIAVLTKDAGKLTMGQPLVILAPHAVEALVKQPPDRWLSNARMTHYQAMLLDTDRVQFGPVVALNPATLLPLPEEGAPHDCLEILAETHGTRPDLTDQPIPDADHTWYTDGSSFLQEGQRKAGAAVTTETEVIWAGALPAGTSAQRAELIALTQALKMAEGKRLNVYTDSRYAFATAHIHGEIYRRRGWLTSEGREIKNKSEILALLKALFLPKRLSIIHCLGHQKGDSAEARGNRLADQAAREAAIKTPPDTSTLLAGKRTADGSEFEKRTADGSEFESPKKKAKVE

SEQ ID NO: 2080 - protein, 2094 aa, synthetic construct
MPAAKRVKLDGGDKKYSIGLDIGTNSVGWAVITDEYKVPSKKFKVLGNTDRHSIKKNLIGALLFDSGETAEATRLKRTARRRYTRRKNRICYLQEIFSNEMAKVDDSFFHRLEESFLVEEDKKHERHPIFGNIVDEVAYHEKYPTIYHLRKKLVDSTDKADLRLIYLALAHMIKFRGHFLIEGDLNPDNSDVDKLFIQLVQTYNQLFEENPINASGVDAKAILSARLSKSRRLENLIAQLPGEKKNGLFGNLIALSLGLTPNFKSNFDLAEDAKLQLSKDTYDDDLDNLLAQIGDQYADLFLAAKNLSDAILLSDILRVNTEITKAPLSASMIKRYDEHHQDLTLLKALVRQQLPEKYKEIFFDQSKNGYAGYIDGGASQEEFYKFIKPILEKMDGTEELLVKLNREDLLRKQRTFDNGSIPHQIHLGELHAILRRQEDFYPFLKDNREKIEKILTFRIPYYVGPLARGNSRFAWMTRKSEETITPWNFEEVVDKGASAQSFIERMTNFDKNLPNEKVLPKHSLLYEYFTVYNELTKVKYVTEGMRKPAFLSGEQKKAIVDLLFKTNRKVTVKQLKEDYFKKIECFDSVEISGVEDRFNASLGTYHDLLKIIKDKDFLDNEENEDILEDIVLTLTLFEDREMIEERLKTYAHLFDDKVMKQLKRRRYTGWGRLSRKLINGIRDKQSGKTILDFLKSDGFANRNFMQLIHDDSLTFKEDIQKAQVSGQGDSLHEHIANLAGSPAIKKGILQTVKVVDELVKVMGRHKPENIVIEMARENQTTQKGQKNSRERMKRIEEGIKELGSQILKEHPVENTQLQNEKLYLYYLQNGRDMYVDQELDINRLSDYDVDHIVPQSFLKDDSIDNKVLTRSDKARGKSDNVPSEEVVKKMKNYWRQLLNAKLITQRKFDNLTKAERGGLSELDKAGFIKRQLVETRQITKHVAQILDSRMNTKYDENDKLIREVKVITLKSKLVSDFRKDFQFYKVREINNYHHAHDAYLNAVVGTALIKKYPKLESEFVYGDYKVYDVRKMIAKSEQEIGKATAKYFFYSNIMNFFKTEITLANGEIRKRPLIETNGETGEIVWDKGRDFATVRKVLSMPQVNIVKKTEVQTGGFSKESILPKRNSDKLIARKKDWDPKKYGGFDSPTVAYSVLVVAKVEKGKSKKLKSVKELLGITIMERSSFEKNPIDFLEAKGYKEVKKDLIIKLPKYSLFELENGRKRMLASAGELQKGNELALPSKYVNFLYLASHYEKLKGSPEDNEQKQLFVEQHKHYLDEIIEQISEFSKRVILADANLDKVLSAYNKHRDKPIREQAENIIHLFTLTNLGAPAAFKYFDTTIDRKRYTSTKEVLDATLIHQSITGLYETRIDLSQLGGDGGGSSPAPGGSGGTLGIEDEYRLHETSTEPDVSLGSTWLSDFPQAWAETGGMGLAVRQAPLIIPLKATSTPVSIQQYPMSHEARLGIKPHIQRLLDQGILVPCQSPWNTPLLPVKKPGTNDYRPVQDLREVNKRVEDIHPTVPNPYNLLSGLPPSHQWYTVLDLKDAFFCLRLHPTSQPLFAFEWRDPGMGISGQLTWTRLPQGFKNSPTLFNEALHRDLADFRIQHPDLILLQYVDDILLAATSELDCQQGTRALLQTLGDLGYRASAKKAQICQKQVKYLGYLLREGQRWLTEARKETVMGQPVPKTPRQLREFLGTAGFCRLWIPGFAEMAAPLYPLTKPGTLFSWGPDQQKAYQEIKQALLTAPALGLPDLTKPFELFVDEKQGYAKGVLTQKLGPWRRPVAYLSKKLDPVAAGWPPCLRMVAAIAVLTKDAGKLTMGQPLVILAPHAVEALVKQPPDRWLSNARMTHYQAMLLDTDRVQFGPVVALNPATLLPLPEEGAPHDCLEILAETHGTRPDLTDQPIPDADHTWYTDGSSFLQEGQRKAGAAVTTETEVIWAGALPAGTSAQRAELIALTQALKMAEGKRLNVYTDSRYAFATAHIHGEIYRRRGWLTSEGREIKNKSEILALLKALFLPKRLSIIHCLGHQKGDSAEARGNRLADQAAREAAIKTPPDTSTLLAGKRTADGSEFEKRTADGSEFESPKKKAKVE

SEQ ID NO: 2081 - protein, 2093 aa, synthetic construct
MPAAKRVKLDGGDKKYSIGLDIGTNSVGWAVITDEYKVPSKKFKVLGNTDRHSIKKNLIGALLFDSGETAEATRLKRTARRRYTRRKNRICYLQEIFSNEMAKVDDSFFHRLEESFLVEEDKKHERHPIFGNIVDEVAYHEKYPTIYHLRKKLVDSTDKADLRLIYLALAHMIKFRGHFLIEGDLNPDNSDVDKLFIQLVQTYNQLFEENPINASGVDAKAILSARLSKSRRLENLIAQLPGEKKNGLFGNLIALSLGLTPNFKSNFDLAEDAKLQLSKDTYDDDLDNLLAQIGDQYADLFLAAKNLSDAILLSDILRVNTEITKAPLSASMIKRYDEHHQDLTLLKALVRQQLPEKYKEIFFDQSKNGYAGYIDGGASQEEFYKFIKPILEKMDGTEELLVKLNREDLLRKQRTFDNGSIPHQIHLGELHAILRRQEDFYPFLKDNREKIEKILTFRIPYYVGPLARGNSRFAWMTRKSEETITPWNFEEVVDKGASAQSFIERMTNFDKNLPNEKVLPKHSLLYEYFTVYNELTKVKYVTEGMRKPAFLSGEQKKAIVDLLFKTNRKVTVKQLKEDYFKKIECFDSVEISGVEDRFNASLGTYHDLLKIIKDKDFLDNEENEDILEDIVLTLTLFEDREMIEERLKTYAHLFDDKVMKQLKRRRYTGWGRLSRKLINGIRDKQSGKTILDFLKSDGFANRNFMQLIHDDSLTFKEDIQKAQVSGQGDSLHEHIANLAGSPAIKKGILQTVKVVDELVKVMGRHKPENIVIEMARENQTTQKGQKNSRERMKRIEEGIKELGSQILKEHPVENTQLQNEKLYLYYLQNGRDMYVDQELDINRLSDYDVDHIVPQSFLKDDSIDNKVLTRSDKARGKSDNVPSEEVVKKMKNYWRQLLNAKLITQRKFDNLTKAERGGLSELDKAGFIKRQLVETRQITKHVAQILDSRMNTKYDENDKLIREVKVITLKSKLVSDFRKDFQFYKVREINNYHHAHDAYLNAVVGTALIKKYPKLESEFVYGDYKVYDVRKMIAKSEQEIGKATAKYFFYSNIMNFFKTEITLANGEIRKRPLIETNGETGEIVWDKGRDFATVRKVLSMPQVNIVKKTEVQTGGFSKESILPKRNSDKLIARKKDWDPKKYGGFDSPTVAYSVLVVAKVEKGKSKKLKSVKELLGITIMERSSFEKNPIDFLEAKGYKEVKKDLIIKLPKYSLFELENGRKRMLASAGELQKGNELALPSKYVNFLYLASHYEKLKGSPEDNEQKQLFVEQHKHYLDEIIEQISEFSKRVILADANLDKVLSAYNKHRDKPIREQAENIIHLFTLTNLGAPAAFKYFDTTIDRKRYTSTKEVLDATLIHQSITGLYETRIDLSQLGGDGGEAAAKGGGGGTLGIEDEYRLHETSTEPDVSLGSTWLSDFPQAWAETGGMGLAVRQAPLIIPLKATSTPVSIQQYPMSHEARLGIKPHIQRLLDQGILVPCQSPWNTPLLPVKKPGTNDYRPVQDLREVNKRVEDIHPTVPNPYNLLSGLPPSHQWYTVLDLKDAFFCLRLHPTSQPLFAFEWRDPGMGISGQLTWTRLPQGFKNSPTLFNEALHRDLADFRIQHPDLILLQYVDDILLAATSELDCQQGTRALLQTLGDLGYRASAKKAQICQKQVKYLGYLLREGQRWLTEARKETVMGQPVPKTPRQLREFLGTAGFCRLWIPGFAEMAAPLYPLTKPGTLFSWGPDQQKAYQEIKQALLTAPALGLPDLTKPFELFVDEKQGYAKGVLTQKLGPWRRPVAYLSKKLDPVAAGWPPCLRMVAAIAVLTKDAGKLTMGQPLVILAPHAVEALVKQPPDRWLSNARMTHYQAMLLDTDRVQFGPVVALNPATLLPLPEEGAPHDCLEILAETHGTRPDLTDQPIPDADHTWYTDGSSFLQEGQRKAGAAVTTETEVIWAGALPAGTSAQRAELIALTQALKMAEGKRLNVYTDSRYAFATAHIHGEIYRRRGWLTSEGREIKNKSEILALLKALFLPKRLSIIHCLGHQKGDSAEARGNRLADQAAREAAIKTPPDTSTLLAGKRTADGSEFEKRTADGSEFESPKKKAKVE

SEQ ID NO: 2082 - protein, 2096 aa, synthetic construct
MPAAKRVKLDGGDKKYSIGLDIGTNSVGWAVITDEYKVPSKKFKVLGNTDRHSIKKNLIGALLFDSGETAEATRLKRTARRRYTRRKNRICYLQEIFSNEMAKVDDSFFHRLEESFLVEEDKKHERHPIFGNIVDEVAYHEKYPTIYHLRKKLVDSTDKADLRLIYLALAHMIKFRGHFLIEGDLNPDNSDVDKLFIQLVQTYNQLFEENPINASGVDAKAILSARLSKSRRLENLIAQLPGEKKNGLFGNLIALSLGLTPNFKSNFDLAEDAKLQLSKDTYDDDLDNLLAQIGDQYADLFLAAKNLSDAILLSDILRVNTEITKAPLSASMIKRYDEHHQDLTLLKALVRQQLPEKYKEIFFDQSKNGYAGYIDGGASQEEFYKFIKPILEKMDGTEELLVKLNREDLLRKQRTFDNGSIPHQIHLGELHAILRRQEDFYPFLKDNREKIEKILTFRIPYYVGPLARGNSRFAWMTRKSEETITPWNFEEVVDKGASAQSFIERMTNFDKNLPNEKVLPKHSLLYEYFTVYNELTKVKYVTEGMRKPAFLSGEQKKAIVDLLFKTNRKVTVKQLKEDYFKKIECFDSVEISGVEDRFNASLGTYHDLLKIIKDKDFLDNEENEDILEDIVLTLTLFEDREMIEERLKTYAHLFDDKVMKQLKRRRYTGWGRLSRKLINGIRDKQSGKTILDFLKSDGFANRNFMQLIHDDSLTFKEDIQKAQVSGQGDSLHEHIANLAGSPAIKKGILQTVKVVDELVKVMGRHKPENIVIEMARENQTTQKGQKNSRERMKRIEEGIKELGSQILKEHPVENTQLQNEKLYLYYLQNGRDMYVDQELDINRLSDYDVDHIVPQSFLKDDSIDNKVLTRSDKARGKSDNVPSEEVVKKMKNYWRQLLNAKLITQRKFDNLTKAERGGLSELDKAGFIKRQLVETRQITKHVAQILDSRMNTKYDENDKLIREVKVITLKSKLVSDFRKDFQFYKVREINNYHHAHDAYLNAVVGTALIKKYPKLESEFVYGDYKVYDVRKMIAKSEQEIGKATAKYFFYSNIMNFFKTEITLANGEIRKRPLIETNGETGEIVWDKGRDFATVRKVLSMPQVNIVKKTEVQTGGFSKESILPKRNSDKLIARKKDWDPKKYGGFDSPTVAYSVLVVAKVEKGKSKKLKSVKELLGITIMERSSFEKNPIDFLEAKGYKEVKKDLIIKLPKYSLFELENGRKRMLASAGELQKGNELALPSKYVNFLYLASHYEKLKGSPEDNEQKQLFVEQHKHYLDEIIEQISEFSKRVILADANLDKVLSAYNKHRDKPIREQAENIIHLFTLTNLGAPAAFKYFDTTIDRKRYTSTKEVLDATLIHQSITGLYETRIDLSQLGGDGGGGGGGSEAAAKGGTLGIEDEYRLHETSTEPDVSLGSTWLSDFPQAWAETGGMGLAVRQAPLIIPLKATSTPVSIQQYPMSHEARLGIKPHIQRLLDQGILVPCQSPWNTPLLPVKKPGTNDYRPVQDLREVNKRVEDIHPTVPNPYNLLSGLPPSHQWYTVLDLKDAFFCLRLHPTSQPLFAFEWRDPGMGISGQLTWTRLPQGFKNSPTLFNEALHRDLADFRIQHPDLILLQYVDDILLAATSELDCQQGTRALLQTLGDLGYRASAKKAQICQKQVKYLGYLLREGQRWLTEARKETVMGQPVPKTPRQLREFLGTAGFCRLWIPGFAEMAAPLYPLTKPGTLFSWGPDQQKAYQEIKQALLTAPALGLPDLTKPFELFVDEKQGYAKGVLTQKLGPWRRPVAYLSKKLDPVAAGWPPCLRMVAAIAVLTKDAGKLTMGQPLVILAPHAVEALVKQPPDRWLSNARMTHYQAMLLDTDRVQFGPVVALNPATLLPLPEEGAPHDCLEILAETHGTRPDLTDQPIPDADHTWYTDGSSFLQEGQRKAGAAVTTETEVIWAGALPAGTSAQRAELIALTQALKMAEGKRLNVYTDSRYAFATAHIHGEIYRRRGWLTSEGREIKNKSEILALLKALFLPKRLSIIHCLGHQKGDSAEARGNRLADQAAREAAIKTPPDTSTLLAGKRTADGSEFEKRTADGSEFESPKKKAKVE

SEQ ID NO: 2083 - protein, 2091 aa, synthetic construct
MPAAKRVKLDGGDKKYSIGLDIGTNSVGWAVITDEYKVPSKKFKVLGNTDRHSIKKNLIGALLFDSGETAEATRLKRTARRRYTRRKNRICYLQEIFSNEMAKVDDSFFHRLEESFLVEEDKKHERHPIFGNIVDEVAYHEKYPTIYHLRKKLVDSTDKADLRLIYLALAHMIKFRGHFLIEGDLNPDNSDVDKLFIQLVQTYNQLFEENPINASGVDAKAILSARLSKSRRLENLIAQLPGEKKNGLFGNLIALSLGLTPNFKSNFDLAEDAKLQLSKDTYDDDLDNLLAQIGDQYADLFLAAKNLSDAILLSDILRVNTEITKAPLSASMIKRYDEHHQDLTLLKALVRQQLPEKYKEIFFDQSKNGYAGYIDGGASQEEFYKFIKPILEKMDGTEELLVKLNREDLLRKQRTFDNGSIPHQIHLGELHAILRRQEDFYPFLKDNREKIEKILTFRIPYYVGPLARGNSRFAWMTRKSEETITPWNFEEVVDKGASAQSFIERMTNFDKNLPNEKVLPKHSLLYEYFTVYNELTKVKYVTEGMRKPAFLSGEQKKAIVDLLFKTNRKVTVKQLKEDYFKKIECFDSVEISGVEDRFNASLGTYHDLLKIIKDKDFLDNEENEDILEDIVLTLTLFEDREMIEERLKTYAHLFDDKVMKQLKRRRYTGWGRLSRKLINGIRDKQSGKTILDFLKSDGFANRNFMQLIHDDSLTFKEDIQKAQVSGQGDSLHEHIANLAGSPAIKKGILQTVKVVDELVKVMGRHKPENIVIEMARENQTTQKGQKNSRERMKRIEEGIKELGSQILKEHPVENTQLQNEKLYLYYLQNGRDMYVDQELDINRLSDYDVDHIVPQSFLKDDSIDNKVLTRSDKARGKSDNVPSEEVVKKMKNYWRQLLNAKLITQRKFDNLTKAERGGLSELDKAGFIKRQLVETRQITKHVAQILDSRMNTKYDENDKLIREVKVITLKSKLVSDFRKDFQFYKVREINNYHHAHDAYLNAVVGTALIKKYPKLESEFVYGDYKVYDVRKMIAKSEQEIGKATAKYFFYSNIMNFFKTEITLANGEIRKRPLIETNGETGEIVWDKGRDFATVRKVLSMPQVNIVKKTEVQTGGFSKESILPKRNSDKLIARKKDWDPKKYGGFDSPTVAYSVLVVAKVEKGKSKKLKSVKELLGITIMERSSFEKNPIDFLEAKGYKEVKKDLIIKLPKYSLFELENGRKRMLASAGELQKGNELALPSKYVNFLYLASHYEKLKGSPEDNEQKQLFVEQHKHYLDEIIEQISEFSKRVILADANLDKVLSAYNKHRDKPIREQAENIIHLFTLTNLGAPAAFKYFDTTIDRKRYTSTKEVLDATLIHQSITGLYETRIDLSQLGGDGGGGSPAPGGTLGIEDEYRLHETSTEPDVSLGSTWLSDFPQAWAETGGMGLAVRQAPLIIPLKATSTPVSIQQYPMSHEARLGIKPHIQRLLDQGILVPCQSPWNTPLLPVKKPGTNDYRPVQDLREVNKRVEDIHPTVPNPYNLLSGLPPSHQWYTVLDLKDAFFCLRLHPTSQPLFAFEWRDPGMGISGQLTWTRLPQGFKNSPTLFNEALHRDLADFRIQHPDLILLQYVDDILLAATSELDCQQGTRALLQTLGDLGYRASAKKAQICQKQVKYLGYLLREGQRWLTEARKETVMGQPVPKTPRQLREFLGTAGFCRLWIPGFAEMAAPLYPLTKPGTLFSWGPDQQKAYQEIKQALLTAPALGLPDLTKPFELFVDEKQGYAKGVLTQKLGPWRRPVAYLSKKLDPVAAGWPPCLRMVAAIAVLTKDAGKLTMGQPLVILAPHAVEALVKQPPDRWLSNARMTHYQAMLLDTDRVQFGPVVALNPATLLPLPEEGAPHDCLEILAETHGTRPDLTDQPIPDADHTWYTDGSSFLQEGQRKAGAAVTTETEVIWAGALPAGTSAQRAELIALTQALKMAEGKRLNVYTDSRYAFATAHIHGEIYRRRGWLTSEGREIKNKSEILALLKALFLPKRLSIIHCLGHQKGDSAEARGNRLADQAAREAAIKTPPDTSTLLAGKRTADGSEFEKRTADGSEFESPKKKAKVE

SEQ ID NO: 2084 - protein, 2110 aa, synthetic construct
MPAAKRVKLDGGDKKYSIGLDIGTNSVGWAVITDEYKVPSKKFKVLGNTDRHSIKKNLIGALLFDSGETAEATRLKRTARRRYTRRKNRICYLQEIFSNEMAKVDDSFFHRLEESFLVEEDKKHERHPIFGNIVDEVAYHEKYPTIYHLRKKLVDSTDKADLRLIYLALAHMIKFRGHFLIEGDLNPDNSDVDKLFIQLVQTYNQLFEENPINASGVDAKAILSARLSKSRRLENLIAQLPGEKKNGLFGNLIALSLGLTPNFKSNFDLAEDAKLQLSKDTYDDDLDNLLAQIGDQYADLFLAAKNLSDAILLSDILRVNTEITKAPLSASMIKRYDEHHQDLTLLKALVRQQLPEKYKEIFFDQSKNGYAGYIDGGASQEEFYKFIKPILEKMDGTEELLVKLNREDLLRKQRTFDNGSIPHQIHLGELHAILRRQEDFYPFLKDNREKIEKILTFRIPYYVGPLARGNSRFAWMTRKSEETITPWNFEEVVDKGASAQSFIERMTNFDKNLPNEKVLPKHSLLYEYFTVYNELTKVKYVTEGMRKPAFLSGEQKKAIVDLLFKTNRKVTVKQLKEDYFKKIECFDSVEISGVEDRFNASLGTYHDLLKIIKDKDFLDNEENEDILEDIVLTLTLFEDREMIEERLKTYAHLFDDKVMKQLKRRRYTGWGRLSRKLINGIRDKQSGKTILDFLKSDGFANRNFMQLIHDDSLTFKEDIQKAQVSGQGDSLHEHIANLAGSPAIKKGILQTVKVVDELVKVMGRHKPENIVIEMARENQTTQKGQKNSRERMKRIEEGIKELGSQILKEHPVENTQLQNEKLYLYYLQNGRDMYVDQELDINRLSDYDVDHIVPQSFLKDDSIDNKVLTRSDKARGKSDNVPSEEVVKKMKNYWRQLLNAKLITQRKFDNLTKAERGGLSELDKAGFIKRQLVETRQITKHVAQILDSRMNTKYDENDKLIREVKVITLKSKLVSDFRKDFQFYKVREINNYHHAHDAYLNAVVGTALIKKYPKLESEFVYGDYKVYDVRKMIAKSEQEIGKATAKYFFYSNIMNFFKTEITLANGEIRKRPLIETNGETGEIVWDKGRDFATVRKVLSMPQVNIVKKTEVQTGGFSKESILPKRNSDKLIARKKDWDPKKYGGFDSPTVAYSVLVVAKVEKGKSKKLKSVKELLGITIMERSSFEKNPIDFLEAKGYKEVKKDLIIKLPKYSLFELENGRKRMLASAGELQKGNELALPSKYVNFLYLASHYEKLKGSPEDNEQKQLFVEQHKHYLDEIIEQISEFSKRVILADANLDKVLSAYNKHRDKPIREQAENIIHLFTLTNLGAPAAFKYFDTTIDRKRYTSTKEVLDATLIHQSITGLYETRIDLSQLGGDGGGGGGSGGGGSGGGGSGGGGSGGGGSGGLGIEDEYRLHETSTEPDVSLGSTWLSDFPQAWAETGGMGLAVRQAPLIIPLKATSTPVSIQQYPMSHEARLGIKPHIQRLLDQGILVPCQSPWNTPLLPVKKPGTNDYRPVQDLREVNKRVEDIHPTVPNPYNLLSGLPPSHQWYTVLDLKDAFFCLRLHPTSQPLFAFEWRDPGMGISGQLTWTRLPQGFKNSPTLFNEALHRDLADFRIQHPDLILLQYVDDILLAATSELDCQQGTRALLQTLGDLGYRASAKKAQICQKQVKYLGYLLREGQRWLTEARKETVMGQPVPKTPRQLREFLGKAGFCRLFIPGFAEMAAPLYPLTKPGTLFSWGPDQQKAYQEIKQALLTAPALGLPDLTKPFELFVDEKQGYAKGVLTQKLGPWRRPVAYLSKKLDPVAAGWPPCLRMVAAIAVLTKDAGKLTMGQPLVILAPHAVEALVKQPPDRWLSNARMTHYQAMLLDTDRVQFGPVVALNPATLLPLPEEGAPHDCLEILAETHGTRPDLTDQPIPDADHTWYTDGSSFLQEGQRKAGAAVTTETEVIWAGALPAGTSAQRAELIALTQALKMAEGKRLNVYTDSRYAFATAHIHGEIYRRRGWLTSEGREIKNKSEILALLKALFLPKRLSIIHCLGHQKGDSAEARGNRLADQAAREAAIKTPPDTSTLLIAGKRTADGSEFEKRTADGSEFESPKKKAKVE

SEQ ID NO: 2085 - protein, 2105 aa, synthetic construct
MPAAKRVKLDGGDKKYSIGLDIGTNSVGWAVITDEYKVPSKKFKVLGNTDRHSIKKNLIGALLFDSGETAEATRLKRTARRRYTRRKNRICYLQEIFSNEMAKVDDSFFHRLEESFLVEEDKKHERHPIFGNIVDEVAYHEKYPTIYHLRKKLVDSTDKADLRLIYLALAHMIKFRGHFLIEGDLNPDNSDVDKLFIQLVQTYNQLFEENPINASGVDAKAILSARLSKSRRLENLIAQLPGEKKNGLFGNLIALSLGLTPNFKSNFDLAEDAKLQLSKDTYDDDLDNLLAQIGDQYADLFLAAKNLSDAILLSDILRVNTEITKAPLSASMIKRYDEHHQDLTLLKALVRQQLPEKYKEIFFDQSKNGYAGYIDGGASQEEFYKFIKPILEKMDGTEELLVKLNREDLLRKQRTFDNGSIPHQIHLGELHAILRRQEDFYPFLKDNREKIEKILTFRIPYYVGPLARGNSRFAWMTRKSEETITPWNFEEVVDKGASAQSFIERMTNFDKNLPNEKVLPKHSLLYEYFTVYNELTKVKYVTEGMRKPAFLSGEQKKAIVDLLFKTNRKVTVKQLKEDYFKKIECFDSVEISGVEDRFNASLGTYHDLLKIIKDKDFLDNEENEDILEDIVLTLTLFEDREMIEERLKTYAHLFDDKVMKQLKRRRYTGWGRLSRKLINGIRDKQSGKTILDFLKSDGFANRNFMQLIHDDSLTFKEDIQKAQVSGQGDSLHEHIANLAGSPAIKKGILQTVKVVDELVKVMGRHKPENIVIEMARENQTTQKGQKNSRERMKRIEEGIKELGSQILKEHPVENTQLQNEKLYLYYLQNGRDMYVDQELDINRLSDYDVDHIVPQSFLKDDSIDNKVLTRSDKARGKSDNVPSEEVVKKMKNYWRQLLNAKLITQRKFDNLTKAERGGLSELDKAGFIKRQLVETRQITKHVAQILDSRMNTKYDENDKLIREVKVITLKSKLVSDFRKDFQFYKVREINNYHHAHDAYLNAVVGTALIKKYPKLESEFVYGDYKVYDVRKMIAKSEQEIGKATAKYFFYSNIMNFFKTEITLANGEIRKRPLIETNGETGEIVWDKGRDFATVRKVLSMPQVNIVKKTEVQTGGFSKESILPKRNSDKLIARKKDWDPKKYGGFDSPTVAYSVLVVAKVEKGKSKKLKSVKELLGITIMERSSFEKNPIDFLEAKGYKEVKKDLIIKLPKYSLFELENGRKRMLASAGELQKGNELALPSKYVNFLYLASHYEKLKGSPEDNEQKQLFVEQHKHYLDEIIEQISEFSKRVILADANLDKVLSAYNKHRDKPIREQAENIIHLFTLTNLGAPAAFKYFDTTIDRKRYTSTKEVLDATLIHQSITGLYETRIDLSQLGGDGGGGGGSGGGGSGGGGSGGGGSGGLGIEDEYRLHETSTEPDVSLGSTWLSDFPQAWAETGGMGLAVRQAPLIIPLKATSTPVSIQQYPMSHEARLGIKPHIQRLLDQGILVPCQSPWNTPLLPVKKPGTNDYRPVQDLREVNKRVEDIHPTVPNPYNLLSGLPPSHQWYTVLDLKDAFFCLRLHPTSQPLFAFEWRDPGMGISGQLTWTRLPQGFKNSPTLFNEALHRDLADFRIQHPDLILLQYVDDILLAATSELDCQQGTRALLQTLGDLGYRASAKKAQICQKQVKYLGYLLREGQRWLTEARKETVMGQPVPKTPRQLREFLGKAGFCRLFIPGFAEMAAPLYPLTKPGTLFSWGPDQQKAYQEIKQALLTAPALGLPDLTKPFELFVDEKQGYAKGVLTQKLGPWRRPVAYLSKKLDPVAAGWPPCLRMVAAIAVLTKDAGKLTMGQPLVILAPHAVEALVKQPPDRWLSNARMTHYQAMLLDTDRVQFGPVVALNPATLLPLPEEGAPHDCLEILAETHGTRPDLTDQPIPDADHTWYTDGSSFLQEGQRKAGAAVTTETEVIWAGALPAGTSAQRAELIALTQALKMAEGKRLNVYTDSRYAFATAHIHGEIYRRRGWLTSEGREIKNKSEILALLKALFLPKRLSIIHCLGHQKGDSAEARGNRLADQAAREAAIKTPPDTSTLLIAGKRTADGSEFEKRTADGSEFESPKKKAKVE

SEQ ID NO: 2086 - protein, 2110 aa, synthetic construct
MPAAKRVKLDGGDKKYSIGLDIGTNSVGWAVITDEYKVPSKKFKVLGNTDRHSIKKNLIGALLFDSGETAEATRLKRTARRRYTRRKNRICYLQEIFSNEMAKVDDSFFHRLEESFLVEEDKKHERHPIFGNIVDEVAYHEKYPTIYHLRKKLVDSTDKADLRLIYLALAHMIKFRGHFLIEGDLNPDNSDVDKLFIQLVQTYNQLFEENPINASGVDAKAILSARLSKSRRLENLIAQLPGEKKNGLFGNLIALSLGLTPNFKSNFDLAEDAKLQLSKDTYDDDLDNLLAQIGDQYADLFLAAKNLSDAILLSDILRVNTEITKAPLSASMIKRYDEHHQDLTLLKALVRQQLPEKYKEIFFDQSKNGYAGYIDGGASQEEFYKFIKPILEKMDGTEELLVKLNREDLLRKQRTFDNGSIPHQIHLGELHAILRRQEDFYPFLKDNREKIEKILTFRIPYYVGPLARGNSRFAWMTRKSEETITPWNFEEVVDKGASAQSFIERMTNFDKNLPNEKVLPKHSLLYEYFTVYNELTKVKYVTEGMRKPAFLSGEQKKAIVDLLFKTNRKVTVKQLKEDYFKKIECFDSVEISGVEDRFNASLGTYHDLLKIIKDKDFLDNEENEDILEDIVLTLTLFEDREMIEERLKTYAHLFDDKVMKQLKRRRYTGWGRLSRKLINGIRDKQSGKTILDFLKSDGFANRNFMQLIHDDSLTFKEDIQKAQVSGQGDSLHEHIANLAGSPAIKKGILQTVKVVDELVKVMGRHKPENIVIEMARENQTTQKGQKNSRERMKRIEEGIKELGSQILKEHPVENTQLQNEKLYLYYLQNGRDMYVDQELDINRLSDYDVDHIVPQSFLKDDSIDNKVLTRSDKARGKSDNVPSEEVVKKMKNYWRQLLNAKLITQRKFDNLTKAERGGLSELDKAGFIKRQLVETRQITKHVAQILDSRMNTKYDENDKLIREVKVITLKSKLVSDFRKDFQFYKVREINNYHHAHDAYLNAVVGTALIKKYPKLESEFVYGDYKVYDVRKMIAKSEQEIGKATAKYFFYSNIMNFFKTEITLANGEIRKRPLIETNGETGEIVWDKGRDFATVRKVLSMPQVNIVKKTEVQTGGFSKESILPKRNSDKLIARKKDWDPKKYGGFDSPTVAYSVLVVAKVEKGKSKKLKSVKELLGITIMERSSFEKNPIDFLEAKGYKEVKKDLIIKLPKYSLFELENGRKRMLASAGELQKGNELALPSKYVNFLYLASHYEKLKGSPEDNEQKQLFVEQHKHYLDEIIEQISEFSKRVILADANLDKVLSAYNKHRDKPIREQAENIIHLFTLTNLGAPAAFKYFDTTIDRKRYTSTKEVLDATLIHQSITGLYETRIDLSQLGGDGGEAAAKEAAAKEAAAKEAAAKEAAAKGGLGIEDEYRLHETSTEPDVSLGSTWLSDFPQAWAETGGMGLAVRQAPLIIPLKATSTPVSIQQYPMSHEARLGIKPHIQRLLDQGILVPCQSPWNTPLLPVKKPGTNDYRPVQDLREVNKRVEDIHPTVPNPYNLLSGLPPSHQWYTVLDLKDAFFCLRLHPTSQPLFAFEWRDPGMGISGQLTWTRLPQGFKNSPTLFNEALHRDLADFRIQHPDLILLQYVDDILLAATSELDCQQGTRALLQTLGDLGYRASAKKAQICQKQVKYLGYLLREGQRWLTEARKETVMGQPVPKTPRQLREFLGKAGFCRLFIPGFAEMAAPLYPLTKPGTLFSWGPDQQKAYQEIKQALLTAPALGLPDLTKPFELFVDEKQGYAKGVLTQKLGPWRRPVAYLSKKLDPVAAGWPPCLRMVAAIAVLTKDAGKLTMGQPLVILAPHAVEALVKQPPDRWLSNARMTHYQAMLLDTDRVQFGPVVALNPATLLPLPEEGAPHDCLEILAETHGTRPDLTDQPIPDADHTWYTDGSSFLQEGQRKAGAAVTTETEVIWAGALPAGTSAQRAELIALTQALKMAEGKRLNVYTDSRYAFATAHIHGEIYRRRGWLTSEGREIKNKSEILALLKALFLPKRLSIIHCLGHQKGDSAEARGNRLADQAAREAAIKTPPDTSTLLIAGKRTADGSEFEKRTADGSEFESPKKKAKVE

SEQ ID NO: 2087 - protein, 2098 aa, synthetic construct
MPAAKRVKLDGGDKKYSIGLDIGTNSVGWAVITDEYKVPSKKFKVLGNTDRHSIKKNLIGALLFDSGETAEATRLKRTARRRYTRRKNRICYLQEIFSNEMAKVDDSFFHRLEESFLVEEDKKHERHPIFGNIVDEVAYHEKYPTIYHLRKKLVDSTDKADLRLIYLALAHMIKFRGHFLIEGDLNPDNSDVDKLFIQLVQTYNQLFEENPINASGVDAKAILSARLSKSRRLENLIAQLPGEKKNGLFGNLIALSLGLTPNFKSNFDLAEDAKLQLSKDTYDDDLDNLLAQIGDQYADLFLAAKNLSDAILLSDILRVNTEITKAPLSASMIKRYDEHHQDLTLLKALVRQQLPEKYKEIFFDQSKNGYAGYIDGGASQEEFYKFIKPILEKMDGTEELLVKLNREDLLRKQRTFDNGSIPHQIHLGELHAILRRQEDFYPFLKDNREKIEKILTFRIPYYVGPLARGNSRFAWMTRKSEETITPWNFEEVVDKGASAQSFIERMTNFDKNLPNEKVLPKHSLLYEYFTVYNELTKVKYVTEGMRKPAFLSGEQKKAIVDLLFKTNRKVTVKQLKEDYFKKIECFDSVEISGVEDRFNASLGTYHDLLKIIKDKDFLDNEENEDILEDIVLTLTLFEDREMIEERLKTYAHLFDDKVMKQLKRRRYTGWGRLSRKLINGIRDKQSGKTILDFLKSDGFANRNFMQLIHDDSLTFKEDIQKAQVSGQGDSLHEHIANLAGSPAIKKGILQTVKVVDELVKVMGRHKPENIVIEMARENQTTQKGQKNSRERMKRIEEGIKELGSQILKEHPVENTQLQNEKLYLYYLQNGRDMYVDQELDINRLSDYDVDHIVPQSFLKDDSIDNKVLTRSDKARGKSDNVPSEEVVKKMKNYWRQLLNAKLITQRKFDNLTKAERGGLSELDKAGFIKRQLVETRQITKHVAQILDSRMNTKYDENDKLIREVKVITLKSKLVSDFRKDFQFYKVREINNYHHAHDAYLNAVVGTALIKKYPKLESEFVYGDYKVYDVRKMIAKSEQEIGKATAKYFFYSNIMNFFKTEITLANGEIRKRPLIETNGETGEIVWDKGRDFATVRKVLSMPQVNIVKKTEVQTGGFSKESILPKRNSDKLIARKKDWDPKKYGGFDSPTVAYSVLVVAKVEKGKSKKLKSVKELLGITIMERSSFEKNPIDFLEAKGYKEVKKDLIIKLPKYSLFELENGRKRMLASAGELQKGNELALPSKYVNFLYLASHYEKLKGSPEDNEQKQLFVEQHKHYLDEIIEQISEFSKRVILADANLDKVLSAYNKHRDKPIREQAENIIHLFTLTNLGAPAAFKYFDTTIDRKRYTSTKEVLDATLIHQSITGLYETRIDLSQLGGDGGPAPAPAPAPAPAPGGLGIEDEYRLHETSTEPDVSLGSTWLSDFPQAWAETGGMGLAVRQAPLIIPLKATSTPVSIQQYPMSHEARLGIKPHIQRLLDQGILVPCQSPWNTPLLPVKKPGTNDYRPVQDLREVNKRVEDIHPTVPNPYNLLSGLPPSHQWYTVLDLKDAFFCLRLHPTSQPLFAFEWRDPGMGISGQLTWTRLPQGFKNSPTLFNEALHRDLADFRIQHPDLILLQYVDDILLAATSELDCQQGTRALLQTLGDLGYRASAKKAQICQKQVKYLGYLLREGQRWLTEARKETVMGQPVPKTPRQLREFLGKAGFCRLFIPGFAEMAAPLYPLTKPGTLFSWGPDQQKAYQEIKQALLTAPALGLPDLTKPFELFVDEKQGYAKGVLTQKLGPWRRPVAYLSKKLDPVAAGWPPCLRMVAAIAVLTKDAGKLTMGQPLVILAPHAVEALVKQPPDRWLSNARMTHYQAMLLDTDRVQFGPVVALNPATLLPLPEEGAPHDCLEILAETHGTRPDLTDQPIPDADHTWYTDGSSFLQEGQRKAGAAVTTETEVIWAGALPAGTSAQRAELIALTQALKMAEGKRLNVYTDSRYAFATAHIHGEIYRRRGWLTSEGREIKNKSEILALLKALFLPKRLSIIHCLGHQKGDSAEARGNRLADQAAREAAIKTPPDTSTLLIAGKRTADGSEFEKRTADGSEFESPKKKAKVE

SEQ ID NO: 2088 - protein, 2131 aa, synthetic construct
MPAAKRVKLDGGDKKYSIGLDIGTNSVGWAVITDEYKVPSKKFKVLGNTDRHSIKKNLIGALLFDSGETAEATRLKRTARRRYTRRKNRICYLQEIFSNEMAKVDDSFFHRLEESFLVEEDKKHERHPIFGNIVDEVAYHEKYPTIYHLRKKLVDSTDKADLRLIYLALAHMIKFRGHFLIEGDLNPDNSDVDKLFIQLVQTYNQLFEENPINASGVDAKAILSARLSKSRRLENLIAQLPGEKKNGLFGNLIALSLGLTPNFKSNFDLAEDAKLQLSKDTYDDDLDNLLAQIGDQYADLFLAAKNLSDAILLSDILRVNTEITKAPLSASMIKRYDEHHQDLTLLKALVRQQLPEKYKEIFFDQSKNGYAGYIDGGASQEEFYKFIKPILEKMDGTEELLVKLNREDLLRKQRTFDNGSIPHQIHLGELHAILRRQEDFYPFLKDNREKIEKILTFRIPYYVGPLARGNSRFAWMTRKSEETITPWNFEEVVDKGASAQSFIERMTNFDKNLPNEKVLPKHSLLYEYFTVYNELTKVKYVTEGMRKPAFLSGEQKKAIVDLLFKTNRKVTVKQLKEDYFKKIECFDSVEISGVEDRFNASLGTYHDLLKIIKDKDFLDNEENEDILEDIVLTLTLFEDREMIEERLKTYAHLFDDKVMKQLKRRRYTGWGRLSRKLINGIRDKQSGKTILDFLKSDGFANRNFMQLIHDDSLTFKEDIQKAQVSGQGDSLHEHIANLAGSPAIKKGILQTVKVVDELVKVMGRHKPENIVIEMARENQTTQKGQKNSRERMKRIEEGIKELGSQILKEHPVENTQLQNEKLYLYYLQNGRDMYVDQELDINRLSDYDVDHIVPQSFLKDDSIDNKVLTRSDKARGKSDNVPSEEVVKKMKNYWRQLLNAKLITQRKFDNLTKAERGGLSELDKAGFIKRQLVETRQITKHVAQILDSRMNTKYDENDKLIREVKVITLKSKLVSDFRKDFQFYKVREINNYHHAHDAYLNAVVGTALIKKYPKLESEFVYGDYKVYDVRKMIAKSEQEIGKATAKYFFYSNIMNFFKTEITLANGEIRKRPLIETNGETGEIVWDKGRDFATVRKVLSMPQVNIVKKTEVQTGGFSKESILPKRNSDKLIARKKDWDPKKYGGFDSPTVAYSVLVVAKVEKGKSKKLKSVKELLGITIMERSSFEKNPIDFLEAKGYKEVKKDLIIKLPKYSLFELENGRKRMLASAGELQKGNELALPSKYVNFLYLASHYEKLKGSPEDNEQKQLFVEQHKHYLDEIIEQISEFSKRVILADANLDKVLSAYNKHRDKPIREQAENIIHLFTLTNLGAPAAFKYFDTTIDRKRYTSTKEVLDATLIHQSITGLYETRIDLSQLGGDGGAEAAAKEAAAKEAAAKEAAAKALEAEAAAKEAAAKEAAAKEAAAKAGGLGIEDEYRLHETSTEPDVSLGSTWLSDFPQAWAETGGMGLAVRQAPLIIPLKATSTPVSIQQYPMSHEARLGIKPHIQRLLDQGILVPCQSPWNTPLLPVKKPGTNDYRPVQDLREVNKRVEDIHPTVPNPYNLLSGLPPSHQWYTVLDLKDAFFCLRLHPTSQPLFAFEWRDPGMGISGQLTWTRLPQGFKNSPTLFNEALHRDLADFRIQHPDLILLQYVDDILLAATSELDCQQGTRALLQTLGDLGYRASAKKAQICQKQVKYLGYLLREGQRWLTEARKETVMGQPVPKTPRQLREFLGKAGFCRLFIPGFAEMAAPLYPLTKPGTLFSWGPDQQKAYQEIKQALLTAPALGLPDLTKPFELFVDEKQGYAKGVLTQKLGPWRRPVAYLSKKLDPVAAGWPPCLRMVAAIAVLTKDAGKLTMGQPLVILAPHAVEALVKQPPDRWLSNARMTHYQAMLLDTDRVQFGPVVALNPATLLPLPEEGAPHDCLEILAETHGTRPDLTDQPIPDADHTWYTDGSSFLQEGQRKAGAAVTTETEVIWAGALPAGTSAQRAELIALTQALKMAEGKRLNVYTDSRYAFATAHIHGEIYRRRGWLTSEGREIKNKSEILALLKALFLPKRLSIIHCLGHQKGDSAEARGNRLADQAAREAAIKTPPDTSTLLIAGKRTADGSEFEKRTADGSEFESPKKKAKVE

SEQ ID NO: 2089 - protein, 2096 aa, synthetic construct; identical to SEQ ID NO: 2050

SEQ ID NO: 2090 - protein, 2100 aa, synthetic construct; identical to SEQ ID NO: 2049

SEQ ID NO: 2091 - protein, 2094 aa, synthetic construct
MPAAKRVKLDGGDKKYSIGLDIGTNSVGWAVITDEYKVPSKKFKVLGNTDRHSIKKNLIGALLFDSGETAEATRLKRTARRRYTRRKNRICYLQEIFSNEMAKVDDSFFHRLEESFLVEEDKKHERHPIFGNIVDEVAYHEKYPTIYHLRKKLVDSTDKADLRLIYLALAHMIKFRGHFLIEGDLNPDNSDVDKLFIQLVQTYNQLFEENPINASGVDAKAILSARLSKSRRLENLIAQLPGEKKNGLFGNLIALSLGLTPNFKSNFDLAEDAKLQLSKDTYDDDLDNLLAQIGDQYADLFLAAKNLSDAILLSDILRVNTEITKAPLSASMIKRYDEHHQDLTLLKALVRQQLPEKYKEIFFDQSKNGYAGYIDGGASQEEFYKFIKPILEKMDGTEELLVKLNREDLLRKQRTFDNGSIPHQIHLGELHAILRRQEDFYPFLKDNREKIEKILTFRIPYYVGPLARGNSRFAWMTRKSEETITPWNFEEVVDKGASAQSFIERMTNFDKNLPNEKVLPKHSLLYEYFTVYNELTKVKYVTEGMRKPAFLSGEQKKAIVDLLFKTNRKVTVKQLKEDYFKKIECFDSVEISGVEDRFNASLGTYHDLLKIIKDKDFLDNEENEDILEDIVLTLTLFEDREMIEERLKTYAHLFDDKVMKQLKRRRYTGWGRLSRKLINGIRDKQSGKTILDFLKSDGFANRNFMQLIHDDSLTFKEDIQKAQVSGQGDSLHEHIANLAGSPAIKKGILQTVKVVDELVKVMGRHKPENIVIEMARENQTTQKGQKNSRERMKRIEEGIKELGSQILKEHPVENTQLQNEKLYLYYLQNGRDMYVDQELDINRLSDYDVDHIVPQSFLKDDSIDNKVLTRSDKARGKSDNVPSEEVVKKMKNYWRQLLNAKLITQRKFDNLTKAERGGLSELDKAGFIKRQLVETRQITKHVAQILDSRMNTKYDENDKLIREVKVITLKSKLVSDFRKDFQFYKVREINNYHHAHDAYLNAVVGTALIKKYPKLESEFVYGDYKVYDVRKMIAKSEQEIGKATAKYFFYSNIMNFFKTEITLANGEIRKRPLIETNGETGEIVWDKGRDFATVRKVLSMPQVNIVKKTEVQTGGFSKESILPKRNSDKLIARKKDWDPKKYGGFDSPTVAYSVLVVAKVEKGKSKKLKSVKELLGITIMERSSFEKNPIDFLEAKGYKEVKKDLIIKLPKYSLFELENGRKRMLASAGELQKGNELALPSKYVNFLYLASHYEKLKGSPEDNEQKQLFVEQHKHYLDEIIEQISEFSKRVILADANLDKVLSAYNKHRDKPIREQAENIIHLFTLTNLGAPAAFKYFDTTIDRKRYTSTKEVLDATLIHQSITGLYETRIDLSQLGGDGGPAPGSSGGGGGLGIEDEYRLHETSTEPDVSLGSTWLSDFPQAWAETGGMGLAVRQAPLIIPLKATSTPVSIQQYPMSHEARLGIKPHIQRLLDQGILVPCQSPWNTPLLPVKKPGTNDYRPVQDLREVNKRVEDIHPTVPNPYNLLSGLPPSHQWYTVLDLKDAFFCLRLHPTSQPLFAFEWRDPGMGISGQLTWTRLPQGFKNSPTLFNEALHRDLADFRIQHPDLILLQYVDDILLAATSELDCQQGTRALLQTLGDLGYRASAKKAQICQKQVKYLGYLLREGQRWLTEARKETVMGQPVPKTPRQLREFLGKAGFCRLFIPGFAEMAAPLYPLTKPGTLFSWGPDQQKAYQEIKQALLTAPALGLPDLTKPFELFVDEKQGYAKGVLTQKLGPWRRPVAYLSKKLDPVAAGWPPCLRMVAAIAVLTKDAGKLTMGQPLVILAPHAVEALVKQPPDRWLSNARMTHYQAMLLDTDRVQFGPVVALNPATLLPLPEEGAPHDCLEILAETHGTRPDLTDQPIPDADHTWYTDGSSFLQEGQRKAGAAVTTETEVIWAGALPAGTSAQRAELIALTQALKMAEGKRLNVYTDSRYAFATAHIHGEIYRRRGWLTSEGREIKNKSEILALLKALFLPKRLSIIHCLGHQKGDSAEARGNRLADQAAREAAIKTPPDTSTLLIAGKRTADGSEFEKRTADGSEFESPKKKAKVE

SEQ ID NO: 2092 - protein, 2105 aa, synthetic construct
MPAAKRVKLDGGDKKYSIGLDIGTNSVGWAVITDEYKVPSKKFKVLGNTDRHSIKKNLIGALLFDSGETAEATRLKRTARRRYTRRKNRICYLQEIFSNEMAKVDDSFFHRLEESFLVEEDKKHERHPIFGNIVDEVAYHEKYPTIYHLRKKLVDSTDKADLRLIYLALAHMIKFRGHFLIEGDLNPDNSDVDKLFIQLVQTYNQLFEENPINASGVDAKAILSARLSKSRRLENLIAQLPGEKKNGLFGNLIALSLGLTPNFKSNFDLAEDAKLQLSKDTYDDDLDNLLAQIGDQYADLFLAAKNLSDAILLSDILRVNTEITKAPLSASMIKRYDEHHQDLTLLKALVRQQLPEKYKEIFFDQSKNGYAGYIDGGASQEEFYKFIKPILEKMDGTEELLVKLNREDLLRKQRTFDNGSIPHQIHLGELHAILRRQEDFYPFLKDNREKIEKILTFRIPYYVGPLARGNSRFAWMTRKSEETITPWNFEEVVDKGASAQSFIERMTNFDKNLPNEKVLPKHSLLYEYFTVYNELTKVKYVTEGMRKPAFLSGEQKKAIVDLLFKTNRKVTVKQLKEDYFKKIECFDSVEISGVEDRFNASLGTYHDLLKIIKDKDFLDNEENEDILEDIVLTLTLFEDREMIEERLKTYAHLFDDKVMKQLKRRRYTGWGRLSRKLINGIRDKQSGKTILDFLKSDGFANRNFMQLIHDDSLTFKEDIQKAQVSGQGDSLHEHIANLAGSPAIKKGILQTVKVVDELVKVMGRHKPENIVIEMARENQTTQKGQKNSRERMKRIEEGIKELGSQILKEHPVENTQLQNEKLYLYYLQNGRDMYVDQELDINRLSDYDVDHIVPQSFLKDDSIDNKVLTRSDKARGKSDNVPSEEVVKKMKNYWRQLLNAKLITQRKFDNLTKAERGGLSELDKAGFIKRQLVETRQITKHVAQILDSRMNTKYDENDKLIREVKVITLKSKLVSDFRKDFQFYKVREINNYHHAHDAYLNAVVGTALIKKYPKLESEFVYGDYKVYDVRKMIAKSEQEIGKATAKYFFYSNIMNFFKTEITLANGEIRKRPLIETNGETGEIVWDKGRDFATVRKVLSMPQVNIVKKTEVQTGGFSKESILPKRNSDKLIARKKDWDPKKYGGFDSPTVAYSVLVVAKVEKGKSKKLKSVKELLGITIMERSSFEKNPIDFLEAKGYKEVKKDLIIKLPKYSLFELENGRKRMLASAGELQKGNELALPSKYVNFLYLASHYEKLKGSPEDNEQKQLFVEQHKHYLDEIIEQISEFSKRVILADANLDKVLSAYNKHRDKPIREQAENIIHLFTLTNLGAPAAFKYFDTTIDRKRYTSTKEVLDATLIHQSITGLYETRIDLSQLGGDGGEAAAKEAAAKEAAAKEAAAKGGLGIEDEYRLHETSTEPDVSLGSTWLSDFPQAWAETGGMGLAVRQAPLIIPLKATSTPVSIQQYPMSHEARLGIKPHIQRLLDQGILVPCQSPWNTPLLPVKKPGTNDYRPVQDLREVNKRVEDIHPTVPNPYNLLSGLPPSHQWYTVLDLKDAFFCLRLHPTSQPLFAFEWRDPGMGISGQLTWTRLPQGFKNSPTLFNEALHRDLADFRIQHPDLILLQYVDDILLAATSELDCQQGTRALLQTLGDLGYRASAKKAQICQKQVKYLGYLLREGQRWLTEARKETVMGQPVPKTPRQLREFLGKAGFCRLFIPGFAEMAAPLYPLTKPGTLFSWGPDQQKAYQEIKQALLTAPALGLPDLTKPFELFVDEKQGYAKGVLTQKLGPWRRPVAYLSKKLDPVAAGWPPCLRMVAAIAVLTKDAGKLTMGQPLVILAPHAVEALVKQPPDRWLSNARMTHYQAMLLDTDRVQFGPVVALNPATLLPLPEEGAPHDCLEILAETHGTRPDLTDQPIPDADHTWYTDGSSFLQEGQRKAGAAVTTETEVIWAGALPAGTSAQRAELIALTQALKMAEGKRLNVYTDSRYAFATAHIHGEIYRRRGWLTSEGREIKNKSEILALLKALFLPKRLSIIHCLGHQKGDSAEARGNRLADQAAREAAIKTPPDTSTLLIAGKRTADGSEFEKRTADGSEFESPKKKAKVE

SEQ ID NO: 2093 - protein, 2096 aa, synthetic construct; identical to SEQ ID NO: 2048

SEQ ID NO: 2094 - protein, 2115 aa, synthetic construct
MPAAKRVKLDGGDKKYSIGLDIGTNSVGWAVITDEYKVPSKKFKVLGNTDRHSIKKNLIGALLFDSGETAEATRLKRTARRRYTRRKNRICYLQEIFSNEMAKVDDSFFHRLEESFLVEEDKKHERHPIFGNIVDEVAYHEKYPTIYHLRKKLVDSTDKADLRLIYLALAHMIKFRGHFLIEGDLNPDNSDVDKLFIQLVQTYNQLFEENPINASGVDAKAILSARLSKSRRLENLIAQLPGEKKNGLFGNLIALSLGLTPNFKSNFDLAEDAKLQLSKDTYDDDLDNLLAQIGDQYADLFLAAKNLSDAILLSDILRVNTEITKAPLSASMIKRYDEHHQDLTLLKALVRQQLPEKYKEIFFDQSKNGYAGYIDGGASQEEFYKFIKPILEKMDGTEELLVKLNREDLLRKQRTFDNGSIPHQIHLGELHAILRRQEDFYPFLKDNREKIEKILTFRIPYYVGPLARGNSRFAWMTRKSEETITPWNFEEVVDKGASAQSFIERMTNFDKNLPNEKVLPKHSLLYEYFTVYNELTKVKYVTEGMRKPAFLSGEQKKAIVDLLFKTNRKVTVKQLKEDYFKKIECFDSVEISGVEDRFNASLGTYHDLLKIIKDKDFLDNEENEDILEDIVLTLTLFEDREMIEERLKTYAHLFDDKVMKQLKRRRYTGWGRLSRKLINGIRDKQSGKTILDFLKSDGFANRNFMQLIHDDSLTFKEDIQKAQVSGQGDSLHEHIANLAGSPAIKKGILQTVKVVDELVKVMGRHKPENIVIEMARENQTTQKGQKNSRERMKRIEEGIKELGSQILKEHPVENTQLQNEKLYLYYLQNGRDMYVDQELDINRLSDYDVDHIVPQSFLKDDSIDNKVLTRSDKARGKSDNVPSEEVVKKMKNYWRQLLNAKLITQRKFDNLTKAERGGLSELDKAGFIKRQLVETRQITKHVAQILDSRMNTKYDENDKLIREVKVITLKSKLVSDFRKDFQFYKVREINNYHHAHDAYLNAVVGTALIKKYPKLESEFVYGDYKVYDVRKMIAKSEQEIGKATAKYFFYSNIMNFFKTEITLANGEIRKRPLIETNGETGEIVWDKGRDFATVRKVLSMPQVNIVKKTEVQTGGFSKESILPKRNSDKLIARKKDWDPKKYGGFDSPTVAYSVLVVAKVEKGKSKKLKSVKELLGITIMERSSFEKNPIDFLEAKGYKEVKKDLIIKLPKYSLFELENGRKRMLASAGELQKGNELALPSKYVNFLYLASHYEKLKGSPEDNEQKQLFVEQHKHYLDEIIEQISEFSKRVILADANLDKVLSAYNKHRDKPIREQAENIIHLFTLTNLGAPAAFKYFDTTIDRKRYTSTKEVLDATLIHQSITGLYETRIDLSQLGGDGGGGGGSGGGGSGGGGSGGGGSGGGGSGGGGSGGLGIEDEYRLHETSTEPDVSLGSTWLSDFPQAWAETGGMGLAVRQAPLIIPLKATSTPVSIQQYPMSHEARLGIKPHIQRLLDQGILVPCQSPWNTPLLPVKKPGTNDYRPVQDLREVNKRVEDIHPTVPNPYNLLSGLPPSHQWYTVLDLKDAFFCLRLHPTSQPLFAFEWRDPGMGISGQLTWTRLPQGFKNSPTLFNEALHRDLADFRIQHPDLILLQYVDDILLAATSELDCQQGTRALLQTLGDLGYRASAKKAQICQKQVKYLGYLLREGQRWLTEARKETVMGQPVPKTPRQLREFLGKAGFCRLFIPGFAEMAAPLYPLTKPGTLFSWGPDQQKAYQEIKQALLTAPALGLPDLTKPFELFVDEKQGYAKGVLTQKLGPWRRPVAYLSKKLDPVAAGWPPCLRMVAAIAVLTKDAGKLTMGQPLVILAPHAVEALVKQPPDRWLSNARMTHYQAMLLDTDRVQFGPVVALNPATLLPLPEEGAPHDCLEILAETHGTRPDLTDQPIPDADHTWYTDGSSFLQEGQRKAGAAVTTETEVIWAGALPAGTSAQRAELIALTQALKMAEGKRLNVYTDSRYAFATAHIHGEIYRRRGWLTSEGREIKNKSEILALLKALFLPKRLSIIHCLGHQKGDSAEARGNRLADQAAREAAIKTPPDTSTLLIAGKRTADGSEFEKRTADGSEFESPKKKAKVE

SEQ ID NO: 2095 - protein, 2096 aa, synthetic construct
MPAAKRVKLDGGDKKYSIGLDIGTNSVGWAVITDEYKVPSKKFKVLGNTDRHSIKKNLIGALLFDSGETAEATRLKRTARRRYTRRKNRICYLQEIFSNEMAKVDDSFFHRLEESFLVEEDKKHERHPIFGNIVDEVAYHEKYPTIYHLRKKLVDSTDKADLRLIYLALAHMIKFRGHFLIEGDLNPDNSDVDKLFIQLVQTYNQLFEENPINASGVDAKAILSARLSKSRRLENLIAQLPGEKKNGLFGNLIALSLGLTPNFKSNFDLAEDAKLQLSKDTYDDDLDNLLAQIGDQYADLFLAAKNLSDAILLSDILRVNTEITKAPLSASMIKRYDEHHQDLTLLKALVRQQLPEKYKEIFFDQSKNGYAGYIDGGASQEEFYKFIKPILEKMDGTEELLVKLNREDLLRKQRTFDNGSIPHQIHLGELHAILRRQEDFYPFLKDNREKIEKILTFRIPYYVGPLARGNSRFAWMTRKSEETITPWNFEEVVDKGASAQSFIERMTNFDKNLPNEKVLPKHSLLYEYFTVYNELTKVKYVTEGMRKPAFLSGEQKKAIVDLLFKTNRKVTVKQLKEDYFKKIECFDSVEISGVEDRFNASLGTYHDLLKIIKDKDFLDNEENEDILEDIVLTLTLFEDREMIEERLKTYAHLFDDKVMKQLKRRRYTGWGRLSRKLINGIRDKQSGKTILDFLKSDGFANRNFMQLIHDDSLTFKEDIQKAQVSGQGDSLHEHIANLAGSPAIKKGILQTVKVVDELVKVMGRHKPENIVIEMARENQTTQKGQKNSRERMKRIEEGIKELGSQILKEHPVENTQLQNEKLYLYYLQNGRDMYVDQELDINRLSDYDVDHIVPQSFLKDDSIDNKVLTRSDKARGKSDNVPSEEVVKKMKNYWRQLLNAKLITQRKFDNLTKAERGGLSELDKAGFIKRQLVETRQITKHVAQILDSRMNTKYDENDKLIREVKVITLKSKLVSDFRKDFQFYKVREINNYHHAHDAYLNAVVGTALIKKYPKLESEFVYGDYKVYDVRKMIAKSEQEIGKATAKYFFYSNIMNFFKTEITLANGEIRKRPLIETNGETGEIVWDKGRDFATVRKVLSMPQVNIVKKTEVQTGGFSKESILPKRNSDKLIARKKDWDPKKYGGFDSPTVAYSVLVVAKVEKGKSKKLKSVKELLGITIMERSSFEKNPIDFLEAKGYKEVKKDLIIKLPKYSLFELENGRKRMLASAGELQKGNELALPSKYVNFLYLASHYEKLKGSPEDNEQKQLFVEQHKHYLDEIIEQISEFSKRVILADANLDKVLSAYNKHRDKPIREQAENIIHLFTLTNLGAPAAFKYFDTTIDRKRYTSTKEVLDATLIHQSITGLYETRIDLSQLGGDGGPAPEAAAKGSSGGLGIEDEYRLHETSTEPDVSLGSTWLSDFPQAWAETGGMGLAVRQAPLIIPLKATSTPVSIQQYPMSHEARLGIKPHIQRLLDQGILVPCQSPWNTPLLPVKKPGTNDYRPVQDLREVNKRVEDIHPTVPNPYNLLSGLPPSHQWYTVLDLKDAFFCLRLHPTSQPLFAFEWRDPGMGISGQLTWTRLPQGFKNSPTLFNEALHRDLADFRIQHPDLILLQYVDDILLAATSELDCQQGTRALLQTLGDLGYRASAKKAQICQKQVKYLGYLLREGQRWLTEARKETVMGQPVPKTPRQLREFLGKAGFCRLFIPGFAEMAAPLYPLTKPGTLFSWGPDQQKAYQEIKQALLTAPALGLPDLTKPFELFVDEKQGYAKGVLTQKLGPWRRPVAYLSKKLDPVAAGWPPCLRMVAAIAVLTKDAGKLTMGQPLVILAPHAVEALVKQPPDRWLSNARMTHYQAMLLDTDRVQFGPVVALNPATLLPLPEEGAPHDCLEILAETHGTRPDLTDQPIPDADHTWYTDGSSFLQEGQRKAGAAVTTETEVIWAGALPAGTSAQRAELIALTQALKMAEGKRLNVYTDSRYAFATAHIHGEIYRRRGWLTSEGREIKNKSEILALLKALFLPKRLSIIHCLGHQKGDSAEARGNRLADQAAREAAIKTPPDTSTLLIAGKRTADGSEFEKRTADGSEFESPKKKAKVE

SEQ ID NO: 2096 - protein, 2090 aa, synthetic construct
MPAAKRVKLDGGDKKYSIGLDIGTNSVGWAVITDEYKVPSKKFKVLGNTDRHSIKKNLIGALLFDSGETAEATRLKRTARRRYTRRKNRICYLQEIFSNEMAKVDDSFFHRLEESFLVEEDKKHERHPIFGNIVDEVAYHEKYPTIYHLRKKLVDSTDKADLRLIYLALAHMIKFRGHFLIEGDLNPDNSDVDKLFIQLVQTYNQLFEENPINASGVDAKAILSARLSKSRRLENLIAQLPGEKKNGLFGNLIALSLGLTPNFKSNFDLAEDAKLQLSKDTYDDDLDNLLAQIGDQYADLFLAAKNLSDAILLSDILRVNTEITKAPLSASMIKRYDEHHQDLTLLKALVRQQLPEKYKEIFFDQSKNGYAGYIDGGASQEEFYKFIKPILEKMDGTEELLVKLNREDLLRKQRTFDNGSIPHQIHLGELHAILRRQEDFYPFLKDNREKIEKILTFRIPYYVGPLARGNSRFAWMTRKSEETITPWNFEEVVDKGASAQSFIERMTNFDKNLPNEKVLPKHSLLYEYFTVYNELTKVKYVTEGMRKPAFLSGEQKKAIVDLLFKTNRKVTVKQLKEDYFKKIECFDSVEISGVEDRFNASLGTYHDLLKIIKDKDFLDNEENEDILEDIVLTLTLFEDREMIEERLKTYAHLFDDKVMKQLKRRRYTGWGRLSRKLINGIRDKQSGKTILDFLKSDGFANRNFMQLIHDDSLTFKEDIQKAQVSGQGDSLHEHIANLAGSPAIKKGILQTVKVVDELVKVMGRHKPENIVIEMARENQTTQKGQKNSRERMKRIEEGIKELGSQILKEHPVENTQLQNEKLYLYYLQNGRDMYVDQELDINRLSDYDVDHIVPQSFLKDDSIDNKVLTRSDKARGKSDNVPSEEVVKKMKNYWRQLLNAKLITQRKFDNLTKAERGGLSELDKAGFIKRQLVETRQITKHVAQILDSRMNTKYDENDKLIREVKVITLKSKLVSDFRKDFQFYKVREINNYHHAHDAYLNAVVGTALIKKYPKLESEFVYGDYKVYDVRKMIAKSEQEIGKATAKYFFYSNIMNFFKTEITLANGEIRKRPLIETNGETGEIVWDKGRDFATVRKVLSMPQVNIVKKTEVQTGGFSKESILPKRNSDKLIARKKDWDPKKYGGFDSPTVAYSVLVVAKVEKGKSKKLKSVKELLGITIMERSSFEKNPIDFLEAKGYKEVKKDLIIKLPKYSLFELENGRKRMLASAGELQKGNELALPSKYVNFLYLASHYEKLKGSPEDNEQKQLFVEQHKHYLDEIIEQISEFSKRVILADANLDKVLSAYNKHRDKPIREQAENIIHLFTLTNLGAPAAFKYFDTTIDRKRYTSTKEVLDATLIHQSITGLYETRIDLSQLGGDGGEAAAKGGLGIEDEYRLHETSTEPDVSLGSTWLSDFPQAWAETGGMGLAVRQAPLIIPLKATSTPVSIQQYPMSHEARLGIKPHIQRLLDQGILVPCQSPWNTPLLPVKKPGTNDYRPVQDLREVNKRVEDIHPTVPNPYNLLSGLPPSHQWYTVLDLKDAFFCLRLHPTSQPLFAFEWRDPGMGISGQLTWTRLPQGFKNSPTLFNEALHRDLADFRIQHPDLILLQYVDDILLAATSELDCQQGTRALLQTLGDLGYRASAKKAQICQKQVKYLGYLLREGQRWLTEARKETVMGQPVPKTPRQLREFLGKAGFCRLFIPGFAEMAAPLYPLTKPGTLFSWGPDQQKAYQEIKQALLTAPALGLPDLTKPFELFVDEKQGYAKGVLTQKLGPWRRPVAYLSKKLDPVAAGWPPCLRMVAAIAVLTKDAGKLTMGQPLVILAPHAVEALVKQPPDRWLSNARMTHYQAMLLDTDRVQFGPVVALNPATLLPLPEEGAPHDCLEILAETHGTRPDLTDQPIPDADHTWYTDGSSFLQEGQRKAGAAVTTETEVIWAGALPAGTSAQRAELIALTQALKMAEGKRLNVYTDSRYAFATAHIHGEIYRRRGWLTSEGREIKNKSEILALLKALFLPKRLSIIHCLGHQKGDSAEARGNRLADQAAREAAIKTPPDTSTLLIAGKRTADGSEFEKRTADGSEFESPKKKAKVE

SEQ ID NO: 2097 - protein, 2096 aa, synthetic construct
MPAAKRVKLDGGDKKYSIGLDIGTNSVGWAVITDEYKVPSKKFKVLGNTDRHSIKKNLIGALLFDSGETAEATRLKRTARRRYTRRKNRICYLQEIFSNEMAKVDDSFFHRLEESFLVEEDKKHERHPIFGNIVDEVAYHEKYPTIYHLRKKLVDSTDKADLRLIYLALAHMIKFRGHFLIEGDLNPDNSDVDKLFIQLVQTYNQLFEENPINASGVDAKAILSARLSKSRRLENLIAQLPGEKKNGLFGNLIALSLGLTPNFKSNFDLAEDAKLQLSKDTYDDDLDNLLAQIGDQYADLFLAAKNLSDAILLSDILRVNTEITKAPLSASMIKRYDEHHQDLTLLKALVRQQLPEKYKEIFFDQSKNGYAGYIDGGASQEEFYKFIKPILEKMDGTEELLVKLNREDLLRKQRTFDNGSIPHQIHLGELHAILRRQEDFYPFLKDNREKIEKILTFRIPYYVGPLARGNSRFAWMTRKSEETITPWNFEEVVDKGASAQSFIERMTNFDKNLPNEKVLPKHSLLYEYFTVYNELTKVKYVTEGMRKPAFLSGEQKKAIVDLLFKTNRKVTVKQLKEDYFKKIECFDSVEISGVEDRFNASLGTYHDLLKIIKDKDFLDNEENEDILEDIVLTLTLFEDREMIEERLKTYAHLFDDKVMKQLKRRRYTGWGRLSRKLINGIRDKQSGKTILDFLKSDGFANRNFMQLIHDDSLTFKEDIQKAQVSGQGDSLHEHIANLAGSPAIKKGILQTVKVVDELVKVMGRHKPENIVIEMARENQTTQKGQKNSRERMKRIEEGIKELGSQILKEHPVENTQLQNEKLYLYYLQNGRDMYVDQELDINRLSDYDVDHIVPQSFLKDDSIDNKVLTRSDKARGKSDNVPSEEVVKKMKNYWRQLLNAKLITQRKFDNLTKAERGGLSELDKAGFIKRQLVETRQITKHVAQILDSRMNTKYDENDKLIREVKVITLKSKLVSDFRKDFQFYKVREINNYHHAHDAYLNAVVGTALIKKYPKLESEFVYGDYKVYDVRKMIAKSEQEIGKATAKYFFYSNIMNFFKTEITLANGEIRKRPLIETNGETGEIVWDKGRDFATVRKVLSMPQVNIVKKTEVQTGGFSKESILPKRNSDKLIARKKDWDPKKYGGFDSPTVAYSVLVVAKVEKGKSKKLKSVKELLGITIMERSSFEKNPIDFLEAKGYKEVKKDLIIKLPKYSLFELENGRKRMLASAGELQKGNELALPSKYVNFLYLASHYEKLKGSPEDNEQKQLFVEQHKHYLDEIIEQISEFSKRVILADANLDKVLSAYNKHRDKPIREQAENIIHLFTLTNLGAPAAFKYFDTTIDRKRYTSTKEVLDATLIHQSITGLYETRIDLSQLGGDGGPAPEAAAKGGSGGLGIEDEYRLHETSTEPDVSLGSTWLSDFPQAWAETGGMGLAVRQAPLIIPLKATSTPVSIQQYPMSHEARLGIKPHIQRLLDQGILVPCQSPWNTPLLPVKKPGTNDYRPVQDLREVNKRVEDIHPTVPNPYNLLSGLPPSHQWYTVLDLKDAFFCLRLHPTSQPLFAFEWRDPGMGISGQLTWTRLPQGFKNSPTLFNEALHRDLADFRIQHPDLILLQYVDDILLAATSELDCQQGTRALLQTLGDLGYRASAKKAQICQKQVKYLGYLLREGQRWLTEARKETVMGQPVPKTPRQLREFLGKAGFCRLFIPGFAEMAAPLYPLTKPGTLFSWGPDQQKAYQEIKQALLTAPALGLPDLTKPFELFVDEKQGYAKGVLTQKLGPWRRPVAYLSKKLDPVAAGWPPCLRMVAAIAVLTKDAGKLTMGQPLVILAPHAVEALVKQPPDRWLSNARMTHYQAMLLDTDRVQFGPVVALNPATLLPLPEEGAPHDCLEILAETHGTRPDLTDQPIPDADHTWYTDGSSFLQEGQRKAGAAVTTETEVIWAGALPAGTSAQRAELIALTQALKMAEGKRLNVYTDSRYAFATAHIHGEIYRRRGWLTSEGREIKNKSEILALLKALFLPKRLSIIHCLGHQKGDSAEARGNRLADQAAREAAIKTPPDTSTLLIAGKRTADGSEFEKRTADGSEFESPKKKAKVE

SEQ ID NO: 2098 - protein, 2115 aa, synthetic construct
MPAAKRVKLDGGDKKYSIGLDIGTNSVGWAVITDEYKVPSKKFKVLGNTDRHSIKKNLIGALLFDSGETAEATRLKRTARRRYTRRKNRICYLQEIFSNEMAKVDDSFFHRLEESFLVEEDKKHERHPIFGNIVDEVAYHEKYPTIYHLRKKLVDSTDKADLRLIYLALAHMIKFRGHFLIEGDLNPDNSDVDKLFIQLVQTYNQLFEENPINASGVDAKAILSARLSKSRRLENLIAQLPGEKKNGLFGNLIALSLGLTPNFKSNFDLAEDAKLQLSKDTYDDDLDNLLAQIGDQYADLFLAAKNLSDAILLSDILRVNTEITKAPLSASMIKRYDEHHQDLTLLKALVRQQLPEKYKEIFFDQSKNGYAGYIDGGASQEEFYKFIKPILEKMDGTEELLVKLNREDLLRKQRTFDNGSIPHQIHLGELHAILRRQEDFYPFLKDNREKIEKILTFRIPYYVGPLARGNSRFAWMTRKSEETITPWNFEEVVDKGASAQSFIERMTNFDKNLPNEKVLPKHSLLYEYFTVYNELTKVKYVTEGMRKPAFLSGEQKKAIVDLLFKTNRKVTVKQLKEDYFKKIECFDSVEISGVEDRFNASLGTYHDLLKIIKDKDFLDNEENEDILEDIVLTLTLFEDREMIEERLKTYAHLFDDKVMKQLKRRRYTGWGRLSRKLINGIRDKQSGKTILDFLKSDGFANRNFMQLIHDDSLTFKEDIQKAQVSGQGDSLHEHIANLAGSPAIKKGILQTVKVVDELVKVMGRHKPENIVIEMARENQTTQKGQKNSRERMKRIEEGIKELGSQILKEHPVENTQLQNEKLYLYYLQNGRDMYVDQELDINRLSDYDVDHIVPQSFLKDDSIDNKVLTRSDKARGKSDNVPSEEVVKKMKNYWRQLLNAKLITQRKFDNLTKAERGGLSELDKAGFIKRQLVETRQITKHVAQILDSRMNTKYDENDKLIREVKVITLKSKLVSDFRKDFQFYKVREINNYHHAHDAYLNAVVGTALIKKYPKLESEFVYGDYKVYDVRKMIAKSEQEIGKATAKYFFYSNIMNFFKTEITLANGEIRKRPLIETNGETGEIVWDKGRDFATVRKVLSMPQVNIVKKTEVQTGGFSKESILPKRNSDKLIARKKDWDPKKYGGFDSPTVAYSVLVVAKVEKGKSKKLKSVKELLGITIMERSSFEKNPIDFLEAKGYKEVKKDLIIKLPKYSLFELENGRKRMLASAGELQKGNELALPSKYVNFLYLASHYEKLKGSPEDNEQKQLFVEQHKHYLDEIIEQISEFSKRVILADANLDKVLSAYNKHRDKPIREQAENIIHLFTLTNLGAPAAFKYFDTTIDRKRYTSTKEVLDATLIHQSITGLYETRIDLSQLGGDGGEAAAKEAAAKEAAAKEAAAKEAAAKEAAAKGGLGIEDEYRLHETSTEPDVSLGSTWLSDFPQAWAETGGMGLAVRQAPLIIPLKATSTPVSIQQYPMSHEARLGIKPHIQRLLDQGILVPCQSPWNTPLLPVKKPGTNDYRPVQDLREVNKRVEDIHPTVPNPYNLLSGLPPSHQWYTVLDLKDAFFCLRLHPTSQPLFAFEWRDPGMGISGQLTWTRLPQGFKNSPTLFNEALHRDLADFRIQHPDLILLQYVDDILLAATSELDCQQGTRALLQTLGDLGYRASAKKAQICQKQVKYLGYLLREGQRWLTEARKETVMGQPVPKTPRQLREFLGKAGFCRLFIPGFAEMAAPLYPLTKPGTLFSWGPDQQKAYQEIKQALLTAPALGLPDLTKPFELFVDEKQGYAKGVLTQKLGPWRRPVAYLSKKLDPVAAGWPPCLRMVAAIAVLTKDAGKLTMGQPLVILAPHAVEALVKQPPDRWLSNARMTHYQAMLLDTDRVQFGPVVALNPATLLPLPEEGAPHDCLEILAETHGTRPDLTDQPIPDADHTWYTDGSSFLQEGQRKAGAAVTTETEVIWAGALPAGTSAQRAELIALTQALKMAEGKRLNVYTDSRYAFATAHIHGEIYRRRGWLTSEGREIKNKSEILALLKALFLPKRLSIIHCLGHQKGDSAEARGNRLADQAAREAAIKTPPDTSTLLIAGKRTADGSEFEKRTADGSEFESPKKKAKVE

SEQ ID NO: 2099 - protein, 2096 aa, synthetic construct
MPAAKRVKLDGGDKKYSIGLDIGTNSVGWAVITDEYKVPSKKFKVLGNTDRHSIKKNLIGALLFDSGETAEATRLKRTARRRYTRRKNRICYLQEIFSNEMAKVDDSFFHRLEESFLVEEDKKHERHPIFGNIVDEVAYHEKYPTIYHLRKKLVDSTDKADLRLIYLALAHMIKFRGHFLIEGDLNPDNSDVDKLFIQLVQTYNQLFEENPINASGVDAKAILSARLSKSRRLENLIAQLPGEKKNGLFGNLIALSLGLTPNFKSNFDLAEDAKLQLSKDTYDDDLDNLLAQIGDQYADLFLAAKNLSDAILLSDILRVNTEITKAPLSASMIKRYDEHHQDLTLLKALVRQQLPEKYKEIFFDQSKNGYAGYIDGGASQEEFYKFIKPILEKMDGTEELLVKLNREDLLRKQRTFDNGSIPHQIHLGELHAILRRQEDFYPFLKDNREKIEKILTFRIPYYVGPLARGNSRFAWMTRKSEETITPWNFEEVVDKGASAQSFIERMTNFDKNLPNEKVLPKHSLLYEYFTVYNELTKVKYVTEGMRKPAFLSGEQKKAIVDLLFKTNRKVTVKQLKEDYFKKIECFDSVEISGVEDRFNASLGTYHDLLKIIKDKDFLDNEENEDILEDIVLTLTLFEDREMIEERLKTYAHLFDDKVMKQLKRRRYTGWGRLSRKLINGIRDKQSGKTILDFLKSDGFANRNFMQLIHDDSLTFKEDIQKAQVSGQGDSLHEHIANLAGSPAIKKGILQTVKVVDELVKVMGRHKPENIVIEMARENQTTQKGQKNSRERMKRIEEGIKELGSQILKEHPVENTQLQNEKLYLYYLQNGRDMYVDQELDINRLSDYDVDHIVPQSFLKDDSIDNKVLTRSDKARGKSDNVPSEEVVKKMKNYWRQLLNAKLITQRKFDNLTKAERGGLSELDKAGFIKRQLVETRQITKHVAQILDSRMNTKYDENDKLIREVKVITLKSKLVSDFRKDFQFYKVREINNYHHAHDAYLNAVVGTALIKKYPKLESEFVYGDYKVYDVRKMIAKSEQEIGKATAKYFFYSNIMNFFKTEITLANGEIRKRPLIETNGETGEIVWDKGRDFATVRKVLSMPQVNIVKKTEVQTGGFSKESILPKRNSDKLIARKKDWDPKKYGGFDSPTVAYSVLVVAKVEKGKSKKLKSVKELLGITIMERSSFEKNPIDFLEAKGYKEVKKDLIIKLPKYSLFELENGRKRMLASAGELQKGNELALPSKYVNFLYLASHYEKLKGSPEDNEQKQLFVEQHKHYLDEIIEQISEFSKRVILADANLDKVLSAYNKHRDKPIREQAENIIHLFTLTNLGAPAAFKYFDTTIDRKRYTSTKEVLDATLIHQSITGLYETRIDLSQLGGDGGEAAAKPAPGGSGGLGIEDEYRLHETSTEPDVSLGSTWLSDFPQAWAETGGMGLAVRQAPLIIPLKATSTPVSIQQYPMSHEARLGIKPHIQRLLDQGILVPCQSPWNTPLLPVKKPGTNDYRPVQDLREVNKRVEDIHPTVPNPYNLLSGLPPSHQWYTVLDLKDAFFCLRLHPTSQPLFAFEWRDPGMGISGQLTWTRLPQGFKNSPTLFNEALHRDLADFRIQHPDLILLQYVDDILLAATSELDCQQGTRALLQTLGDLGYRASAKKAQICQKQVKYLGYLLREGQRWLTEARKETVMGQPVPKTPRQLREFLGKAGFCRLFIPGFAEMAAPLYPLTKPGTLFSWGPDQQKAYQEIKQALLTAPALGLPDLTKPFELFVDEKQGYAKGVLTQKLGPWRRPVAYLSKKLDPVAAGWPPCLRMVAAIAVLTKDAGKLTMGQPLVILAPHAVEALVKQPPDRWLSNARMTHYQAMLLDTDRVQFGPVVALNPATLLPLPEEGAPHDCLEILAETHGTRPDLTDQPIPDADHTWYTDGSSFLQEGQRKAGAAVTTETEVIWAGALPAGTSAQRAELIALTQALKMAEGKRLNVYTDSRYAFATAHIHGEIYRRRGWLTSEGREIKNKSEILALLKALFLPKRLSIIHCLGHQKGDSAEARGNRLADQAAREAAIKTPPDTSTLLIAGKRTADGSEFEKRTADGSEFESPKKKAKVE

SEQ ID NO: 2100 - protein, 2096 aa, synthetic construct
MPAAKRVKLDGGDKKYSIGLDIGTNSVGWAVITDEYKVPSKKFKVLGNTDRHSIKKNLIGALLFDSGETAEATRLKRTARRRYTRRKNRICYLQEIFSNEMAKVDDSFFHRLEESFLVEEDKKHERHPIFGNIVDEVAYHEKYPTIYHLRKKLVDSTDKADLRLIYLALAHMIKFRGHFLIEGDLNPDNSDVDKLFIQLVQTYNQLFEENPINASGVDAKAILSARLSKSRRLENLIAQLPGEKKNGLFGNLIALSLGLTPNFKSNFDLAEDAKLQLSKDTYDDDLDNLLAQIGDQYADLFLAAKNLSDAILLSDILRVNTEITKAPLSASMIKRYDEHHQDLTLLKALVRQQLPEKYKEIFFDQSKNGYAGYIDGGASQEEFYKFIKPILEKMDGTEELLVKLNREDLLRKQRTFDNGSIPHQIHLGELHAILRRQEDFYPFLKDNREKIEKILTFRIPYYVGPLARGNSRFAWMTRKSEETITPWNFEEVVDKGASAQSFIERMTNFDKNLPNEKVLPKHSLLYEYFTVYNELTKVKYVTEGMRKPAFLSGEQKKAIVDLLFKTNRKVTVKQLKEDYFKKIECFDSVEISGVEDRFNASLGTYHDLLKIIKDKDFLDNEENEDILEDIVLTLTLFEDREMIEERLKTYAHLFDDKVMKQLKRRRYTGWGRLSRKLINGIRDKQSGKTILDFLKSDGFANRNFMQLIHDDSLTFKEDIQKAQVSGQGDSLHEHIANLAGSPAIKKGILQTVKVVDELVKVMGRHKPENIVIEMARENQTTQKGQKNSRERMKRIEEGIKELGSQILKEHPVENTQLQNEKLYLYYLQNGRDMYVDQELDINRLSDYDVDHIVPQSFLKDDSIDNKVLTRSDKARGKSDNVPSEEVVKKMKNYWRQLLNAKLITQRKFDNLTKAERGGLSELDKAGFIKRQLVETRQITKHVAQILDSRMNTKYDENDKLIREVKVITLKSKLVSDFRKDFQFYKVREINNYHHAHDAYLNAVVGTALIKKYPKLESEFVYGDYKVYDVRKMIAKSEQEIGKATAKYFFYSNIMNFFKTEITLANGEIRKRPLIETNGETGEIVWDKGRDFATVRKVLSMPQVNIVKKTEVQTGGFSKESILPKRNSDKLIARKKDWDPKKYGGFDSPTVAYSVLVVAKVEKGKSKKLKSVKELLGITIMERSSFEKNPIDFLEAKGYKEVKKDLIIKLPKYSLFELENGRKRMLASAGELQKGNELALPSKYVNFLYLASHYEKLKGSPEDNEQKQLFVEQHKHYLDEIIEQISEFSKRVILADANLDKVLSAYNKHRDKPIREQAENIIHLFTLTNLGAPAAFKYFDTTIDRKRYTSTKEVLDATLIHQSITGLYETRIDLSQLGGDGGGGSGSSEAAAKGGLGIEDEYRLHETSTEPDVSLGSTWLSDFPQAWAETGGMGLAVRQAPLIIPLKATSTPVSIQQYPMSHEARLGIKPHIQRLLDQGILVPCQSPWNTPLLPVKKPGTNDYRPVQDLREVNKRVEDIHPTVPNPYNLLSGLPPSHQWYTVLDLKDAFFCLRLHPTSQPLFAFEWRDPGMGISGQLTWTRLPQGFKNSPTLFNEALHRDLADFRIQHPDLILLQYVDDILLAATSELDCQQGTRALLQTLGDLGYRASAKKAQICQKQVKYLGYLLREGQRWLTEARKETVMGQPVPKTPRQLREFLGKAGFCRLFIPGFAEMAAPLYPLTKPGTLFSWGPDQQKAYQEIKQALLTAPALGLPDLTKPFELFVDEKQGYAKGVLTQKLGPWRRPVAYLSKKLDPVAAGWPPCLRMVAAIAVLTKDAGKLTMGQPLVILAPHAVEALVKQPPDRWLSNARMTHYQAMLLDTDRVQFGPVVALNPATLLPLPEEGAPHDCLEILAETHGTRPDLTDQPIPDADHTWYTDGSSFLQEGQRKAGAAVTTETEVIWAGALPAGTSAQRAELIALTQALKMAEGKRLNVYTDSRYAFATAHIHGEIYRRRGWLTSEGREIKNKSEILALLKALFLPKRLSIIHCLGHQKGDSAEARGNRLADQAAREAAIKTPPDTSTLLIAGKRTADGSEFEKRTADGSEFESPKKKAKVE

SEQ ID NO: 2101 - protein, 2094 aa, synthetic construct
MPAAKRVKLDGGDKKYSIGLDIGTNSVGWAVITDEYKVPSKKFKVLGNTDRHSIKKNLIGALLFDSGETAEATRLKRTARRRYTRRKNRICYLQEIFSNEMAKVDDSFFHRLEESFLVEEDKKHERHPIFGNIVDEVAYHEKYPTIYHLRKKLVDSTDKADLRLIYLALAHMIKFRGHFLIEGDLNPDNSDVDKLFIQLVQTYNQLFEENPINASGVDAKAILSARLSKSRRLENLIAQLPGEKKNGLFGNLIALSLGLTPNFKSNFDLAEDAKLQLSKDTYDDDLDNLLAQIGDQYADLFLAAKNLSDAILLSDILRVNTEITKAPLSASMIKRYDEHHQDLTLLKALVRQQLPEKYKEIFFDQSKNGYAGYIDGGASQEEFYKFIKPILEKMDGTEELLVKLNREDLLRKQRTFDNGSIPHQIHLGELHAILRRQEDFYPFLKDNREKIEKILTFRIPYYVGPLARGNSRFAWMTRKSEETITPWNFEEVVDKGASAQSFIERMTNFDKNLPNEKVLPKHSLLYEYFTVYNELTKVKYVTEGMRKPAFLSGEQKKAIVDLLFKTNRKVTVKQLKEDYFKKIECFDSVEISGVEDRFNASLGTYHDLLKIIKDKDFLDNEENEDILEDIVLTLTLFEDREMIEERLKTYAHLFDDKVMKQLKRRRYTGWGRLSRKLINGIRDKQSGKTILDFLKSDGFANRNFMQLIHDDSLTFKEDIQKAQVSGQGDSLHEHIANLAGSPAIKKGILQTVKVVDELVKVMGRHKPENIVIEMARENQTTQKGQKNSRERMKRIEEGIKELGSQILKEHPVENTQLQNEKLYLYYLQNGRDMYVDQELDINRLSDYDVDHIVPQSFLKDDSIDNKVLTRSDKARGKSDNVPSEEVVKKMKNYWRQLLNAKLITQRKFDNLTKAERGGLSELDKAGFIKRQLVETRQITKHVAQILDSRMNTKYDENDKLIREVKVITLKSKLVSDFRKDFQFYKVREINNYHHAHDAYLNAVVGTALIKKYPKLESEFVYGDYKVYDVRKMIAKSEQEIGKATAKYFFYSNIMNFFKTEITLANGEIRKRPLIETNGETGEIVWDKGRDFATVRKVLSMPQVNIVKKTEVQTGGFSKESILPKRNSDKLIARKKDWDPKKYGGFDSPTVAYSVLVVAKVEKGKSKKLKSVKELLGITIMERSSFEKNPIDFLEAKGYKEVKKDLIIKLPKYSLFELENGRKRMLASAGELQKGNELALPSKYVNFLYLASHYEKLKGSPEDNEQKQLFVEQHKHYLDEIIEQISEFSKRVILADANLDKVLSAYNKHRDKPIREQAENIIHLFTLTNLGAPAAFKYFDTTIDRKRYTSTKEVLDATLIHQSITGLYETRIDLSQLGGDGGPAPGGGGSSGGLGIEDEYRLHETSTEPDVSLGSTWLSDFPQAWAETGGMGLAVRQAPLIIPLKATSTPVSIQQYPMSHEARLGIKPHIQRLLDQGILVPCQSPWNTPLLPVKKPGTNDYRPVQDLREVNKRVEDIHPTVPNPYNLLSGLPPSHQWYTVLDLKDAFFCLRLHPTSQPLFAFEWRDPGMGISGQLTWTRLPQGFKNSPTLFNEALHRDLADFRIQHPDLILLQYVDDILLAATSELDCQQGTRALLQTLGDLGYRASAKKAQICQKQVKYLGYLLREGQRWLTEARKETVMGQPVPKTPRQLREFLGKAGFCRLFIPGFAEMAAPLYPLTKPGTLFSWGPDQQKAYQEIKQALLTAPALGLPDLTKPFELFVDEKQGYAKGVLTQKLGPWRRPVAYLSKKLDPVAAGWPPCLRMVAAIAVLTKDAGKLTMGQPLVILAPHAVEALVKQPPDRWLSNARMTHYQAMLLDTDRVQFGPVVALNPATLLPLPEEGAPHDCLEILAETHGTRPDLTDQPIPDADHTWYTDGSSFLQEGQRKAGAAVTTETEVIWAGALPAGTSAQRAELIALTQALKMAEGKRLNVYTDSRYAFATAHIHGEIYRRRGWLTSEGREIKNKSEILALLKALFLPKRLSIIHCLGHQKGDSAEARGNRLADQAAREAAIKTPPDTSTLLIAGKRTADGSEFEKRTADGSEFESPKKKAKVE

SEQ ID NO: 2102 - protein, 2096 aa, synthetic construct
MPAAKRVKLDGGDKKYSIGLDIGTNSVGWAVITDEYKVPSKKFKVLGNTDRHSIKKNLIGALLFDSGETAEATRLKRTARRRYTRRKNRICYLQEIFSNEMAKVDDSFFHRLEESFLVEEDKKHERHPIFGNIVDEVAYHEKYPTIYHLRKKLVDSTDKADLRLIYLALAHMIKFRGHFLIEGDLNPDNSDVDKLFIQLVQTYNQLFEENPINASGVDAKAILSARLSKSRRLENLIAQLPGEKKNGLFGNLIALSLGLTPNFKSNFDLAEDAKLQLSKDTYDDDLDNLLAQIGDQYADLFLAAKNLSDAILLSDILRVNTEITKAPLSASMIKRYDEHHQDLTLLKALVRQQLPEKYKEIFFDQSKNGYAGYIDGGASQEEFYKFIKPILEKMDGTEELLVKLNREDLLRKQRTFDNGSIPHQIHLGELHAILRRQEDFYPFLKDNREKIEKILTFRIPYYVGPLARGNSRFAWMTRKSEETITPWNFEEVVDKGASAQSFIERMTNFDKNLPNEKVLPKHSLLYEYFTVYNELTKVKYVTEGMRKPAFLSGEQKKAIVDLLFKTNRKVTVKQLKEDYFKKIECFDSVEISGVEDRFNASLGTYHDLLKIIKDKDFLDNEENEDILEDIVLTLTLFEDREMIEERLKTYAHLFDDKVMKQLKRRRYTGWGRLSRKLINGIRDKQSGKTILDFLKSDGFANRNFMQLIHDDSLTFKEDIQKAQVSGQGDSLHEHIANLAGSPAIKKGILQTVKVVDELVKVMGRHKPENIVIEMARENQTTQKGQKNSRERMKRIEEGIKELGSQILKEHPVENTQLQNEKLYLYYLQNGRDMYVDQELDINRLSDYDVDHIVPQSFLKDDSIDNKVLTRSDKARGKSDNVPSEEVVKKMKNYWRQLLNAKLITQRKFDNLTKAERGGLSELDKAGFIKRQLVETRQITKHVAQILDSRMNTKYDENDKLIREVKVITLKSKLVSDFRKDFQFYKVREINNYHHAHDAYLNAVVGTALIKKYPKLESEFVYGDYKVYDVRKMIAKSEQEIGKATAKYFFYSNIMNFFKTEITLANGEIRKRPLIETNGETGEIVWDKGRDFATVRKVLSMPQVNIVKKTEVQTGGFSKESILPKRNSDKLIARKKDWDPKKYGGFDSPTVAYSVLVVAKVEKGKSKKLKSVKELLGITIMERSSFEKNPIDFLEAKGYKEVKKDLIIKLPKYSLFELENGRKRMLASAGELQKGNELALPSKYVNFLYLASHYEKLKGSPEDNEQKQLFVEQHKHYLDEIIEQISEFSKRVILADANLDKVLSAYNKHRDKPIREQAENIIHLFTLTNLGAPAAFKYFDTTIDRKRYTSTKEVLDATLIHQSITGLYETRIDLSQLGGDGGGGSEAAAKGGGGGLGIEDEYRLHETSTEPDVSLGSTWLSDFPQAWAETGGMGLAVRQAPLIIPLKATSTPVSIQQYPMSHEARLGIKPHIQRLLDQGILVPCQSPWNTPLLPVKKPGTNDYRPVQDLREVNKRVEDIHPTVPNPYNLLSGLPPSHQWYTVLDLKDAFFCLRLHPTSQPLFAFEWRDPGMGISGQLTWTRLPQGFKNSPTLFNEALHRDLADFRIQHPDLILLQYVDDILLAATSELDCQQGTRALLQTLGDLGYRASAKKAQICQKQVKYLGYLLREGQRWLTEARKETVMGQPVPKTPRQLREFLGKAGFCRLFIPGFAEMAAPLYPLTKPGTLFSWGPDQQKAYQEIKQALLTAPALGLPDLTKPFELFVDEKQGYAKGVLTQKLGPWRRPVAYLSKKLDPVAAGWPPCLRMVAAIAVLTKDAGKLTMGQPLVILAPHAVEALVKQPPDRWLSNARMTHYQAMLLDTDRVQFGPVVALNPATLLPLPEEGAPHDCLEILAETHGTRPDLTDQPIPDADHTWYTDGSSFLQEGQRKAGAAVTTETEVIWAGALPAGTSAQRAELIALTQALKMAEGKRLNVYTDSRYAFATAHIHGEIYRRRGWLTSEGREIKNKSEILALLKALFLPKRLSIIHCLGHQKGDSAEARGNRLADQAAREAAIKTPPDTSTLLIAGKRTADGSEFEKRTADGSEFESPKKKAKVE

SEQ ID NO: 2103 - protein, 2088 aa, synthetic construct
MPAAKRVKLDGGDKKYSIGLDIGTNSVGWAVITDEYKVPSKKFKVLGNTDRHSIKKNLIGALLFDSGETAEATRLKRTARRRYTRRKNRICYLQEIFSNEMAKVDDSFFHRLEESFLVEEDKKHERHPIFGNIVDEVAYHEKYPTIYHLRKKLVDSTDKADLRLIYLALAHMIKFRGHFLIEGDLNPDNSDVDKLFIQLVQTYNQLFEENPINASGVDAKAILSARLSKSRRLENLIAQLPGEKKNGLFGNLIALSLGLTPNFKSNFDLAEDAKLQLSKDTYDDDLDNLLAQIGDQYADLFLAAKNLSDAILLSDILRVNTEITKAPLSASMIKRYDEHHQDLTLLKALVRQQLPEKYKEIFFDQSKNGYAGYIDGGASQEEFYKFIKPILEKMDGTEELLVKLNREDLLRKQRTFDNGSIPHQIHLGELHAILRRQEDFYPFLKDNREKIEKILTFRIPYYVGPLARGNSRFAWMTRKSEETITPWNFEEVVDKGASAQSFIERMTNFDKNLPNEKVLPKHSLLYEYFTVYNELTKVKYVTEGMRKPAFLSGEQKKAIVDLLFKTNRKVTVKQLKEDYFKKIECFDSVEISGVEDRFNASLGTYHDLLKIIKDKDFLDNEENEDILEDIVLTLTLFEDREMIEERLKTYAHLFDDKVMKQLKRRRYTGWGRLSRKLINGIRDKQSGKTILDFLKSDGFANRNFMQLIHDDSLTFKEDIQKAQVSGQGDSLHEHIANLAGSPAIKKGILQTVKVVDELVKVMGRHKPENIVIEMARENQTTQKGQKNSRERMKRIEEGIKELGSQILKEHPVENTQLQNEKLYLYYLQNGRDMYVDQELDINRLSDYDVDHIVPQSFLKDDSIDNKVLTRSDKARGKSDNVPSEEVVKKMKNYWRQLLNAKLITQRKFDNLTKAERGGLSELDKAGFIKRQLVETRQITKHVAQILDSRMNTKYDENDKLIREVKVITLKSKLVSDFRKDFQFYKVREINNYHHAHDAYLNAVVGTALIKKYPKLESEFVYGDYKVYDVRKMIAKSEQEIGKATAKYFFYSNIMNFFKTEITLANGEIRKRPLIETNGETGEIVWDKGRDFATVRKVLSMPQVNIVKKTEVQTGGFSKESILPKRNSDKLIARKKDWDPKKYGGFDSPTVAYSVLVVAKVEKGKSKKLKSVKELLGITIMERSSFEKNPIDFLEAKGYKEVKKDLIIKLPKYSLFELENGRKRMLASAGELQKGNELALPSKYVNFLYLASHYEKLKGSPEDNEQKQLFVEQHKHYLDEIIEQISEFSKRVILADANLDKVLSAYNKHRDKPIREQAENIIHLFTLTNLGAPAAFKYFDTTIDRKRYTSTKEVLDATLIHQSITGLYETRIDLSQLGGDGGPAPGGLGIEDEYRLHETSTEPDVSLGSTWLSDFPQAWAETGGMGLAVRQAPLIIPLKATSTPVSIQQYPMSHEARLGIKPHIQRLLDQGILVPCQSPWNTPLLPVKKPGTNDYRPVQDLREVNKRVEDIHPTVPNPYNLLSGLPPSHQWYTVLDLKDAFFCLRLHPTSQPLFAFEWRDPGMGISGQLTWTRLPQGFKNSPTLFNEALHRDLADFRIQHPDLILLQYVDDILLAATSELDCQQGTRALLQTLGDLGYRASAKKAQICQKQVKYLGYLLREGQRWLTEARKETVMGQPVPKTPRQLREFLGKAGFCRLFIPGFAEMAAPLYPLTKPGTLFSWGPDQQKAYQEIKQALLTAPALGLPDLTKPFELFVDEKQGYAKGVLTQKLGPWRRPVAYLSKKLDPVAAGWPPCLRMVAAIAVLTKDAGKLTMGQPLVILAPHAVEALVKQPPDRWLSNARMTHYQAMLLDTDRVQFGPVVALNPATLLPLPEEGAPHDCLEILAETHGTRPDLTDQPIPDADHTWYTDGSSFLQEGQRKAGAAVTTETEVIWAGALPAGTSAQRAELIALTQALKMAEGKRLNVYTDSRYAFATAHIHGEIYRRRGWLTSEGREIKNKSEILALLKALFLPKRLSIIHCLGHQKGDSAEARGNRLADQAAREAAIKTPPDTSTLLIAGKRTADGSEFEKRTADGSEFESPKKKAKVE

SEQ ID NO: 2104 - protein, 2093 aa, synthetic construct
MPAAKRVKLDGGDKKYSIGLDIGTNSVGWAVITDEYKVPSKKFKVLGNTDRHSIKKNLIGALLFDSGETAEATRLKRTARRRYTRRKNRICYLQEIFSNEMAKVDDSFFHRLEESFLVEEDKKHERHPIFGNIVDEVAYHEKYPTIYHLRKKLVDSTDKADLRLIYLALAHMIKFRGHFLIEGDLNPDNSDVDKLFIQLVQTYNQLFEENPINASGVDAKAILSARLSKSRRLENLIAQLPGEKKNGLFGNLIALSLGLTPNFKSNFDLAEDAKLQLSKDTYDDDLDNLLAQIGDQYADLFLAAKNLSDAILLSDILRVNTEITKAPLSASMIKRYDEHHQDLTLLKALVRQQLPEKYKEIFFDQSKNGYAGYIDGGASQEEFYKFIKPILEKMDGTEELLVKLNREDLLRKQRTFDNGSIPHQIHLGELHAILRRQEDFYPFLKDNREKIEKILTFRIPYYVGPLARGNSRFAWMTRKSEETITPWNFEEVVDKGASAQSFIERMTNFDKNLPNEKVLPKHSLLYEYFTVYNELTKVKYVTEGMRKPAFLSGEQKKAIVDLLFKTNRKVTVKQLKEDYFKKIECFDSVEISGVEDRFNASLGTYHDLLKIIKDKDFLDNEENEDILEDIVLTLTLFEDREMIEERLKTYAHLFDDKVMKQLKRRRYTGWGRLSRKLINGIRDKQSGKTILDFLKSDGFANRNFMQLIHDDSLTFKEDIQKAQVSGQGDSLHEHIANLAGSPAIKKGILQTVKVVDELVKVMGRHKPENIVIEMARENQTTQKGQKNSRERMKRIEEGIKELGSQILKEHPVENTQLQNEKLYLYYLQNGRDMYVDQELDINRLSDYDVDHIVPQSFLKDDSIDNKVLTRSDKARGKSDNVPSEEVVKKMKNYWRQLLNAKLITQRKFDNLTKAERGGLSELDKAGFIKRQLVETRQITKHVAQILDSRMNTKYDENDKLIREVKVITLKSKLVSDFRKDFQFYKVREINNYHHAHDAYLNAVVGTALIKKYPKLESEFVYGDYKVYDVRKMIAKSEQEIGKATAKYFFYSNIMNFFKTEITLANGEIRKRPLIETNGETGEIVWDKGRDFATVRKVLSMPQVNIVKKTEVQTGGFSKESILPKRNSDKLIARKKDWDPKKYGGFDSPTVAYSVLVVAKVEKGKSKKLKSVKELLGITIMERSSFEKNPIDFLEAKGYKEVKKDLIIKLPKYSLFELENGRKRMLASAGELQKGNELALPSKYVNFLYLASHYEKLKGSPEDNEQKQLFVEQHKHYLDEIIEQISEFSKRVILADANLDKVLSAYNKHRDKPIREQAENIIHLFTLTNLGAPAAFKYFDTTIDRKRYTSTKEVLDATLIHQSITGLYETRIDLSQLGGDGGEAAAKGGSGGLGIEDEYRLHETSTEPDVSLGSTWLSDFPQAWAETGGMGLAVRQAPLIIPLKATSTPVSIQQYPMSHEARLGIKPHIQRLLDQGILVPCQSPWNTPLLPVKKPGTNDYRPVQDLREVNKRVEDIHPTVPNPYNLLSGLPPSHQWYTVLDLKDAFFCLRLHPTSQPLFAFEWRDPGMGISGQLTWTRLPQGFKNSPTLFNEALHRDLADFRIQHPDLILLQYVDDILLAATSELDCQQGTRALLQTLGDLGYRASAKKAQICQKQVKYLGYLLREGQRWLTEARKETVMGQPVPKTPRQLREFLGKAGFCRLFIPGFAEMAAPLYPLTKPGTLFSWGPDQQKAYQEIKQALLTAPALGLPDLTKPFELFVDEKQGYAKGVLTQKLGPWRRPVAYLSKKLDPVAAGWPPCLRMVAAIAVLTKDAGKLTMGQPLVILAPHAVEALVKQPPDRWLSNARMTHYQAMLLDTDRVQFGPVVALNPATLLPLPEEGAPHDCLEILAETHGTRPDLTDQPIPDADHTWYTDGSSFLQEGQRKAGAAVTTETEVIWAGALPAGTSAQRAELIALTQALKMAEGKRLNVYTDSRYAFATAHIHGEIYRRRGWLTSEGREIKNKSEILALLKALFLPKRLSIIHCLGHQKGDSAEARGNRLADQAAREAAIKTPPDTSTLLIAGKRTADGSEFEKRTADGSEFESPKKKAKVE

SEQ ID NO: 2105 - protein, 2093 aa, synthetic construct
MPAAKRVKLDGGDKKYSIGLDIGTNSVGWAVITDEYKVPSKKFKVLGNTDRHSIKKNLIGALLFDSGETAEATRLKRTARRRYTRRKNRICYLQEIFSNEMAKVDDSFFHRLEESFLVEEDKKHERHPIFGNIVDEVAYHEKYPTIYHLRKKLVDSTDKADLRLIYLALAHMIKFRGHFLIEGDLNPDNSDVDKLFIQLVQTYNQLFEENPINASGVDAKAILSARLSKSRRLENLIAQLPGEKKNGLFGNLIALSLGLTPNFKSNFDLAEDAKLQLSKDTYDDDLDNLLAQIGDQYADLFLAAKNLSDAILLSDILRVNTEITKAPLSASMIKRYDEHHQDLTLLKALVRQQLPEKYKEIFFDQSKNGYAGYIDGGASQEEFYKFIKPILEKMDGTEELLVKLNREDLLRKQRTFDNGSIPHQIHLGELHAILRRQEDFYPFLKDNREKIEKILTFRIPYYVGPLARGNSRFAWMTRKSEETITPWNFEEVVDKGASAQSFIERMTNFDKNLPNEKVLPKHSLLYEYFTVYNELTKVKYVTEGMRKPAFLSGEQKKAIVDLLFKTNRKVTVKQLKEDYFKKIECFDSVEISGVEDRFNASLGTYHDLLKIIKDKDFLDNEENEDILEDIVLTLTLFEDREMIEERLKTYAHLFDDKVMKQLKRRRYTGWGRLSRKLINGIRDKQSGKTILDFLKSDGFANRNFMQLIHDDSLTFKEDIQKAQVSGQGDSLHEHIANLAGSPAIKKGILQTVKVVDELVKVMGRHKPENIVIEMARENQTTQKGQKNSRERMKRIEEGIKELGSQILKEHPVENTQLQNEKLYLYYLQNGRDMYVDQELDINRLSDYDVDHIVPQSFLKDDSIDNKVLTRSDKARGKSDNVPSEEVVKKMKNYWRQLLNAKLITQRKFDNLTKAERGGLSELDKAGFIKRQLVETRQITKHVAQILDSRMNTKYDENDKLIREVKVITLKSKLVSDFRKDFQFYKVREINNYHHAHDAYLNAVVGTALIKKYPKLESEFVYGDYKVYDVRKMIAKSEQEIGKATAKYFFYSNIMNFFKTEITLANGEIRKRPLIETNGETGEIVWDKGRDFATVRKVLSMPQVNIVKKTEVQTGGFSKESILPKRNSDKLIARKKDWDPKKYGGFDSPTVAYSVLVVAKVEKGKSKKLKSVKELLGITIMERSSFEKNPIDFLEAKGYKEVKKDLIIKLPKYSLFELENGRKRMLASAGELQKGNELALPSKYVNFLYLASHYEKLKGSPEDNEQKQLFVEQHKHYLDEIIEQISEFSKRVILADANLDKVLSAYNKHRDKPIREQAENIIHLFTLTNLGAPAAFKYFDTTIDRKRYTSTKEVLDATLIHQSITGLYETRIDLSQLGGDGGGGSEAAAKGGLGIEDEYRLHETSTEPDVSLGSTWLSDFPQAWAETGGMGLAVRQAPLIIPLKATSTPVSIQQYPMSHEARLGIKPHIQRLLDQGILVPCQSPWNTPLLPVKKPGTNDYRPVQDLREVNKRVEDIHPTVPNPYNLLSGLPPSHQWYTVLDLKDAFFCLRLHPTSQPLFAFEWRDPGMGISGQLTWTRLPQGFKNSPTLFNEALHRDLADFRIQHPDLILLQYVDDILLAATSELDCQQGTRALLQTLGDLGYRASAKKAQICQKQVKYLGYLLREGQRWLTEARKETVMGQPVPKTPRQLREFLGKAGFCRLFIPGFAEMAAPLYPLTKPGTLFSWGPDQQKAYQEIKQALLTAPALGLPDLTKPFELFVDEKQGYAKGVLTQKLGPWRRPVAYLSKKLDPVAAGWPPCLRMVAAIAVLTKDAGKLTMGQPLVILAPHAVEALVKQPPDRWLSNARMTHYQAMLLDTDRVQFGPVVALNPATLLPLPEEGAPHDCLEILAETHGTRPDLTDQPIPDADHTWYTDGSSFLQEGQRKAGAAVTTETEVIWAGALPAGTSAQRAELIALTQALKMAEGKRLNVYTDSRYAFATAHIHGEIYRRRGWLTSEGREIKNKSEILALLKALFLPKRLSIIHCLGHQKGDSAEARGNRLADQAAREAAIKTPPDTSTLLIAGKRTADGSEFEKRTADGSEFESPKKKAKVE

SEQ ID NO: 2106 - protein, 2100 aa, synthetic construct
MPAAKRVKLDGGDKKYSIGLDIGTNSVGWAVITDEYKVPSKKFKVLGNTDRHSIKKNLIGALLFDSGETAEATRLKRTARRRYTRRKNRICYLQEIFSNEMAKVDDSFFHRLEESFLVEEDKKHERHPIFGNIVDEVAYHEKYPTIYHLRKKLVDSTDKADLRLIYLALAHMIKFRGHFLIEGDLNPDNSDVDKLFIQLVQTYNQLFEENPINASGVDAKAILSARLSKSRRLENLIAQLPGEKKNGLFGNLIALSLGLTPNFKSNFDLAEDAKLQLSKDTYDDDLDNLLAQIGDQYADLFLAAKNLSDAILLSDILRVNTEITKAPLSASMIKRYDEHHQDLTLLKALVRQQLPEKYKEIFFDQSKNGYAGYIDGGASQEEFYKFIKPILEKMDGTEELLVKLNREDLLRKQRTFDNGSIPHQIHLGELHAILRRQEDFYPFLKDNREKIEKILTFRIPYYVGPLARGNSRFAWMTRKSEETITPWNFEEVVDKGASAQSFIERMTNFDKNLPNEKVLPKHSLLYEYFTVYNELTKVKYVTEGMRKPAFLSGEQKKAIVDLLFKTNRKVTVKQLKEDYFKKIECFDSVEISGVEDRFNASLGTYHDLLKIIKDKDFLDNEENEDILEDIVLTLTLFEDREMIEERLKTYAHLFDDKVMKQLKRRRYTGWGRLSRKLINGIRDKQSGKTILDFLKSDGFANRNFMQLIHDDSLTFKEDIQKAQVSGQGDSLHEHIANLAGSPAIKKGILQTVKVVDELVKVMGRHKPENIVIEMARENQTTQKGQKNSRERMKRIEEGIKELGSQILKEHPVENTQLQNEKLYLYYLQNGRDMYVDQELDINRLSDYDVDHIVPQSFLKDDSIDNKVLTRSDKARGKSDNVPSEEVVKKMKNYWRQLLNAKLITQRKFDNLTKAERGGLSELDKAGFIKRQLVETRQITKHVAQILDSRMNTKYDENDKLIREVKVITLKSKLVSDFRKDFQFYKVREINNYHHAHDAYLNAVVGTALIKKYPKLESEFVYGDYKVYDVRKMIAKSEQEIGKATAKYFFYSNIMNFFKTEITLANGEIRKRPLIETNGETGEIVWDKGRDFATVRKVLSMPQVNIVKKTEVQTGGFSKESILPKRNSDKLIARKKDWDPKKYGGFDSPTVAYSVLVVAKVEKGKSKKLKSVKELLGITIMERSSFEKNPIDFLEAKGYKEVKKDLIIKLPKYSLFELENGRKRMLASAGELQKGNELALPSKYVNFLYLASHYEKLKGSPEDNEQKQLFVEQHKHYLDEIIEQISEFSKRVILADANLDKVLSAYNKHRDKPIREQAENIIHLFTLTNLGAPAAFKYFDTTIDRKRYTSTKEVLDATLIHQSITGLYETRIDLSQLGGDGGGGGGSEAAAKGGGGSGGLGIEDEYRLHETSTEPDVSLGSTWLSDFPQAWAETGGMGLAVRQAPLIIPLKATSTPVSIQQYPMSHEARLGIKPHIQRLLDQGILVPCQSPWNTPLLPVKKPGTNDYRPVQDLREVNKRVEDIHPTVPNPYNLLSGLPPSHQWYTVLDLKDAFFCLRLHPTSQPLFAFEWRDPGMGISGQLTWTRLPQGFKNSPTLFNEALHRDLADFRIQHPDLILLQYVDDILLAATSELDCQQGTRALLQTLGDLGYRASAKKAQICQKQVKYLGYLLREGQRWLTEARKETVMGQPVPKTPRQLREFLGKAGFCRLFIPGFAEMAAPLYPLTKPGTLFSWGPDQQKAYQEIKQALLTAPALGLPDLTKPFELFVDEKQGYAKGVLTQKLGPWRRPVAYLSKKLDPVAAGWPPCLRMVAAIAVLTKDAGKLTMGQPLVILAPHAVEALVKQPPDRWLSNARMTHYQAMLLDTDRVQFGPVVALNPATLLPLPEEGAPHDCLEILAETHGTRPDLTDQPIPDADHTWYTDGSSFLQEGQRKAGAAVTTETEVIWAGALPAGTSAQRAELIALTQALKMAEGKRLNVYTDSRYAFATAHIHGEIYRRRGWLTSEGREIKNKSEILALLKALFLPKRLSIIHCLGHQKGDSAEARGNRLADQAAREAAIKTPPDTSTLLIAGKRTADGSEFEKRTADGSEFESPKKKAKVE

SEQ ID NO: 2107 - protein, 2094 aa, synthetic construct
MPAAKRVKLDGGDKKYSIGLDIGTNSVGWAVITDEYKVPSKKFKVLGNTDRHSIKKNLIGALLFDSGETAEATRLKRTARRRYTRRKNRICYLQEIFSNEMAKVDDSFFHRLEESFLVEEDKKHERHPIFGNIVDEVAYHEKYPTIYHLRKKLVDSTDKADLRLIYLALAHMIKFRGHFLIEGDLNPDNSDVDKLFIQLVQTYNQLFEENPINASGVDAKAILSARLSKSRRLENLIAQLPGEKKNGLFGNLIALSLGLTPNFKSNFDLAEDAKLQLSKDTYDDDLDNLLAQIGDQYADLFLAAKNLSDAILLSDILRVNTEITKAPLSASMIKRYDEHHQDLTLLKALVRQQLPEKYKEIFFDQSKNGYAGYIDGGASQEEFYKFIKPILEKMDGTEELLVKLNREDLLRKQRTFDNGSIPHQIHLGELHAILRRQEDFYPFLKDNREKIEKILTFRIPYYVGPLARGNSRFAWMTRKSEETITPWNFEEVVDKGASAQSFIERMTNFDKNLPNEKVLPKHSLLYEYFTVYNELTKVKYVTEGMRKPAFLSGEQKKAIVDLLFKTNRKVTVKQLKEDYFKKIECFDSVEISGVEDRFNASLGTYHDLLKIIKDKDFLDNEENEDILEDIVLTLTLFEDREMIEERLKTYAHLFDDKVMKQLKRRRYTGWGRLSRKLINGIRDKQSGKTILDFLKSDGFANRNFMQLIHDDSLTFKEDIQKAQVSGQGDSLHEHIANLAGSPAIKKGILQTVKVVDELVKVMGRHKPENIVIEMARENQTTQKGQKNSRERMKRIEEGIKELGSQILKEHPVENTQLQNEKLYLYYLQNGRDMYVDQELDINRLSDYDVDHIVPQSFLKDDSIDNKVLTRSDKARGKSDNVPSEEVVKKMKNYWRQLLNAKLITQRKFDNLTKAERGGLSELDKAGFIKRQLVETRQITKHVAQILDSRMNTKYDENDKLIREVKVITLKSKLVSDFRKDFQFYKVREINNYHHAHDAYLNAVVGTALIKKYPKLESEFVYGDYKVYDVRKMIAKSEQEIGKATAKYFFYSNIMNFFKTEITLANGEIRKRPLIETNGETGEIVWDKGRDFATVRKVLSMPQVNIVKKTEVQTGGFSKESILPKRNSDKLIARKKDWDPKKYGGFDSPTVAYSVLVVAKVEKGKSKKLKSVKELLGITIMERSSFEKNPIDFLEAKGYKEVKKDLIIKLPKYSLFELENGRKRMLASAGELQKGNELALPSKYVNFLYLASHYEKLKGSPEDNEQKQLFVEQHKHYLDEIIEQISEFSKRVILADANLDKVLSAYNKHRDKPIREQAENIIHLFTLTNLGAPAAFKYFDTTIDRKRYTSTKEVLDATLIHQSITGLYETRIDLSQLGGDGGGGGGSSGGSGGLGIEDEYRLHETSTEPDVSLGSTWLSDFPQAWAETGGMGLAVRQAPLIIPLKATSTPVSIQQYPMSHEARLGIKPHIQRLLDQGILVPCQSPWNTPLLPVKKPGTNDYRPVQDLREVNKRVEDIHPTVPNPYNLLSGLPPSHQWYTVLDLKDAFFCLRLHPTSQPLFAFEWRDPGMGISGQLTWTRLPQGFKNSPTLFNEALHRDLADFRIQHPDLILLQYVDDILLAATSELDCQQGTRALLQTLGDLGYRASAKKAQICQKQVKYLGYLLREGQRWLTEARKETVMGQPVPKTPRQLREFLGKAGFCRLFIPGFAEMAAPLYPLTKPGTLFSWGPDQQKAYQEIKQALLTAPALGLPDLTKPFELFVDEKQGYAKGVLTQKLGPWRRPVAYLSKKLDPVAAGWPPCLRMVAAIAVLTKDAGKLTMGQPLVILAPHAVEALVKQPPDRWLSNARMTHYQAMLLDTDRVQFGPVVALNPATLLPLPEEGAPHDCLEILAETHGTRPDLTDQPIPDADHTWYTDGSSFLQEGQRKAGAAVTTETEVIWAGALPAGTSAQRAELIALTQALKMAEGKRLNVYTDSRYAFATAHIHGEIYRRRGWLTSEGREIKNKSEILALLKALFLPKRLSIIHCLGHQKGDSAEARGNRLADQAAREAAIKTPPDTSTLLIAGKRTADGSEFEKRTADGSEFESPKKKAKVE

SEQ ID NO: 2108 - protein, 2096 aa, synthetic construct
MPAAKRVKLDGGDKKYSIGLDIGTNSVGWAVITDEYKVPSKKFKVLGNTDRHSIKKNLIGALLFDSGETAEATRLKRTARRRYTRRKNRICYLQEIFSNEMAKVDDSFFHRLEESFLVEEDKKHERHPIFGNIVDEVAYHEKYPTIYHLRKKLVDSTDKADLRLIYLALAHMIKFRGHFLIEGDLNPDNSDVDKLFIQLVQTYNQLFEENPINASGVDAKAILSARLSKSRRLENLIAQLPGEKKNGLFGNLIALSLGLTPNFKSNFDLAEDAKLQLSKDTYDDDLDNLLAQIGDQYADLFLAAKNLSDAILLSDILRVNTEITKAPLSASMIKRYDEHHQDLTLLKALVRQQLPEKYKEIFFDQSKNGYAGYIDGGASQEEFYKFIKPILEKMDGTEELLVKLNREDLLRKQRTFDNGSIPHQIHLGELHAILRRQEDFYPFLKDNREKIEKILTFRIPYYVGPLARGNSRFAWMTRKSEETITPWNFEEVVDKGASAQSFIERMTNFDKNLPNEKVLPKHSLLYEYFTVYNELTKVKYVTEGMRKPAFLSGEQKKAIVDLLFKTNRKVTVKQLKEDYFKKIECFDSVEISGVEDRFNASLGTYHDLLKIIKDKDFLDNEENEDILEDIVLTLTLFEDREMIEERLKTYAHLFDDKVMKQLKRRRYTGWGRLSRKLINGIRDKQSGKTILDFLKSDGFANRNFMQLIHDDSLTFKEDIQKAQVSGQGDSLHEHIANLAGSPAIKKGILQTVKVVDELVKVMGRHKPENIVIEMARENQTTQKGQKNSRERMKRIEEGIKELGSQILKEHPVENTQLQNEKLYLYYLQNGRDMYVDQELDINRLSDYDVDHIVPQSFLKDDSIDNKVLTRSDKARGKSDNVPSEEVVKKMKNYWRQLLNAKLITQRKFDNLTKAERGGLSELDKAGFIKRQLVETRQITKHVAQILDSRMNTKYDENDKLIREVKVITLKSKLVSDFRKDFQFYKVREINNYHHAHDAYLNAVVGTALIKKYPKLESEFVYGDYKVYDVRKMIAKSEQEIGKATAKYFFYSNIMNFFKTEITLANGEIRKRPLIETNGETGEIVWDKGRDFATVRKVLSMPQVNIVKKTEVQTGGFSKESILPKRNSDKLIARKKDWDPKKYGGFDSPTVAYSVLVVAKVEKGKSKKLKSVKELLGITIMERSSFEKNPIDFLEAKGYKEVKKDLIIKLPKYSLFELENGRKRMLASAGELQKGNELALPSKYVNFLYLASHYEKLKGSPEDNEQKQLFVEQHKHYLDEIIEQISEFSKRVILADANLDKVLSAYNKHRDKPIREQAENIIHLFTLTNLGAPAAFKYFDTTIDRKRYTSTKEVLDATLIHQSITGLYETRIDLSQLGGDGGGSSGGGEAAAKGGLGIEDEYRLHETSTEPDVSLGSTWLSDFPQAWAETGGMGLAVRQAPLIIPLKATSTPVSIQQYPMSHEARLGIKPHIQRLLDQGILVPCQSPWNTPLLPVKKPGTNDYRPVQDLREVNKRVEDIHPTVPNPYNLLSGLPPSHQWYTVLDLKDAFFCLRLHPTSQPLFAFEWRDPGMGISGQLTWTRLPQGFKNSPTLFNEALHRDLADFRIQHPDLILLQYVDDILLAATSELDCQQGTRALLQTLGDLGYRASAKKAQICQKQVKYLGYLLREGQRWLTEARKETVMGQPVPKTPRQLREFLGKAGFCRLFIPGFAEMAAPLYPLTKPGTLFSWGPDQQKAYQEIKQALLTAPALGLPDLTKPFELFVDEKQGYAKGVLTQKLGPWRRPVAYLSKKLDPVAAGWPPCLRMVAAIAVLTKDAGKLTMGQPLVILAPHAVEALVKQPPDRWLSNARMTHYQAMLLDTDRVQFGPVVALNPATLLPLPEEGAPHDCLEILAETHGTRPDLTDQPIPDADHTWYTDGSSFLQEGQRKAGAAVTTETEVIWAGALPAGTSAQRAELIALTQALKMAEGKRLNVYTDSRYAFATAHIHGEIYRRRGWLTSEGREIKNKSEILALLKALFLPKRLSIIHCLGHQKGDSAEARGNRLADQAAREAAIKTPPDTSTLLIAGKRTADGSEFEKRTADGSEFESPKKKAKVE

SEQ ID NO: 2109 - protein, 2096 aa, synthetic construct
MPAAKRVKLDGGDKKYSIGLDIGTNSVGWAVITDEYKVPSKKFKVLGNTDRHSIKKNLIGALLFDSGETAEATRLKRTARRRYTRRKNRICYLQEIFSNEMAKVDDSFFHRLEESFLVEEDKKHERHPIFGNIVDEVAYHEKYPTIYHLRKKLVDSTDKADLRLIYLALAHMIKFRGHFLIEGDLNPDNSDVDKLFIQLVQTYNQLFEENPINASGVDAKAILSARLSKSRRLENLIAQLPGEKKNGLFGNLIALSLGLTPNFKSNFDLAEDAKLQLSKDTYDDDLDNLLAQIGDQYADLFLAAKNLSDAILLSDILRVNTEITKAPLSASMIKRYDEHHQDLTLLKALVRQQLPEKYKEIFFDQSKNGYAGYIDGGASQEEFYKFIKPILEKMDGTEELLVKLNREDLLRKQRTFDNGSIPHQIHLGELHAILRRQEDFYPFLKDNREKIEKILTFRIPYYVGPLARGNSRFAWMTRKSEETITPWNFEEVVDKGASAQSFIERMTNFDKNLPNEKVLPKHSLLYEYFTVYNELTKVKYVTEGMRKPAFLSGEQKKAIVDLLFKTNRKVTVKQLKEDYFKKIECFDSVEISGVEDRFNASLGTYHDLLKIIKDKDFLDNEENEDILEDIVLTLTLFEDREMIEERLKTYAHLFDDKVMKQLKRRRYTGWGRLSRKLINGIRDKQSGKTILDFLKSDGFANRNFMQLIHDDSLTFKEDIQKAQVSGQGDSLHEHIANLAGSPAIKKGILQTVKVVDELVKVMGRHKPENIVIEMARENQTTQKGQKNSRERMKRIEEGIKELGSQILKEHPVENTQLQNEKLYLYYLQNGRDMYVDQELDINRLSDYDVDHIVPQSFLKDDSIDNKVLTRSDKARGKSDNVPSEEVVKKMKNYWRQLLNAKLITQRKFDNLTKAERGGLSELDKAGFIKRQLVETRQITKHVAQILDSRMNTKYDENDKLIREVKVITLKSKLVSDFRKDFQFYKVREINNYHHAHDAYLNAVVGTALIKKYPKLESEFVYGDYKVYDVRKMIAKSEQEIGKATAKYFFYSNIMNFFKTEITLANGEIRKRPLIETNGETGEIVWDKGRDFATVRKVLSMPQVNIVKKTEVQTGGFSKESILPKRNSDKLIARKKDWDPKKYGGFDSPTVAYSVLVVAKVEKGKSKKLKSVKELLGITIMERSSFEKNPIDFLEAKGYKEVKKDLIIKLPKYSLFELENGRKRMLASAGELQKGNELALPSKYVNFLYLASHYEKLKGSPEDNEQKQLFVEQHKHYLDEIIEQISEFSKRVILADANLDKVLSAYNKHRDKPIREQAENIIHLFTLTNLGAPAAFKYFDTTIDRKRYTSTKEVLDATLIHQSITGLYETRIDLSQLGGDGGGSSEAAAKPAPGGLGIEDEYRLHETSTEPDVSLGSTWLSDFPQAWAETGGMGLAVRQAPLIIPLKATSTPVSIQQYPMSHEARLGIKPHIQRLLDQGILVPCQSPWNTPLLPVKKPGTNDYRPVQDLREVNKRVEDIHPTVPNPYNLLSGLPPSHQWYTVLDLKDAFFCLRLHPTSQPLFAFEWRDPGMGISGQLTWTRLPQGFKNSPTLFNEALHRDLADFRIQHPDLILLQYVDDILLAATSELDCQQGTRALLQTLGDLGYRASAKKAQICQKQVKYLGYLLREGQRWLTEARKETVMGQPVPKTPRQLREFLGKAGFCRLFIPGFAEMAAPLYPLTKPGTLFSWGPDQQKAYQEIKQALLTAPALGLPDLTKPFELFVDEKQGYAKGVLTQKLGPWRRPVAYLSKKLDPVAAGWPPCLRMVAAIAVLTKDAGKLTMGQPLVILAPHAVEALVKQPPDRWLSNARMTHYQAMLLDTDRVQFGPVVALNPATLLPLPEEGAPHDCLEILAETHGTRPDLTDQPIPDADHTWYTDGSSFLQEGQRKAGAAVTTETEVIWAGALPAGTSAQRAELIALTQALKMAEGKRLNVYTDSRYAFATAHIHGEIYRRRGWLTSEGREIKNKSEILALLKALFLPKRLSIIHCLGHQKGDSAEARGNRLADQAAREAAIKTPPDTSTLLIAGKRTADGSEFEKRTADGSEFESPKKKAKVE

SEQ ID NO: 2110 - protein, 2092 aa, synthetic construct
MPAAKRVKLDGGDKKYSIGLDIGTNSVGWAVITDEYKVPSKKFKVLGNTDRHSIKKNLIGALLFDSGETAEATRLKRTARRRYTRRKNRICYLQEIFSNEMAKVDDSFFHRLEESFLVEEDKKHERHPIFGNIVDEVAYHEKYPTIYHLRKKLVDSTDKADLRLIYLALAHMIKFRGHFLIEGDLNPDNSDVDKLFIQLVQTYNQLFEENPINASGVDAKAILSARLSKSRRLENLIAQLPGEKKNGLFGNLIALSLGLTPNFKSNFDLAEDAKLQLSKDTYDDDLDNLLAQIGDQYADLFLAAKNLSDAILLSDILRVNTEITKAPLSASMIKRYDEHHQDLTLLKALVRQQLPEKYKEIFFDQSKNGYAGYIDGGASQEEFYKFIKPILEKMDGTEELLVKLNREDLLRKQRTFDNGSIPHQIHLGELHAILRRQEDFYPFLKDNREKIEKILTFRIPYYVGPLARGNSRFAWMTRKSEETITPWNFEEVVDKGASAQSFIERMTNFDKNLPNEKVLPKHSLLYEYFTVYNELTKVKYVTEGMRKPAFLSGEQKKAIVDLLFKTNRKVTVKQLKEDYFKKIECFDSVEISGVEDRFNASLGTYHDLLKIIKDKDFLDNEENEDILEDIVLTLTLFEDREMIEERLKTYAHLFDDKVMKQLKRRRYTGWGRLSRKLINGIRDKQSGKTILDFLKSDGFANRNFMQLIHDDSLTFKEDIQKAQVSGQGDSLHEHIANLAGSPAIKKGILQTVKVVDELVKVMGRHKPENIVIEMARENQTTQKGQKNSRERMKRIEEGIKELGSQILKEHPVENTQLQNEKLYLYYLQNGRDMYVDQELDINRLSDYDVDHIVPQSFLKDDSIDNKVLTRSDKARGKSDNVPSEEVVKKMKNYWRQLLNAKLITQRKFDNLTKAERGGLSELDKAGFIKRQLVETRQITKHVAQILDSRMNTKYDENDKLIREVKVITLKSKLVSDFRKDFQFYKVREINNYHHAHDAYLNAVVGTALIKKYPKLESEFVYGDYKVYDVRKMIAKSEQEIGKATAKYFFYSNIMNFFKTEITLANGEIRKRPLIETNGETGEIVWDKGRDFATVRKVLSMPQVNIVKKTEVQTGGFSKESILPKRNSDKLIARKKDWDPKKYGGFDSPTVAYSVLVVAKVEKGKSKKLKSVKELLGITIMERSSFEKNPIDFLEAKGYKEVKKDLIIKLPKYSLFELENGRKRMLASAGELQKGNELALPSKYVNFLYLASHYEKLKGSPEDNEQKQLFVEQHKHYLDEIIEQISEFSKRVILADANLDKVLSAYNKHRDKPIREQAENIIHLFTLTNLGAPAAFKYFDTTIDRKRYTSTKEVLDATLIHQSITGLYETRIDLSQLGGDGGGGGGGGGGGLGIEDEYRLHETSTEPDVSLGSTWLSDFPQAWAETGGMGLAVRQAPLIIPLKATSTPVSIQQYPMSHEARLGIKPHIQRLLDQGILVPCQSPWNTPLLPVKKPGTNDYRPVQDLREVNKRVEDIHPTVPNPYNLLSGLPPSHQWYTVLDLKDAFFCLRLHPTSQPLFAFEWRDPGMGISGQLTWTRLPQGFKNSPTLFNEALHRDLADFRIQHPDLILLQYVDDILLAATSELDCQQGTRALLQTLGDLGYRASAKKAQICQKQVKYLGYLLREGQRWLTEARKETVMGQPVPKTPRQLREFLGKAGFCRLFIPGFAEMAAPLYPLTKPGTLFSWGPDQQKAYQEIKQALLTAPALGLPDLTKPFELFVDEKQGYAKGVLTQKLGPWRRPVAYLSKKLDPVAAGWPPCLRMVAAIAVLTKDAGKLTMGQPLVILAPHAVEALVKQPPDRWLSNARMTHYQAMLLDTDRVQFGPVVALNPATLLPLPEEGAPHDCLEILAETHGTRPDLTDQPIPDADHTWYTDGSSFLQEGQRKAGAAVTTETEVIWAGALPAGTSAQRAELIALTQALKMAEGKRLNVYTDSRYAFATAHIHGEIYRRRGWLTSEGREIKNKSEILALLKALFLPKRLSIIHCLGHQKGDSAEARGNRLADQAAREAAIKTPPDTSTLLIAGKRTADGSEFEKRTADGSEFESPKKKAKVE

SEQ ID NO: 2111 - protein, 2091 aa, synthetic construct
MPAAKRVKLDGGDKKYSIGLDIGTNSVGWAVITDEYKVPSKKFKVLGNTDRHSIKKNLIGALLFDSGETAEATRLKRTARRRYTRRKNRICYLQEIFSNEMAKVDDSFFHRLEESFLVEEDKKHERHPIFGNIVDEVAYHEKYPTIYHLRKKLVDSTDKADLRLIYLALAHMIKFRGHFLIEGDLNPDNSDVDKLFIQLVQTYNQLFEENPINASGVDAKAILSARLSKSRRLENLIAQLPGEKKNGLFGNLIALSLGLTPNFKSNFDLAEDAKLQLSKDTYDDDLDNLLAQIGDQYADLFLAAKNLSDAILLSDILRVNTEITKAPLSASMIKRYDEHHQDLTLLKALVRQQLPEKYKEIFFDQSKNGYAGYIDGGASQEEFYKFIKPILEKMDGTEELLVKLNREDLLRKQRTFDNGSIPHQIHLGELHAILRRQEDFYPFLKDNREKIEKILTFRIPYYVGPLARGNSRFAWMTRKSEETITPWNFEEVVDKGASAQSFIERMTNFDKNLPNEKVLPKHSLLYEYFTVYNELTKVKYVTEGMRKPAFLSGEQKKAIVDLLFKTNRKVTVKQLKEDYFKKIECFDSVEISGVEDRFNASLGTYHDLLKIIKDKDFLDNEENEDILEDIVLTLTLFEDREMIEERLKTYAHLFDDKVMKQLKRRRYTGWGRLSRKLINGIRDKQSGKTILDFLKSDGFANRNFMQLIHDDSLTFKEDIQKAQVSGQGDSLHEHIANLAGSPAIKKGILQTVKVVDELVKVMGRHKPENIVIEMARENQTTQKGQKNSRERMKRIEEGIKELGSQILKEHPVENTQLQNEKLYLYYLQNGRDMYVDQELDINRLSDYDVDHIVPQSFLKDDSIDNKVLTRSDKARGKSDNVPSEEVVKKMKNYWRQLLNAKLITQRKFDNLTKAERGGLSELDKAGFIKRQLVETRQITKHVAQILDSRMNTKYDENDKLIREVKVITLKSKLVSDFRKDFQFYKVREINNYHHAHDAYLNAVVGTALIKKYPKLESEFVYGDYKVYDVRKMIAKSEQEIGKATAKYFFYSNIMNFFKTEITLANGEIRKRPLIETNGETGEIVWDKGRDFATVRKVLSMPQVNIVKKTEVQTGGFSKESILPKRNSDKLIARKKDWDPKKYGGFDSPTVAYSVLVVAKVEKGKSKKLKSVKELLGITIMERSSFEKNPIDFLEAKGYKEVKKDLIIKLPKYSLFELENGRKRMLASAGELQKGNELALPSKYVNFLYLASHYEKLKGSPEDNEQKQLFVEQHKHYLDEIIEQISEFSKRVILADANLDKVLSAYNKHRDKPIREQAENIIHLFTLTNLGAPAAFKYFDTTIDRKRYTSTKEVLDATLIHQSITGLYETRIDLSQLGGDGGGGGGGGGGLGIEDEYRLHETSTEPDVSLGSTWLSDFPQAWAETGGMGLAVRQAPLIIPLKATSTPVSIQQYPMSHEARLGIKPHIQRLLDQGILVPCQSPWNTPLLPVKKPGTNDYRPVQDLREVNKRVEDIHPTVPNPYNLLSGLPPSHQWYTVLDLKDAFFCLRLHPTSQPLFAFEWRDPGMGISGQLTWTRLPQGFKNSPTLFNEALHRDLADFRIQHPDLILLQYVDDILLAATSELDCQQGTRALLQTLGDLGYRASAKKAQICQKQVKYLGYLLREGQRWLTEARKETVMGQPVPKTPRQLREFLGKAGFCRLFIPGFAEMAAPLYPLTKPGTLFSWGPDQQKAYQEIKQALLTAPALGLPDLTKPFELFVDEKQGYAKGVLTQKLGPWRRPVAYLSKKLDPVAAGWPPCLRMVAAIAVLTKDAGKLTMGQPLVILAPHAVEALVKQPPDRWLSNARMTHYQAMLLDTDRVQFGPVVALNPATLLPLPEEGAPHDCLEILAETHGTRPDLTDQPIPDADHTWYTDGSSFLQEGQRKAGAAVTTETEVIWAGALPAGTSAQRAELIALTQALKMAEGKRLNVYTDSRYAFATAHIHGEIYRRRGWLTSEGREIKNKSEILALLKALFLPKRLSIIHCLGHQKGDSAEARGNRLADQAAREAAIKTPPDTSTLLIAGKRTADGSEFEKRTADGSEFESPKKKAKVE

SEQ ID NO: 2112 - protein, 2096 aa, synthetic construct
MPAAKRVKLDGGDKKYSIGLDIGTNSVGWAVITDEYKVPSKKFKVLGNTDRHSIKKNLIGALLFDSGETAEATRLKRTARRRYTRRKNRICYLQEIFSNEMAKVDDSFFHRLEESFLVEEDKKHERHPIFGNIVDEVAYHEKYPTIYHLRKKLVDSTDKADLRLIYLALAHMIKFRGHFLIEGDLNPDNSDVDKLFIQLVQTYNQLFEENPINASGVDAKAILSARLSKSRRLENLIAQLPGEKKNGLFGNLIALSLGLTPNFKSNFDLAEDAKLQLSKDTYDDDLDNLLAQIGDQYADLFLAAKNLSDAILLSDILRVNTEITKAPLSASMIKRYDEHHQDLTLLKALVRQQLPEKYKEIFFDQSKNGYAGYIDGGASQEEFYKFIKPILEKMDGTEELLVKLNREDLLRKQRTFDNGSIPHQIHLGELHAILRRQEDFYPFLKDNREKIEKILTFRIPYYVGPLARGNSRFAWMTRKSEETITPWNFEEVVDKGASAQSFIERMTNFDKNLPNEKVLPKHSLLYEYFTVYNELTKVKYVTEGMRKPAFLSGEQKKAIVDLLFKTNRKVTVKQLKEDYFKKIECFDSVEISGVEDRFNASLGTYHDLLKIIKDKDFLDNEENEDILEDIVLTLTLFEDREMIEERLKTYAHLFDDKVMKQLKRRRYTGWGRLSRKLINGIRDKQSGKTILDFLKSDGFANRNFMQLIHDDSLTFKEDIQKAQVSGQGDSLHEHIANLAGSPAIKKGILQTVKVVDELVKVMGRHKPENIVIEMARENQTTQKGQKNSRERMKRIEEGIKELGSQILKEHPVENTQLQNEKLYLYYLQNGRDMYVDQELDINRLSDYDVDHIVPQSFLKDDSIDNKVLTRSDKARGKSDNVPSEEVVKKMKNYWRQLLNAKLITQRKFDNLTKAERGGLSELDKAGFIKRQLVETRQITKHVAQILDSRMNTKYDENDKLIREVKVITLKSKLVSDFRKDFQFYKVREINNYHHAHDAYLNAVVGTALIKKYPKLESEFVYGDYKVYDVRKMIAKSEQEIGKATAKYFFYSNIMNFFKTEITLANGEIRKRPLIETNGETGEIVWDKGRDFATVRKVLSMPQVNIVKKTEVQTGGFSKESILPKRNSDKLIARKKDWDPKKYGGFDSPTVAYSVLVVAKVEKGKSKKLKSVKELLGITIMERSSFEKNPIDFLEAKGYKEVKKDLIIKLPKYSLFELENGRKRMLASAGELQKGNELALPSKYVNFLYLASHYEKLKGSPEDNEQKQLFVEQHKHYLDEIIEQISEFSKRVILADANLDKVLSAYNKHRDKPIREQAENIIHLFTLTNLGAPAAFKYFDTTIDRKRYTSTKEVLDATLIHQSITGLYETRIDLSQLGGDGGEAAAKGGSPAPGGLGIEDEYRLHETSTEPDVSLGSTWLSDFPQAWAETGGMGLAVRQAPLIIPLKATSTPVSIQQYPMSHEARLGIKPHIQRLLDQGILVPCQSPWNTPLLPVKKPGTNDYRPVQDLREVNKRVEDIHPTVPNPYNLLSGLPPSHQWYTVLDLKDAFFCLRLHPTSQPLFAFEWRDPGMGISGQLTWTRLPQGFKNSPTLFNEALHRDLADFRIQHPDLILLQYVDDILLAATSELDCQQGTRALLQTLGDLGYRASAKKAQICQKQVKYLGYLLREGQRWLTEARKETVMGQPVPKTPRQLREFLGKAGFCRLFIPGFAEMAAPLYPLTKPGTLFSWGPDQQKAYQEIKQALLTAPALGLPDLTKPFELFVDEKQGYAKGVLTQKLGPWRRPVAYLSKKLDPVAAGWPPCLRMVAAIAVLTKDAGKLTMGQPLVILAPHAVEALVKQPPDRWLSNARMTHYQAMLLDTDRVQFGPVVALNPATLLPLPEEGAPHDCLEILAETHGTRPDLTDQPIPDADHTWYTDGSSFLQEGQRKAGAAVTTETEVIWAGALPAGTSAQRAELIALTQALKMAEGKRLNVYTDSRYAFATAHIHGEIYRRRGWLTSEGREIKNKSEILALLKALFLPKRLSIIHCLGHQKGDSAEARGNRLADQAAREAAIKTPPDTSTLLIAGKRTADGSEFEKRTADGSEFESPKKKAKVE

SEQ ID NO: 2113 - protein, 2088 aa, synthetic construct; identical to SEQ ID NO: 2053

SEQ ID NO: 2114 - protein, 2094 aa, synthetic construct; identical to SEQ ID NO: 2060

SEQ ID NO: 2115 - protein, 2093 aa, synthetic construct
MPAAKRVKLDGGDKKYSIGLDIGTNSVGWAVITDEYKVPSKKFKVLGNTDRHSIKKNLIGALLFDSGETAEATRLKRTARRRYTRRKNRICYLQEIFSNEMAKVDDSFFHRLEESFLVEEDKKHERHPIFGNIVDEVAYHEKYPTIYHLRKKLVDSTDKADLRLIYLALAHMIKFRGHFLIEGDLNPDNSDVDKLFIQLVQTYNQLFEENPINASGVDAKAILSARLSKSRRLENLIAQLPGEKKNGLFGNLIALSLGLTPNFKSNFDLAEDAKLQLSKDTYDDDLDNLLAQIGDQYADLFLAAKNLSDAILLSDILRVNTEITKAPLSASMIKRYDEHHQDLTLLKALVRQQLPEKYKEIFFDQSKNGYAGYIDGGASQEEFYKFIKPILEKMDGTEELLVKLNREDLLRKQRTFDNGSIPHQIHLGELHAILRRQEDFYPFLKDNREKIEKILTFRIPYYVGPLARGNSRFAWMTRKSEETITPWNFEEVVDKGASAQSFIERMTNFDKNLPNEKVLPKHSLLYEYFTVYNELTKVKYVTEGMRKPAFLSGEQKKAIVDLLFKTNRKVTVKQLKEDYFKKIECFDSVEISGVEDRFNASLGTYHDLLKIIKDKDFLDNEENEDILEDIVLTLTLFEDREMIEERLKTYAHLFDDKVMKQLKRRRYTGWGRLSRKLINGIRDKQSGKTILDFLKSDGFANRNFMQLIHDDSLTFKEDIQKAQVSGQGDSLHEHIANLAGSPAIKKGILQTVKVVDELVKVMGRHKPENIVIEMARENQTTQKGQKNSRERMKRIEEGIKELGSQILKEHPVENTQLQNEKLYLYYLQNGRDMYVDQELDINRLSDYDVDHIVPQSFLKDDSIDNKVLTRSDKARGKSDNVPSEEVVKKMKNYWRQLLNAKLITQRKFDNLTKAERGGLSELDKAGFIKRQLVETRQITKHVAQILDSRMNTKYDENDKLIREVKVITLKSKLVSDFRKDFQFYKVREINNYHHAHDAYLNAVVGTALIKKYPKLESEFVYGDYKVYDVRKMIAKSEQEIGKATAKYFFYSNIMNFFKTEITLANGEIRKRPLIETNGETGEIVWDKGRDFATVRKVLSMPQVNIVKKTEVQTGGFSKESILPKRNSDKLIARKKDWDPKKYGGFDSPTVAYSVLVVAKVEKGKSKKLKSVKELLGITIMERSSFEKNPIDFLEAKGYKEVKKDLIIKLPKYSLFELENGRKRMLASAGELQKGNELALPSKYVNFLYLASHYEKLKGSPEDNEQKQLFVEQHKHYLDEIIEQISEFSKRVILADANLDKVLSAYNKHRDKPIREQAENIIHLFTLTNLGAPAAFKYFDTTIDRKRYTSTKEVLDATLIHQSITGLYETRIDLSQLGGDGGGSSEAAAKGGLGIEDEYRLHETSTEPDVSLGSTWLSDFPQAWAETGGMGLAVRQAPLIIPLKATSTPVSIQQYPMSHEARLGIKPHIQRLLDQGILVPCQSPWNTPLLPVKKPGTNDYRPVQDLREVNKRVEDIHPTVPNPYNLLSGLPPSHQWYTVLDLKDAFFCLRLHPTSQPLFAFEWRDPGMGISGQLTWTRLPQGFKNSPTLFNEALHRDLADFRIQHPDLILLQYVDDILLAATSELDCQQGTRALLQTLGDLGYRASAKKAQICQKQVKYLGYLLREGQRWLTEARKETVMGQPVPKTPRQLREFLGKAGFCRLFIPGFAEMAAPLYPLTKPGTLFSWGPDQQKAYQEIKQALLTAPALGLPDLTKPFELFVDEKQGYAKGVLTQKLGPWRRPVAYLSKKLDPVAAGWPPCLRMVAAIAVLTKDAGKLTMGQPLVILAPHAVEALVKQPPDRWLSNARMTHYQAMLLDTDRVQFGPVVALNPATLLPLPEEGAPHDCLEILAETHGTRPDLTDQPIPDADHTWYTDGSSFLQEGQRKAGAAVTTETEVIWAGALPAGTSAQRAELIALTQALKMAEGKRLNVYTDSRYAFATAHIHGEIYRRRGWLTSEGREIKNKSEILALLKALFLPKRLSIIHCLGHQKGDSAEARGNRLADQAAREAAIKTPPDTSTLLIAGKRTADGSEFEKRTADGSEFESPKKKAKVE

SEQ ID NO: 2116 - protein, 2100 aa, synthetic construct
MPAAKRVKLDGGDKKYSIGLDIGTNSVGWAVITDEYKVPSKKFKVLGNTDRHSIKKNLIGALLFDSGETAEATRLKRTARRRYTRRKNRICYLQEIFSNEMAKVDDSFFHRLEESFLVEEDKKHERHPIFGNIVDEVAYHEKYPTIYHLRKKLVDSTDKADLRLIYLALAHMIKFRGHFLIEGDLNPDNSDVDKLFIQLVQTYNQLFEENPINASGVDAKAILSARLSKSRRLENLIAQLPGEKKNGLFGNLIALSLGLTPNFKSNFDLAEDAKLQLSKDTYDDDLDNLLAQIGDQYADLFLAAKNLSDAILLSDILRVNTEITKAPLSASMIKRYDEHHQDLTLLKALVRQQLPEKYKEIFFDQSKNGYAGYIDGGASQEEFYKFIKPILEKMDGTEELLVKLNREDLLRKQRTFDNGSIPHQIHLGELHAILRRQEDFYPFLKDNREKIEKILTFRIPYYVGPLARGNSRFAWMTRKSEETITPWNFEEVVDKGASAQSFIERMTNFDKNLPNEKVLPKHSLLYEYFTVYNELTKVKYVTEGMRKPAFLSGEQKKAIVDLLFKTNRKVTVKQLKEDYFKKIECFDSVEISGVEDRFNASLGTYHDLLKIIKDKDFLDNEENEDILEDIVLTLTLFEDREMIEERLKTYAHLFDDKVMKQLKRRRYTGWGRLSRKLINGIRDKQSGKTILDFLKSDGFANRNFMQLIHDDSLTFKEDIQKAQVSGQGDSLHEHIANLAGSPAIKKGILQTVKVVDELVKVMGRHKPENIVIEMARENQTTQKGQKNSRERMKRIEEGIKELGSQILKEHPVENTQLQNEKLYLYYLQNGRDMYVDQELDINRLSDYDVDHIVPQSFLKDDSIDNKVLTRSDKARGKSDNVPSEEVVKKMKNYWRQLLNAKLITQRKFDNLTKAERGGLSELDKAGFIKRQLVETRQITKHVAQILDSRMNTKYDENDKLIREVKVITLKSKLVSDFRKDFQFYKVREINNYHHAHDAYLNAVVGTALIKKYPKLESEFVYGDYKVYDVRKMIAKSEQEIGKATAKYFFYSNIMNFFKTEITLANGEIRKRPLIETNGETGEIVWDKGRDFATVRKVLSMPQVNIVKKTEVQTGGFSKESILPKRNSDKLIARKKDWDPKKYGGFDSPTVAYSVLVVAKVEKGKSKKLKSVKELLGITIMERSSFEKNPIDFLEAKGYKEVKKDLIIKLPKYSLFELENGRKRMLASAGELQKGNELALPSKYVNFLYLASHYEKLKGSPEDNEQKQLFVEQHKHYLDEIIEQISEFSKRVILADANLDKVLSAYNKHRDKPIREQAENIIHLFTLTNLGAPAAFKYFDTTIDRKRYTSTKEVLDATLIHQSITGLYETRIDLSQLGGDGGGGGGSGGGGSGGGGSGGLGIEDEYRLHETSTEPDVSLGSTWLSDFPQAWAETGGMGLAVRQAPLIIPLKATSTPVSIQQYPMSHEARLGIKPHIQRLLDQGILVPCQSPWNTPLLPVKKPGTNDYRPVQDLREVNKRVEDIHPTVPNPYNLLSGLPPSHQWYTVLDLKDAFFCLRLHPTSQPLFAFEWRDPGMGISGQLTWTRLPQGFKNSPTLFNEALHRDLADFRIQHPDLILLQYVDDILLAATSELDCQQGTRALLQTLGDLGYRASAKKAQICQKQVKYLGYLLREGQRWLTEARKETVMGQPVPKTPRQLREFLGKAGFCRLFIPGFAEMAAPLYPLTKPGTLFSWGPDQQKAYQEIKQALLTAPALGLPDLTKPFELFVDEKQGYAKGVLTQKLGPWRRPVAYLSKKLDPVAAGWPPCLRMVAAIAVLTKDAGKLTMGQPLVILAPHAVEALVKQPPDRWLSNARMTHYQAMLLDTDRVQFGPVVALNPATLLPLPEEGAPHDCLEILAETHGTRPDLTDQPIPDADHTWYTDGSSFLQEGQRKAGAAVTTETEVIWAGALPAGTSAQRAELIALTQALKMAEGKRLNVYTDSRYAFATAHIHGEIYRRRGWLTSEGREIKNKSEILALLKALFLPKRLSIIHCLGHQKGDSAEARGNRLADQAAREAAIKTPPDTSTLLIAGKRTADGSEFEKRTADGSEFESPKKKAKVE

SEQ ID NO: 2117 - protein, 2096 aa, synthetic construct
MPAAKRVKLDGGDKKYSIGLDIGTNSVGWAVITDEYKVPSKKFKVLGNTDRHSIKKNLIGALLFDSGETAEATRLKRTARRRYTRRKNRICYLQEIFSNEMAKVDDSFFHRLEESFLVEEDKKHERHPIFGNIVDEVAYHEKYPTIYHLRKKLVDSTDKADLRLIYLALAHMIKFRGHFLIEGDLNPDNSDVDKLFIQLVQTYNQLFEENPINASGVDAKAILSARLSKSRRLENLIAQLPGEKKNGLFGNLIALSLGLTPNFKSNFDLAEDAKLQLSKDTYDDDLDNLLAQIGDQYADLFLAAKNLSDAILLSDILRVNTEITKAPLSASMIKRYDEHHQDLTLLKALVRQQLPEKYKEIFFDQSKNGYAGYIDGGASQEEFYKFIKPILEKMDGTEELLVKLNREDLLRKQRTFDNGSIPHQIHLGELHAILRRQEDFYPFLKDNREKIEKILTFRIPYYVGPLARGNSRFAWMTRKSEETITPWNFEEVVDKGASAQSFIERMTNFDKNLPNEKVLPKHSLLYEYFTVYNELTKVKYVTEGMRKPAFLSGEQKKAIVDLLFKTNRKVTVKQLKEDYFKKIECFDSVEISGVEDRFNASLGTYHDLLKIIKDKDFLDNEENEDILEDIVLTLTLFEDREMIEERLKTYAHLFDDKVMKQLKRRRYTGWGRLSRKLINGIRDKQSGKTILDFLKSDGFANRNFMQLIHDDSLTFKEDIQKAQVSGQGDSLHEHIANLAGSPAIKKGILQTVKVVDELVKVMGRHKPENIVIEMARENQTTQKGQKNSRERMKRIEEGIKELGSQILKEHPVENTQLQNEKLYLYYLQNGRDMYVDQELDINRLSDYDVDHIVPQSFLKDDSIDNKVLTRSDKARGKSDNVPSEEVVKKMKNYWRQLLNAKLITQRKFDNLTKAERGGLSELDKAGFIKRQLVETRQITKHVAQILDSRMNTKYDENDKLIREVKVITLKSKLVSDFRKDFQFYKVREINNYHHAHDAYLNAVVGTALIKKYPKLESEFVYGDYKVYDVRKMIAKSEQEIGKATAKYFFYSNIMNFFKTEITLANGEIRKRPLIETNGETGEIVWDKGRDFATVRKVLSMPQVNIVKKTEVQTGGFSKESILPKRNSDKLIARKKDWDPKKYGGFDSPTVAYSVLVVAKVEKGKSKKLKSVKELLGITIMERSSFEKNPIDFLEAKGYKEVKKDLIIKLPKYSLFELENGRKRMLASAGELQKGNELALPSKYVNFLYLASHYEKLKGSPEDNEQKQLFVEQHKHYLDEIIEQISEFSKRVILADANLDKVLSAYNKHRDKPIREQAENIIHLFTLTNLGAPAAFKYFDTTIDRKRYTSTKEVLDATLIHQSITGLYETRIDLSQLGGDGGGSSGGSEAAAKGGLGIEDEYRLHETSTEPDVSLGSTWLSDFPQAWAETGGMGLAVRQAPLIIPLKATSTPVSIQQYPMSHEARLGIKPHIQRLLDQGILVPCQSPWNTPLLPVKKPGTNDYRPVQDLREVNKRVEDIHPTVPNPYNLLSGLPPSHQWYTVLDLKDAFFCLRLHPTSQPLFAFEWRDPGMGISGQLTWTRLPQGFKNSPTLFNEALHRDLADFRIQHPDLILLQYVDDILLAATSELDCQQGTRALLQTLGDLGYRASAKKAQICQKQVKYLGYLLREGQRWLTEARKETVMGQPVPKTPRQLREFLGKAGFCRLFIPGFAEMAAPLYPLTKPGTLFSWGPDQQKAYQEIKQALLTAPALGLPDLTKPFELFVDEKQGYAKGVLTQKLGPWRRPVAYLSKKLDPVAAGWPPCLRMVAAIAVLTKDAGKLTMGQPLVILAPHAVEALVKQPPDRWLSNARMTHYQAMLLDTDRVQFGPVVALNPATLLPLPEEGAPHDCLEILAETHGTRPDLTDQPIPDADHTWYTDGSSFLQEGQRKAGAAVTTETEVIWAGALPAGTSAQRAELIALTQALKMAEGKRLNVYTDSRYAFATAHIHGEIYRRRGWLTSEGREIKNKSEILALLKALFLPKRLSIIHCLGHQKGDSAEARGNRLADQAAREAAIKTPPDTSTLLIAGKRTADGSEFEKRTADGSEFESPKKKAKVE

SEQ ID NO: 2118 - protein, 2100 aa, synthetic construct
MPAAKRVKLDGGDKKYSIGLDIGTNSVGWAVITDEYKVPSKKFKVLGNTDRHSIKKNLIGALLFDSGETAEATRLKRTARRRYTRRKNRICYLQEIFSNEMAKVDDSFFHRLEESFLVEEDKKHERHPIFGNIVDEVAYHEKYPTIYHLRKKLVDSTDKADLRLIYLALAHMIKFRGHFLIEGDLNPDNSDVDKLFIQLVQTYNQLFEENPINASGVDAKAILSARLSKSRRLENLIAQLPGEKKNGLFGNLIALSLGLTPNFKSNFDLAEDAKLQLSKDTYDDDLDNLLAQIGDQYADLFLAAKNLSDAILLSDILRVNTEITKAPLSASMIKRYDEHHQDLTLLKALVRQQLPEKYKEIFFDQSKNGYAGYIDGGASQEEFYKFIKPILEKMDGTEELLVKLNREDLLRKQRTFDNGSIPHQIHLGELHAILRRQEDFYPFLKDNREKIEKILTFRIPYYVGPLARGNSRFAWMTRKSEETITPWNFEEVVDKGASAQSFIERMTNFDKNLPNEKVLPKHSLLYEYFTVYNELTKVKYVTEGMRKPAFLSGEQKKAIVDLLFKTNRKVTVKQLKEDYFKKIECFDSVEISGVEDRFNASLGTYHDLLKIIKDKDFLDNEENEDILEDIVLTLTLFEDREMIEERLKTYAHLFDDKVMKQLKRRRYTGWGRLSRKLINGIRDKQSGKTILDFLKSDGFANRNFMQLIHDDSLTFKEDIQKAQVSGQGDSLHEHIANLAGSPAIKKGILQTVKVVDELVKVMGRHKPENIVIEMARENQTTQKGQKNSRERMKRIEEGIKELGSQILKEHPVENTQLQNEKLYLYYLQNGRDMYVDQELDINRLSDYDVDHIVPQSFLKDDSIDNKVLTRSDKARGKSDNVPSEEVVKKMKNYWRQLLNAKLITQRKFDNLTKAERGGLSELDKAGFIKRQLVETRQITKHVAQILDSRMNTKYDENDKLIREVKVITLKSKLVSDFRKDFQFYKVREINNYHHAHDAYLNAVVGTALIKKYPKLESEFVYGDYKVYDVRKMIAKSEQEIGKATAKYFFYSNIMNFFKTEITLANGEIRKRPLIETNGETGEIVWDKGRDFATVRKVLSMPQVNIVKKTEVQTGGFSKESILPKRNSDKLIARKKDWDPKKYGGFDSPTVAYSVLVVAKVEKGKSKKLKSVKELLGITIMERSSFEKNPIDFLEAKGYKEVKKDLIIKLPKYSLFELENGRKRMLASAGELQKGNELALPSKYVNFLYLASHYEKLKGSPEDNEQKQLFVEQHKHYLDEIIEQISEFSKRVILADANLDKVLSAYNKHRDKPIREQAENIIHLFTLTNLGAPAAFKYFDTTIDRKRYTSTKEVLDATLIHQSITGLYETRIDLSQLGGDGGGGSGGSGGSGGSGGSGGLGIEDEYRLHETSTEPDVSLGSTWLSDFPQAWAETGGMGLAVRQAPLIIPLKATSTPVSIQQYPMSHEARLGIKPHIQRLLDQGILVPCQSPWNTPLLPVKKPGTNDYRPVQDLREVNKRVEDIHPTVPNPYNLLSGLPPSHQWYTVLDLKDAFFCLRLHPTSQPLFAFEWRDPGMGISGQLTWTRLPQGFKNSPTLFNEALHRDLADFRIQHPDLILLQYVDDILLAATSELDCQQGTRALLQTLGDLGYRASAKKAQICQKQVKYLGYLLREGQRWLTEARKETVMGQPVPKTPRQLREFLGKAGFCRLFIPGFAEMAAPLYPLTKPGTLFSWGPDQQKAYQEIKQALLTAPALGLPDLTKPFELFVDEKQGYAKGVLTQKLGPWRRPVAYLSKKLDPVAAGWPPCLRMVAAIAVLTKDAGKLTMGQPLVILAPHAVEALVKQPPDRWLSNARMTHYQAMLLDTDRVQFGPVVALNPATLLPLPEEGAPHDCLEILAETHGTRPDLTDQPIPDADHTWYTDGSSFLQEGQRKAGAAVTTETEVIWAGALPAGTSAQRAELIALTQALKMAEGKRLNVYTDSRYAFATAHIHGEIYRRRGWLTSEGREIKNKSEILALLKALFLPKRLSIIHCLGHQKGDSAEARGNRLADQAAREAAIKTPPDTSTLLIAGKRTADGSEFEKRTADGSEFESPKKKAKVE

SEQ ID NO: 2119 - protein, 2096 aa, synthetic construct
MPAAKRVKLDGGDKKYSIGLDIGTNSVGWAVITDEYKVPSKKFKVLGNTDRHSIKKNLIGALLFDSGETAEATRLKRTARRRYTRRKNRICYLQEIFSNEMAKVDDSFFHRLEESFLVEEDKKHERHPIFGNIVDEVAYHEKYPTIYHLRKKLVDSTDKADLRLIYLALAHMIKFRGHFLIEGDLNPDNSDVDKLFIQLVQTYNQLFEENPINASGVDAKAILSARLSKSRRLENLIAQLPGEKKNGLFGNLIALSLGLTPNFKSNFDLAEDAKLQLSKDTYDDDLDNLLAQIGDQYADLFLAAKNLSDAILLSDILRVNTEITKAPLSASMIKRYDEHHQDLTLLKALVRQQLPEKYKEIFFDQSKNGYAGYIDGGASQEEFYKFIKPILEKMDGTEELLVKLNREDLLRKQRTFDNGSIPHQIHLGELHAILRRQEDFYPFLKDNREKIEKILTFRIPYYVGPLARGNSRFAWMTRKSEETITPWNFEEVVDKGASAQSFIERMTNFDKNLPNEKVLPKHSLLYEYFTVYNELTKVKYVTEGMRKPAFLSGEQKKAIVDLLFKTNRKVTVKQLKEDYFKKIECFDSVEISGVEDRFNASLGTYHDLLKIIKDKDFLDNEENEDILEDIVLTLTLFEDREMIEERLKTYAHLFDDKVMKQLKRRRYTGWGRLSRKLINGIRDKQSGKTILDFLKSDGFANRNFMQLIHDDSLTFKEDIQKAQVSGQGDSLHEHIANLAGSPAIKKGILQTVKVVDELVKVMGRHKPENIVIEMARENQTTQKGQKNSRERMKRIEEGIKELGSQILKEHPVENTQLQNEKLYLYYLQNGRDMYVDQELDINRLSDYDVDHIVPQSFLKDDSIDNKVLTRSDKARGKSDNVPSEEVVKKMKNYWRQLLNAKLITQRKFDNLTKAERGGLSELDKAGFIKRQLVETRQITKHVAQILDSRMNTKYDENDKLIREVKVITLKSKLVSDFRKDFQFYKVREINNYHHAHDAYLNAVVGTALIKKYPKLESEFVYGDYKVYDVRKMIAKSEQEIGKATAKYFFYSNIMNFFKTEITLANGEIRKRPLIETNGETGEIVWDKGRDFATVRKVLSMPQVNIVKKTEVQTGGFSKESILPKRNSDKLIARKKDWDPKKYGGFDSPTVAYSVLVVAKVEKGKSKKLKSVKELLGITIMERSSFEKNPIDFLEAKGYKEVKKDLIIKLPKYSLFELENGRKRMLASAGELQKGNELALPSKYVNFLYLASHYEKLKGSPEDNEQKQLFVEQHKHYLDEIIEQISEFSKRVILADANLDKVLSAYNKHRDKPIREQAENIIHLFTLTNLGAPAAFKYFDTTIDRKRYTSTKEVLDATLIHQSITGLYETRIDLSQLGGDGGEAAAKGSSGGSGGLGIEDEYRLHETSTEPDVSLGSTWLSDFPQAWAETGGMGLAVRQAPLIIPLKATSTPVSIQQYPMSHEARLGIKPHIQRLLDQGILVPCQSPWNTPLLPVKKPGTNDYRPVQDLREVNKRVEDIHPTVPNPYNLLSGLPPSHQWYTVLDLKDAFFCLRLHPTSQPLFAFEWRDPGMGISGQLTWTRLPQGFKNSPTLFNEALHRDLADFRIQHPDLILLQYVDDILLAATSELDCQQGTRALLQTLGDLGYRASAKKAQICQKQVKYLGYLLREGQRWLTEARKETVMGQPVPKTPRQLREFLGKAGFCRLFIPGFAEMAAPLYPLTKPGTLFSWGPDQQKAYQEIKQALLTAPALGLPDLTKPFELFVDEKQGYAKGVLTQKLGPWRRPVAYLSKKLDPVAAGWPPCLRMVAAIAVLTKDAGKLTMGQPLVILAPHAVEALVKQPPDRWLSNARMTHYQAMLLDTDRVQFGPVVALNPATLLPLPEEGAPHDCLEILAETHGTRPDLTDQPIPDADHTWYTDGSSFLQEGQRKAGAAVTTETEVIWAGALPAGTSAQRAELIALTQALKMAEGKRLNVYTDSRYAFATAHIHGEIYRRRGWLTSEGREIKNKSEILALLKALFLPKRLSIIHCLGHQKGDSAEARGNRLADQAAREAAIKTPPDTSTLLIAGKRTADGSEFEKRTADGSEFESPKKKAKVE

SEQ ID NO: 2120 - protein, 2096 aa, synthetic construct
MPAAKRVKLDGGDKKYSIGLDIGTNSVGWAVITDEYKVPSKKFKVLGNTDRHSIKKNLIGALLFDSGETAEATRLKRTARRRYTRRKNRICYLQEIFSNEMAKVDDSFFHRLEESFLVEEDKKHERHPIFGNIVDEVAYHEKYPTIYHLRKKLVDSTDKADLRLIYLALAHMIKFRGHFLIEGDLNPDNSDVDKLFIQLVQTYNQLFEENPINASGVDAKAILSARLSKSRRLENLIAQLPGEKKNGLFGNLIALSLGLTPNFKSNFDLAEDAKLQLSKDTYDDDLDNLLAQIGDQYADLFLAAKNLSDAILLSDILRVNTEITKAPLSASMIKRYDEHHQDLTLLKALVRQQLPEKYKEIFFDQSKNGYAGYIDGGASQEEFYKFIKPILEKMDGTEELLVKLNREDLLRKQRTFDNGSIPHQIHLGELHAILRRQEDFYPFLKDNREKIEKILTFRIPYYVGPLARGNSRFAWMTRKSEETITPWNFEEVVDKGASAQSFIERMTNFDKNLPNEKVLPKHSLLYEYFTVYNELTKVKYVTEGMRKPAFLSGEQKKAIVDLLFKTNRKVTVKQLKEDYFKKIECFDSVEISGVEDRFNASLGTYHDLLKIIKDKDFLDNEENEDILEDIVLTLTLFEDREMIEERLKTYAHLFDDKVMKQLKRRRYTGWGRLSRKLINGIRDKQSGKTILDFLKSDGFANRNFMQLIHDDSLTFKEDIQKAQVSGQGDSLHEHIANLAGSPAIKKGILQTVKVVDELVKVMGRHKPENIVIEMARENQTTQKGQKNSRERMKRIEEGIKELGSQILKEHPVENTQLQNEKLYLYYLQNGRDMYVDQELDINRLSDYDVDHIVPQSFLKDDSIDNKVLTRSDKARGKSDNVPSEEVVKKMKNYWRQLLNAKLITQRKFDNLTKAERGGLSELDKAGFIKRQLVETRQITKHVAQILDSRMNTKYDENDKLIREVKVITLKSKLVSDFRKDFQFYKVREINNYHHAHDAYLNAVVGTALIKKYPKLESEFVYGDYKVYDVRKMIAKSEQEIGKATAKYFFYSNIMNFFKTEITLANGEIRKRPLIETNGETGEIVWDKGRDFATVRKVLSMPQVNIVKKTEVQTGGFSKESILPKRNSDKLIARKKDWDPKKYGGFDSPTVAYSVLVVAKVEKGKSKKLKSVKELLGITIMERSSFEKNPIDFLEAKGYKEVKKDLIIKLPKYSLFELENGRKRMLASAGELQKGNELALPSKYVNFLYLASHYEKLKGSPEDNEQKQLFVEQHKHYLDEIIEQISEFSKRVILADANLDKVLSAYNKHRDKPIREQAENIIHLFTLTNLGAPAAFKYFDTTIDRKRYTSTKEVLDATLIHQSITGLYETRIDLSQLGGDGGPAPEAAAKGGGGGLGIEDEYRLHETSTEPDVSLGSTWLSDFPQAWAETGGMGLAVRQAPLIIPLKATSTPVSIQQYPMSHEARLGIKPHIQRLLDQGILVPCQSPWNTPLLPVKKPGTNDYRPVQDLREVNKRVEDIHPTVPNPYNLLSGLPPSHQWYTVLDLKDAFFCLRLHPTSQPLFAFEWRDPGMGISGQLTWTRLPQGFKNSPTLFNEALHRDLADFRIQHPDLILLQYVDDILLAATSELDCQQGTRALLQTLGDLGYRASAKKAQICQKQVKYLGYLLREGQRWLTEARKETVMGQPVPKTPRQLREFLGKAGFCRLFIPGFAEMAAPLYPLTKPGTLFSWGPDQQKAYQEIKQALLTAPALGLPDLTKPFELFVDEKQGYAKGVLTQKLGPWRRPVAYLSKKLDPVAAGWPPCLRMVAAIAVLTKDAGKLTMGQPLVILAPHAVEALVKQPPDRWLSNARMTHYQAMLLDTDRVQFGPVVALNPATLLPLPEEGAPHDCLEILAETHGTRPDLTDQPIPDADHTWYTDGSSFLQEGQRKAGAAVTTETEVIWAGALPAGTSAQRAELIALTQALKMAEGKRLNVYTDSRYAFATAHIHGEIYRRRGWLTSEGREIKNKSEILALLKALFLPKRLSIIHCLGHQKGDSAEARGNRLADQAAREAAIKTPPDTSTLLIAGKRTADGSEFEKRTADGSEFESPKKKAKVE

SEQ ID NO: 2121 - protein, 2101 aa, synthetic construct
MPAAKRVKLDGGDKKYSIGLDIGTNSVGWAVITDEYKVPSKKFKVLGNTDRHSIKKNLIGALLFDSGETAEATRLKRTARRRYTRRKNRICYLQEIFSNEMAKVDDSFFHRLEESFLVEEDKKHERHPIFGNIVDEVAYHEKYPTIYHLRKKLVDSTDKADLRLIYLALAHMIKFRGHFLIEGDLNPDNSDVDKLFIQLVQTYNQLFEENPINASGVDAKAILSARLSKSRRLENLIAQLPGEKKNGLFGNLIALSLGLTPNFKSNFDLAEDAKLQLSKDTYDDDLDNLLAQIGDQYADLFLAAKNLSDAILLSDILRVNTEITKAPLSASMIKRYDEHHQDLTLLKALVRQQLPEKYKEIFFDQSKNGYAGYIDGGASQEEFYKFIKPILEKMDGTEELLVKLNREDLLRKQRTFDNGSIPHQIHLGELHAILRRQEDFYPFLKDNREKIEKILTFRIPYYVGPLARGNSRFAWMTRKSEETITPWNFEEVVDKGASAQSFIERMTNFDKNLPNEKVLPKHSLLYEYFTVYNELTKVKYVTEGMRKPAFLSGEQKKAIVDLLFKTNRKVTVKQLKEDYFKKIECFDSVEISGVEDRFNASLGTYHDLLKIIKDKDFLDNEENEDILEDIVLTLTLFEDREMIEERLKTYAHLFDDKVMKQLKRRRYTGWGRLSRKLINGIRDKQSGKTILDFLKSDGFANRNFMQLIHDDSLTFKEDIQKAQVSGQGDSLHEHIANLAGSPAIKKGILQTVKVVDELVKVMGRHKPENIVIEMARENQTTQKGQKNSRERMKRIEEGIKELGSQILKEHPVENTQLQNEKLYLYYLQNGRDMYVDQELDINRLSDYDVDHIVPQSFLKDDSIDNKVLTRSDKARGKSDNVPSEEVVKKMKNYWRQLLNAKLITQRKFDNLTKAERGGLSELDKAGFIKRQLVETRQITKHVAQILDSRMNTKYDENDKLIREVKVITLKSKLVSDFRKDFQFYKVREINNYHHAHDAYLNAVVGTALIKKYPKLESEFVYGDYKVYDVRKMIAKSEQEIGKATAKYFFYSNIMNFFKTEITLANGEIRKRPLIETNGETGEIVWDKGRDFATVRKVLSMPQVNIVKKTEVQTGGFSKESILPKRNSDKLIARKKDWDPKKYGGFDSPTVAYSVLVVAKVEKGKSKKLKSVKELLGITIMERSSFEKNPIDFLEAKGYKEVKKDLIIKLPKYSLFELENGRKRMLASAGELQKGNELALPSKYVNFLYLASHYEKLKGSPEDNEQKQLFVEQHKHYLDEIIEQISEFSKRVILADANLDKVLSAYNKHRDKPIREQAENIIHLFTLTNLGAPAAFKYFDTTIDRKRYTSTKEVLDATLIHQSITGLYETRIDLSQLGGDGGSGSETPGTSESATPESGGLGIEDEYRLHETSTEPDVSLGSTWLSDFPQAWAETGGMGLAVRQAPLIIPLKATSTPVSIQQYPMSHEARLGIKPHIQRLLDQGILVPCQSPWNTPLLPVKKPGTNDYRPVQDLREVNKRVEDIHPTVPNPYNLLSGLPPSHQWYTVLDLKDAFFCLRLHPTSQPLFAFEWRDPGMGISGQLTWTRLPQGFKNSPTLFNEALHRDLADFRIQHPDLILLQYVDDILLAATSELDCQQGTRALLQTLGDLGYRASAKKAQICQKQVKYLGYLLREGQRWLTEARKETVMGQPVPKTPRQLREFLGKAGFCRLFIPGFAEMAAPLYPLTKPGTLFSWGPDQQKAYQEIKQALLTAPALGLPDLTKPFELFVDEKQGYAKGVLTQKLGPWRRPVAYLSKKLDPVAAGWPPCLRMVAAIAVLTKDAGKLTMGQPLVILAPHAVEALVKQPPDRWLSNARMTHYQAMLLDTDRVQFGPVVALNPATLLPLPEEGAPHDCLEILAETHGTRPDLTDQPIPDADHTWYTDGSSFLQEGQRKAGAAVTTETEVIWAGALPAGTSAQRAELIALTQALKMAEGKRLNVYTDSRYAFATAHIHGEIYRRRGWLTSEGREIKNKSEILALLKALFLPKRLSIIHCLGHQKGDSAEARGNRLADQAAREAAIKTPPDTSTLLIAGKRTADGSEFEKRTADGSEFESPKKKAKVE

SEQ ID NO: 2122 - protein, 2094 aa, synthetic construct; identical to SEQ ID NO: 2058

SEQ ID NO: 2123 - protein, 2096 aa, synthetic construct; identical to SEQ ID NO: 2054

SEQ ID NO: 2124 - protein, 2091 aa, synthetic construct
MPAAKRVKLDGGDKKYSIGLDIGTNSVGWAVITDEYKVPSKKFKVLGNTDRHSIKKNLIGALLFDSGETAEATRLKRTARRRYTRRKNRICYLQEIFSNEMAKVDDSFFHRLEESFLVEEDKKHERHPIFGNIVDEVAYHEKYPTIYHLRKKLVDSTDKADLRLIYLALAHMIKFRGHFLIEGDLNPDNSDVDKLFIQLVQTYNQLFEENPINASGVDAKAILSARLSKSRRLENLIAQLPGEKKNGLFGNLIALSLGLTPNFKSNFDLAEDAKLQLSKDTYDDDLDNLLAQIGDQYADLFLAAKNLSDAILLSDILRVNTEITKAPLSASMIKRYDEHHQDLTLLKALVRQQLPEKYKEIFFDQSKNGYAGYIDGGASQEEFYKFIKPILEKMDGTEELLVKLNREDLLRKQRTFDNGSIPHQIHLGELHAILRRQEDFYPFLKDNREKIEKILTFRIPYYVGPLARGNSRFAWMTRKSEETITPWNFEEVVDKGASAQSFIERMTNFDKNLPNEKVLPKHSLLYEYFTVYNELTKVKYVTEGMRKPAFLSGEQKKAIVDLLFKTNRKVTVKQLKEDYFKKIECFDSVEISGVEDRFNASLGTYHDLLKIIKDKDFLDNEENEDILEDIVLTLTLFEDREMIEERLKTYAHLFDDKVMKQLKRRRYTGWGRLSRKLINGIRDKQSGKTILDFLKSDGFANRNFMQLIHDDSLTFKEDIQKAQVSGQGDSLHEHIANLAGSPAIKKGILQTVKVVDELVKVMGRHKPENIVIEMARENQTTQKGQKNSRERMKRIEEGIKELGSQILKEHPVENTQLQNEKLYLYYLQNGRDMYVDQELDINRLSDYDVDHIVPQSFLKDDSIDNKVLTRSDKARGKSDNVPSEEVVKKMKNYWRQLLNAKLITQRKFDNLTKAERGGLSELDKAGFIKRQLVETRQITKHVAQILDSRMNTKYDENDKLIREVKVITLKSKLVSDFRKDFQFYKVREINNYHHAHDAYLNAVVGTALIKKYPKLESEFVYGDYKVYDVRKMIAKSEQEIGKATAKYFFYSNIMNFFKTEITLANGEIRKRPLIETNGETGEIVWDKGRDFATVRKVLSMPQVNIVKKTEVQTGGFSKESILPKRNSDKLIARKKDWDPKKYGGFDSPTVAYSVLVVAKVEKGKSKKLKSVKELLGITIMERSSFEKNPIDFLEAKGYKEVKKDLIIKLPKYSLFELENGRKRMLASAGELQKGNELALPSKYVNFLYLASHYEKLKGSPEDNEQKQLFVEQHKHYLDEIIEQISEFSKRVILADANLDKVLSAYNKHRDKPIREQAENIIHLFTLTNLGAPAAFKYFDTTIDRKRYTSTKEVLDATLIHQSITGLYETRIDLSQLGGDGGGSSPAPGGLGIEDEYRLHETSTEPDVSLGSTWLSDFPQAWAETGGMGLAVRQAPLIIPLKATSTPVSIQQYPMSHEARLGIKPHIQRLLDQGILVPCQSPWNTPLLPVKKPGTNDYRPVQDLREVNKRVEDIHPTVPNPYNLLSGLPPSHQWYTVLDLKDAFFCLRLHPTSQPLFAFEWRDPGMGISGQLTWTRLPQGFKNSPTLFNEALHRDLADFRIQHPDLILLQYVDDILLAATSELDCQQGTRALLQTLGDLGYRASAKKAQICQKQVKYLGYLLREGQRWLTEARKETVMGQPVPKTPRQLREFLGKAGFCRLFIPGFAEMAAPLYPLTKPGTLFSWGPDQQKAYQEIKQALLTAPALGLPDLTKPFELFVDEKQGYAKGVLTQKLGPWRRPVAYLSKKLDPVAAGWPPCLRMVAAIAVLTKDAGKLTMGQPLVILAPHAVEALVKQPPDRWLSNARMTHYQAMLLDTDRVQFGPVVALNPATLLPLPEEGAPHDCLEILAETHGTRPDLTDQPIPDADHTWYTDGSSFLQEGQRKAGAAVTTETEVIWAGALPAGTSAQRAELIALTQALKMAEGKRLNVYTDSRYAFATAHIHGEIYRRRGWLTSEGREIKNKSEILALLKALFLPKRLSIIHCLGHQKGDSAEARGNRLADQAAREAAIKTPPDTSTLLIAGKRTADGSEFEKRTADGSEFESPKKKAKVE

SEQ ID NO: 2125 - protein, 2090 aa, synthetic construct
MPAAKRVKLDGGDKKYSIGLDIGTNSVGWAVITDEYKVPSKKFKVLGNTDRHSIKKNLIGALLFDSGETAEATRLKRTARRRYTRRKNRICYLQEIFSNEMAKVDDSFFHRLEESFLVEEDKKHERHPIFGNIVDEVAYHEKYPTIYHLRKKLVDSTDKADLRLIYLALAHMIKFRGHFLIEGDLNPDNSDVDKLFIQLVQTYNQLFEENPINASGVDAKAILSARLSKSRRLENLIAQLPGEKKNGLFGNLIALSLGLTPNFKSNFDLAEDAKLQLSKDTYDDDLDNLLAQIGDQYADLFLAAKNLSDAILLSDILRVNTEITKAPLSASMIKRYDEHHQDLTLLKALVRQQLPEKYKEIFFDQSKNGYAGYIDGGASQEEFYKFIKPILEKMDGTEELLVKLNREDLLRKQRTFDNGSIPHQIHLGELHAILRRQEDFYPFLKDNREKIEKILTFRIPYYVGPLARGNSRFAWMTRKSEETITPWNFEEVVDKGASAQSFIERMTNFDKNLPNEKVLPKHSLLYEYFTVYNELTKVKYVTEGMRKPAFLSGEQKKAIVDLLFKTNRKVTVKQLKEDYFKKIECFDSVEISGVEDRFNASLGTYHDLLKIIKDKDFLDNEENEDILEDIVLTLTLFEDREMIEERLKTYAHLFDDKVMKQLKRRRYTGWGRLSRKLINGIRDKQSGKTILDFLKSDGFANRNFMQLIHDDSLTFKEDIQKAQVSGQGDSLHEHIANLAGSPAIKKGILQTVKVVDELVKVMGRHKPENIVIEMARENQTTQKGQKNSRERMKRIEEGIKELGSQILKEHPVENTQLQNEKLYLYYLQNGRDMYVDQELDINRLSDYDVDHIVPQSFLKDDSIDNKVLTRSDKARGKSDNVPSEEVVKKMKNYWRQLLNAKLITQRKFDNLTKAERGGLSELDKAGFIKRQLVETRQITKHVAQILDSRMNTKYDENDKLIREVKVITLKSKLVSDFRKDFQFYKVREINNYHHAHDAYLNAVVGTALIKKYPKLESEFVYGDYKVYDVRKMIAKSEQEIGKATAKYFFYSNIMNFFKTEITLANGEIRKRPLIETNGETGEIVWDKGRDFATVRKVLSMPQVNIVKKTEVQTGGFSKESILPKRNSDKLIARKKDWDPKKYGGFDSPTVAYSVLVVAKVEKGKSKKLKSVKELLGITIMERSSFEKNPIDFLEAKGYKEVKKDLIIKLPKYSLFELENGRKRMLASAGELQKGNELALPSKYVNFLYLASHYEKLKGSPEDNEQKQLFVEQHKHYLDEIIEQISEFSKRVILADANLDKVLSAYNKHRDKPIREQAENIIHLFTLTNLGAPAAFKYFDTTIDRKRYTSTKEVLDATLIHQSITGLYETRIDLSQLGGDGGGGGGSGGLGIEDEYRLHETSTEPDVSLGSTWLSDFPQAWAETGGMGLAVRQAPLIIPLKATSTPVSIQQYPMSHEARLGIKPHIQRLLDQGILVPCQSPWNTPLLPVKKPGTNDYRPVQDLREVNKRVEDIHPTVPNPYNLLSGLPPSHQWYTVLDLKDAFFCLRLHPTSQPLFAFEWRDPGMGISGQLTWTRLPQGFKNSPTLFNEALHRDLADFRIQHPDLILLQYVDDILLAATSELDCQQGTRALLQTLGDLGYRASAKKAQICQKQVKYLGYLLREGQRWLTEARKETVMGQPVPKTPRQLREFLGKAGFCRLFIPGFAEMAAPLYPLTKPGTLFSWGPDQQKAYQEIKQALLTAPALGLPDLTKPFELFVDEKQGYAKGVLTQKLGPWRRPVAYLSKKLDPVAAGWPPCLRMVAAIAVLTKDAGKLTMGQPLVILAPHAVEALVKQPPDRWLSNARMTHYQAMLLDTDRVQFGPVVALNPATLLPLPEEGAPHDCLEILAETHGTRPDLTDQPIPDADHTWYTDGSSFLQEGQRKAGAAVTTETEVIWAGALPAGTSAQRAELIALTQALKMAEGKRLNVYTDSRYAFATAHIHGEIYRRRGWLTSEGREIKNKSEILALLKALFLPKRLSIIHCLGHQKGDSAEARGNRLADQAAREAAIKTPPDTSTLLIAGKRTADGSEFEKRTADGSEFESPKKKAKVE

SEQ ID NO: 2126 - protein, 2096 aa, synthetic construct; identical to SEQ ID NO: 2052

SEQ ID NO: 2127 - protein, 2091 aa, synthetic construct
MPAAKRVKLDGGDKKYSIGLDIGTNSVGWAVITDEYKVPSKKFKVLGNTDRHSIKKNLIGALLFDSGETAEATRLKRTARRRYTRRKNRICYLQEIFSNEMAKVDDSFFHRLEESFLVEEDKKHERHPIFGNIVDEVAYHEKYPTIYHLRKKLVDSTDKADLRLIYLALAHMIKFRGHFLIEGDLNPDNSDVDKLFIQLVQTYNQLFEENPINASGVDAKAILSARLSKSRRLENLIAQLPGEKKNGLFGNLIALSLGLTPNFKSNFDLAEDAKLQLSKDTYDDDLDNLLAQIGDQYADLFLAAKNLSDAILLSDILRVNTEITKAPLSASMIKRYDEHHQDLTLLKALVRQQLPEKYKEIFFDQSKNGYAGYIDGGASQEEFYKFIKPILEKMDGTEELLVKLNREDLLRKQRTFDNGSIPHQIHLGELHAILRRQEDFYPFLKDNREKIEKILTFRIPYYVGPLARGNSRFAWMTRKSEETITPWNFEEVVDKGASAQSFIERMTNFDKNLPNEKVLPKHSLLYEYFTVYNELTKVKYVTEGMRKPAFLSGEQKKAIVDLLFKTNRKVTVKQLKEDYFKKIECFDSVEISGVEDRFNASLGTYHDLLKIIKDKDFLDNEENEDILEDIVLTLTLFEDREMIEERLKTYAHLFDDKVMKQLKRRRYTGWGRLSRKLINGIRDKQSGKTILDFLKSDGFANRNFMQLIHDDSLTFKEDIQKAQVSGQGDSLHEHIANLAGSPAIKKGILQTVKVVDELVKVMGRHKPENIVIEMARENQTTQKGQKNSRERMKRIEEGIKELGSQILKEHPVENTQLQNEKLYLYYLQNGRDMYVDQELDINRLSDYDVDHIVPQSFLKDDSIDNKVLTRSDKARGKSDNVPSEEVVKKMKNYWRQLLNAKLITQRKFDNLTKAERGGLSELDKAGFIKRQLVETRQITKHVAQILDSRMNTKYDENDKLIREVKVITLKSKLVSDFRKDFQFYKVREINNYHHAHDAYLNAVVGTALIKKYPKLESEFVYGDYKVYDVRKMIAKSEQEIGKATAKYFFYSNIMNFFKTEITLANGEIRKRPLIETNGETGEIVWDKGRDFATVRKVLSMPQVNIVKKTEVQTGGFSKESILPKRNSDKLIARKKDWDPKKYGGFDSPTVAYSVLVVAKVEKGKSKKLKSVKELLGITIMERSSFEKNPIDFLEAKGYKEVKKDLIIKLPKYSLFELENGRKRMLASAGELQKGNELALPSKYVNFLYLASHYEKLKGSPEDNEQKQLFVEQHKHYLDEIIEQISEFSKRVILADANLDKVLSAYNKHRDKPIREQAENIIHLFTLTNLGAPAAFKYFDTTIDRKRYTSTKEVLDATLIHQSITGLYETRIDLSQLGGDGGGGGPAPGGLGIEDEYRLHETSTEPDVSLGSTWLSDFPQAWAETGGMGLAVRQAPLIIPLKATSTPVSIQQYPMSHEARLGIKPHIQRLLDQGILVPCQSPWNTPLLPVKKPGTNDYRPVQDLREVNKRVEDIHPTVPNPYNLLSGLPPSHQWYTVLDLKDAFFCLRLHPTSQPLFAFEWRDPGMGISGQLTWTRLPQGFKNSPTLFNEALHRDLADFRIQHPDLILLQYVDDILLAATSELDCQQGTRALLQTLGDLGYRASAKKAQICQKQVKYLGYLLREGQRWLTEARKETVMGQPVPKTPRQLREFLGKAGFCRLFIPGFAEMAAPLYPLTKPGTLFSWGPDQQKAYQEIKQALLTAPALGLPDLTKPFELFVDEKQGYAKGVLTQKLGPWRRPVAYLSKKLDPVAAGWPPCLRMVAAIAVLTKDAGKLTMGQPLVILAPHAVEALVKQPPDRWLSNARMTHYQAMLLDTDRVQFGPVVALNPATLLPLPEEGAPHDCLEILAETHGTRPDLTDQPIPDADHTWYTDGSSFLQEGQRKAGAAVTTETEVIWAGALPAGTSAQRAELIALTQALKMAEGKRLNVYTDSRYAFATAHIHGEIYRRRGWLTSEGREIKNKSEILALLKALFLPKRLSIIHCLGHQKGDSAEARGNRLADQAAREAAIKTPPDTSTLLIAGKRTADGSEFEKRTADGSEFESPKKKAKVE

SEQ ID NO: 2128 - protein, 2095 aa, synthetic construct
MPAAKRVKLDGGDKKYSIGLDIGTNSVGWAVITDEYKVPSKKFKVLGNTDRHSIKKNLIGALLFDSGETAEATRLKRTARRRYTRRKNRICYLQEIFSNEMAKVDDSFFHRLEESFLVEEDKKHERHPIFGNIVDEVAYHEKYPTIYHLRKKLVDSTDKADLRLIYLALAHMIKFRGHFLIEGDLNPDNSDVDKLFIQLVQTYNQLFEENPINASGVDAKAILSARLSKSRRLENLIAQLPGEKKNGLFGNLIALSLGLTPNFKSNFDLAEDAKLQLSKDTYDDDLDNLLAQIGDQYADLFLAAKNLSDAILLSDILRVNTEITKAPLSASMIKRYDEHHQDLTLLKALVRQQLPEKYKEIFFDQSKNGYAGYIDGGASQEEFYKFIKPILEKMDGTEELLVKLNREDLLRKQRTFDNGSIPHQIHLGELHAILRRQEDFYPFLKDNREKIEKILTFRIPYYVGPLARGNSRFAWMTRKSEETITPWNFEEVVDKGASAQSFIERMTNFDKNLPNEKVLPKHSLLYEYFTVYNELTKVKYVTEGMRKPAFLSGEQKKAIVDLLFKTNRKVTVKQLKEDYFKKIECFDSVEISGVEDRFNASLGTYHDLLKIIKDKDFLDNEENEDILEDIVLTLTLFEDREMIEERLKTYAHLFDDKVMKQLKRRRYTGWGRLSRKLINGIRDKQSGKTILDFLKSDGFANRNFMQLIHDDSLTFKEDIQKAQVSGQGDSLHEHIANLAGSPAIKKGILQTVKVVDELVKVMGRHKPENIVIEMARENQTTQKGQKNSRERMKRIEEGIKELGSQILKEHPVENTQLQNEKLYLYYLQNGRDMYVDQELDINRLSDYDVDHIVPQSFLKDDSIDNKVLTRSDKARGKSDNVPSEEVVKKMKNYWRQLLNAKLITQRKFDNLTKAERGGLSELDKAGFIKRQLVETRQITKHVAQILDSRMNTKYDENDKLIREVKVITLKSKLVSDFRKDFQFYKVREINNYHHAHDAYLNAVVGTALIKKYPKLESEFVYGDYKVYDVRKMIAKSEQEIGKATAKYFFYSNIMNFFKTEITLANGEIRKRPLIETNGETGEIVWDKGRDFATVRKVLSMPQVNIVKKTEVQTGGFSKESILPKRNSDKLIARKKDWDPKKYGGFDSPTVAYSVLVVAKVEKGKSKKLKSVKELLGITIMERSSFEKNPIDFLEAKGYKEVKKDLIIKLPKYSLFELENGRKRMLASAGELQKGNELALPSKYVNFLYLASHYEKLKGSPEDNEQKQLFVEQHKHYLDEIIEQISEFSKRVILADANLDKVLSAYNKHRDKPIREQAENIIHLFTLTNLGAPAAFKYFDTTIDRKRYTSTKEVLDATLIHQSITGLYETRIDLSQLGGDGGEAAAKEAAAKGGLGIEDEYRLHETSTEPDVSLGSTWLSDFPQAWAETGGMGLAVRQAPLIIPLKATSTPVSIQQYPMSHEARLGIKPHIQRLLDQGILVPCQSPWNTPLLPVKKPGTNDYRPVQDLREVNKRVEDIHPTVPNPYNLLSGLPPSHQWYTVLDLKDAFFCLRLHPTSQPLFAFEWRDPGMGISGQLTWTRLPQGFKNSPTLFNEALHRDLADFRIQHPDLILLQYVDDILLAATSELDCQQGTRALLQTLGDLGYRASAKKAQICQKQVKYLGYLLREGQRWLTEARKETVMGQPVPKTPRQLREFLGKAGFCRLFIPGFAEMAAPLYPLTKPGTLFSWGPDQQKAYQEIKQALLTAPALGLPDLTKPFELFVDEKQGYAKGVLTQKLGPWRRPVAYLSKKLDPVAAGWPPCLRMVAAIAVLTKDAGKLTMGQPLVILAPHAVEALVKQPPDRWLSNARMTHYQAMLLDTDRVQFGPVVALNPATLLPLPEEGAPHDCLEILAETHGTRPDLTDQPIPDADHTWYTDGSSFLQEGQRKAGAAVTTETEVIWAGALPAGTSAQRAELIALTQALKMAEGKRLNVYTDSRYAFATAHIHGEIYRRRGWLTSEGREIKNKSEILALLKALFLPKRLSIIHCLGHQKGDSAEARGNRLADQAAREAAIKTPPDTSTLLIAGKRTADGSEFEKRTADGSEFESPKKKAKVE

SEQ ID NO: 2129 - protein, 2096 aa, synthetic construct; identical to SEQ ID NO: 2059

SEQ ID NO: 2130 - protein, 2096 aa, synthetic construct
MPAAKRVKLDGGDKKYSIGLDIGTNSVGWAVITDEYKVPSKKFKVLGNTDRHSIKKNLIGALLFDSGETAEATRLKRTARRRYTRRKNRICYLQEIFSNEMAKVDDSFFHRLEESFLVEEDKKHERHPIFGNIVDEVAYHEKYPTIYHLRKKLVDSTDKADLRLIYLALAHMIKFRGHFLIEGDLNPDNSDVDKLFIQLVQTYNQLFEENPINASGVDAKAILSARLSKSRRLENLIAQLPGEKKNGLFGNLIALSLGLTPNFKSNFDLAEDAKLQLSKDTYDDDLDNLLAQIGDQYADLFLAAKNLSDAILLSDILRVNTEITKAPLSASMIKRYDEHHQDLTLLKALVRQQLPEKYKEIFFDQSKNGYAGYIDGGASQEEFYKFIKPILEKMDGTEELLVKLNREDLLRKQRTFDNGSIPHQIHLGELHAILRRQEDFYPFLKDNREKIEKILTFRIPYYVGPLARGNSRFAWMTRKSEETITPWNFEEVVDKGASAQSFIERMTNFDKNLPNEKVLPKHSLLYEYFTVYNELTKVKYVTEGMRKPAFLSGEQKKAIVDLLFKTNRKVTVKQLKEDYFKKIECFDSVEISGVEDRFNASLGTYHDLLKIIKDKDFLDNEENEDILEDIVLTLTLFEDREMIEERLKTYAHLFDDKVMKQLKRRRYTGWGRLSRKLINGIRDKQSGKTILDFLKSDGFANRNFMQLIHDDSLTFKEDIQKAQVSGQGDSLHEHIANLAGSPAIKKGILQTVKVVDELVKVMGRHKPENIVIEMARENQTTQKGQKNSRERMKRIEEGIKELGSQILKEHPVENTQLQNEKLYLYYLQNGRDMYVDQELDINRLSDYDVDHIVPQSFLKDDSIDNKVLTRSDKARGKSDNVPSEEVVKKMKNYWRQLLNAKLITQRKFDNLTKAERGGLSELDKAGFIKRQLVETRQITKHVAQILDSRMNTKYDENDKLIREVKVITLKSKLVSDFRKDFQFYKVREINNYHHAHDAYLNAVVGTALIKKYPKLESEFVYGDYKVYDVRKMIAKSEQEIGKATAKYFFYSNIMNFFKTEITLANGEIRKRPLIETNGETGEIVWDKGRDFATVRKVLSMPQVNIVKKTEVQTGGFSKESILPKRNSDKLIARKKDWDPKKYGGFDSPTVAYSVLVVAKVEKGKSKKLKSVKELLGITIMERSSFEKNPIDFLEAKGYKEVKKDLIIKLPKYSLFELENGRKRMLASAGELQKGNELALPSKYVNFLYLASHYEKLKGSPEDNEQKQLFVEQHKHYLDEIIEQISEFSKRVILADANLDKVLSAYNKHRDKPIREQAENIIHLFTLTNLGAPAAFKYFDTTIDRKRYTSTKEVLDATLIHQSITGLYETRIDLSQLGGDGGEAAAKPAPGGGGGLGIEDEYRLHETSTEPDVSLGSTWLSDFPQAWAETGGMGLAVRQAPLIIPLKATSTPVSIQQYPMSHEARLGIKPHIQRLLDQGILVPCQSPWNTPLLPVKKPGTNDYRPVQDLREVNKRVEDIHPTVPNPYNLLSGLPPSHQWYTVLDLKDAFFCLRLHPTSQPLFAFEWRDPGMGISGQLTWTRLPQGFKNSPTLFNEALHRDLADFRIQHPDLILLQYVDDILLAATSELDCQQGTRALLQTLGDLGYRASAKKAQICQKQVKYLGYLLREGQRWLTEARKETVMGQPVPKTPRQLREFLGKAGFCRLFIPGFAEMAAPLYPLTKPGTLFSWGPDQQKAYQEIKQALLTAPALGLPDLTKPFELFVDEKQGYAKGVLTQKLGPWRRPVAYLSKKLDPVAAGWPPCLRMVAAIAVLTKDAGKLTMGQPLVILAPHAVEALVKQPPDRWLSNARMTHYQAMLLDTDRVQFGPVVALNPATLLPLPEEGAPHDCLEILAETHGTRPDLTDQPIPDADHTWYTDGSSFLQEGQRKAGAAVTTETEVIWAGALPAGTSAQRAELIALTQALKMAEGKRLNVYTDSRYAFATAHIHGEIYRRRGWLTSEGREIKNKSEILALLKALFLPKRLSIIHCLGHQKGDSAEARGNRLADQAAREAAIKTPPDTSTLLIAGKRTADGSEFEKRTADGSEFESPKKKAKVE

SEQ ID NO: 2131 - protein, 2088 aa, synthetic construct
MPAAKRVKLDGGDKKYSIGLDIGTNSVGWAVITDEYKVPSKKFKVLGNTDRHSIKKNLIGALLFDSGETAEATRLKRTARRRYTRRKNRICYLQEIFSNEMAKVDDSFFHRLEESFLVEEDKKHERHPIFGNIVDEVAYHEKYPTIYHLRKKLVDSTDKADLRLIYLALAHMIKFRGHFLIEGDLNPDNSDVDKLFIQLVQTYNQLFEENPINASGVDAKAILSARLSKSRRLENLIAQLPGEKKNGLFGNLIALSLGLTPNFKSNFDLAEDAKLQLSKDTYDDDLDNLLAQIGDQYADLFLAAKNLSDAILLSDILRVNTEITKAPLSASMIKRYDEHHQDLTLLKALVRQQLPEKYKEIFFDQSKNGYAGYIDGGASQEEFYKFIKPILEKMDGTEELLVKLNREDLLRKQRTFDNGSIPHQIHLGELHAILRRQEDFYPFLKDNREKIEKILTFRIPYYVGPLARGNSRFAWMTRKSEETITPWNFEEVVDKGASAQSFIERMTNFDKNLPNEKVLPKHSLLYEYFTVYNELTKVKYVTEGMRKPAFLSGEQKKAIVDLLFKTNRKVTVKQLKEDYFKKIECFDSVEISGVEDRFNASLGTYHDLLKIIKDKDFLDNEENEDILEDIVLTLTLFEDREMIEERLKTYAHLFDDKVMKQLKRRRYTGWGRLSRKLINGIRDKQSGKTILDFLKSDGFANRNFMQLIHDDSLTFKEDIQKAQVSGQGDSLHEHIANLAGSPAIKKGILQTVKVVDELVKVMGRHKPENIVIEMARENQTTQKGQKNSRERMKRIEEGIKELGSQILKEHPVENTQLQNEKLYLYYLQNGRDMYVDQELDINRLSDYDVDHIVPQSFLKDDSIDNKVLTRSDKARGKSDNVPSEEVVKKMKNYWRQLLNAKLITQRKFDNLTKAERGGLSELDKAGFIKRQLVETRQITKHVAQILDSRMNTKYDENDKLIREVKVITLKSKLVSDFRKDFQFYKVREINNYHHAHDAYLNAVVGTALIKKYPKLESEFVYGDYKVYDVRKMIAKSEQEIGKATAKYFFYSNIMNFFKTEITLANGEIRKRPLIETNGETGEIVWDKGRDFATVRKVLSMPQVNIVKKTEVQTGGFSKESILPKRNSDKLIARKKDWDPKKYGGFDSPTVAYSVLVVAKVEKGKSKKLKSVKELLGITIMERSSFEKNPIDFLEAKGYKEVKKDLIIKLPKYSLFELENGRKRMLASAGELQKGNELALPSKYVNFLYLASHYEKLKGSPEDNEQKQLFVEQHKHYLDEIIEQISEFSKRVILADANLDKVLSAYNKHRDKPIREQAENIIHLFTLTNLGAPAAFKYFDTTIDRKRYTSTKEVLDATLIHQSITGLYETRIDLSQLGGDGGGGSGGLGIEDEYRLHETSTEPDVSLGSTWLSDFPQAWAETGGMGLAVRQAPLIIPLKATSTPVSIQQYPMSHEARLGIKPHIQRLLDQGILVPCQSPWNTPLLPVKKPGTNDYRPVQDLREVNKRVEDIHPTVPNPYNLLSGLPPSHQWYTVLDLKDAFFCLRLHPTSQPLFAFEWRDPGMGISGQLTWTRLPQGFKNSPTLFNEALHRDLADFRIQHPDLILLQYVDDILLAATSELDCQQGTRALLQTLGDLGYRASAKKAQICQKQVKYLGYLLREGQRWLTEARKETVMGQPVPKTPRQLREFLGKAGFCRLFIPGFAEMAAPLYPLTKPGTLFSWGPDQQKAYQEIKQALLTAPALGLPDLTKPFELFVDEKQGYAKGVLTQKLGPWRRPVAYLSKKLDPVAAGWPPCLRMVAAIAVLTKDAGKLTMGQPLVILAPHAVEALVKQPPDRWLSNARMTHYQAMLLDTDRVQFGPVVALNPATLLPLPEEGAPHDCLEILAETHGTRPDLTDQPIPDADHTWYTDGSSFLQEGQRKAGAAVTTETEVIWAGALPAGTSAQRAELIALTQALKMAEGKRLNVYTDSRYAFATAHIHGEIYRRRGWLTSEGREIKNKSEILALLKALFLPKRLSIIHCLGHQKGDSAEARGNRLADQAAREAAIKTPPDTSTLLIAGKRTADGSEFEKRTADGSEFESPKKKAKVE

SEQ ID NO: 2132 - protein, 2096 aa, synthetic construct
MPAAKRVKLDGGDKKYSIGLDIGTNSVGWAVITDEYKVPSKKFKVLGNTDRHSIKKNLIGALLFDSGETAEATRLKRTARRRYTRRKNRICYLQEIFSNEMAKVDDSFFHRLEESFLVEEDKKHERHPIFGNIVDEVAYHEKYPTIYHLRKKLVDSTDKADLRLIYLALAHMIKFRGHFLIEGDLNPDNSDVDKLFIQLVQTYNQLFEENPINASGVDAKAILSARLSKSRRLENLIAQLPGEKKNGLFGNLIALSLGLTPNFKSNFDLAEDAKLQLSKDTYDDDLDNLLAQIGDQYADLFLAAKNLSDAILLSDILRVNTEITKAPLSASMIKRYDEHHQDLTLLKALVRQQLPEKYKEIFFDQSKNGYAGYIDGGASQEEFYKFIKPILEKMDGTEELLVKLNREDLLRKQRTFDNGSIPHQIHLGELHAILRRQEDFYPFLKDNREKIEKILTFRIPYYVGPLARGNSRFAWMTRKSEETITPWNFEEVVDKGASAQSFIERMTNFDKNLPNEKVLPKHSLLYEYFTVYNELTKVKYVTEGMRKPAFLSGEQKKAIVDLLFKTNRKVTVKQLKEDYFKKIECFDSVEISGVEDRFNASLGTYHDLLKIIKDKDFLDNEENEDILEDIVLTLTLFEDREMIEERLKTYAHLFDDKVMKQLKRRRYTGWGRLSRKLINGIRDKQSGKTILDFLKSDGFANRNFMQLIHDDSLTFKEDIQKAQVSGQGDSLHEHIANLAGSPAIKKGILQTVKVVDELVKVMGRHKPENIVIEMARENQTTQKGQKNSRERMKRIEEGIKELGSQILKEHPVENTQLQNEKLYLYYLQNGRDMYVDQELDINRLSDYDVDHIVPQSFLKDDSIDNKVLTRSDKARGKSDNVPSEEVVKKMKNYWRQLLNAKLITQRKFDNLTKAERGGLSELDKAGFIKRQLVETRQITKHVAQILDSRMNTKYDENDKLIREVKVITLKSKLVSDFRKDFQFYKVREINNYHHAHDAYLNAVVGTALIKKYPKLESEFVYGDYKVYDVRKMIAKSEQEIGKATAKYFFYSNIMNFFKTEITLANGEIRKRPLIETNGETGEIVWDKGRDFATVRKVLSMPQVNIVKKTEVQTGGFSKESILPKRNSDKLIARKKDWDPKKYGGFDSPTVAYSVLVVAKVEKGKSKKLKSVKELLGITIMERSSFEKNPIDFLEAKGYKEVKKDLIIKLPKYSLFELENGRKRMLASAGELQKGNELALPSKYVNFLYLASHYEKLKGSPEDNEQKQLFVEQHKHYLDEIIEQISEFSKRVILADANLDKVLSAYNKHRDKPIREQAENIIHLFTLTNLGAPAAFKYFDTTIDRKRYTSTKEVLDATLIHQSITGLYETRIDLSQLGGDGGGGGEAAAKGGSGGLGIEDEYRLHETSTEPDVSLGSTWLSDFPQAWAETGGMGLAVRQAPLIIPLKATSTPVSIQQYPMSHEARLGIKPHIQRLLDQGILVPCQSPWNTPLLPVKKPGTNDYRPVQDLREVNKRVEDIHPTVPNPYNLLSGLPPSHQWYTVLDLKDAFFCLRLHPTSQPLFAFEWRDPGMGISGQLTWTRLPQGFKNSPTLFNEALHRDLADFRIQHPDLILLQYVDDILLAATSELDCQQGTRALLQTLGDLGYRASAKKAQICQKQVKYLGYLLREGQRWLTEARKETVMGQPVPKTPRQLREFLGKAGFCRLFIPGFAEMAAPLYPLTKPGTLFSWGPDQQKAYQEIKQALLTAPALGLPDLTKPFELFVDEKQGYAKGVLTQKLGPWRRPVAYLSKKLDPVAAGWPPCLRMVAAIAVLTKDAGKLTMGQPLVILAPHAVEALVKQPPDRWLSNARMTHYQAMLLDTDRVQFGPVVALNPATLLPLPEEGAPHDCLEILAETHGTRPDLTDQPIPDADHTWYTDGSSFLQEGQRKAGAAVTTETEVIWAGALPAGTSAQRAELIALTQALKMAEGKRLNVYTDSRYAFATAHIHGEIYRRRGWLTSEGREIKNKSEILALLKALFLPKRLSIIHCLGHQKGDSAEARGNRLADQAAREAAIKTPPDTSTLLIAGKRTADGSEFEKRTADGSEFESPKKKAKVE

SEQ ID NO: 2133 - protein, 2094 aa, synthetic construct
MPAAKRVKLDGGDKKYSIGLDIGTNSVGWAVITDEYKVPSKKFKVLGNTDRHSIKKNLIGALLFDSGETAEATRLKRTARRRYTRRKNRICYLQEIFSNEMAKVDDSFFHRLEESFLVEEDKKHERHPIFGNIVDEVAYHEKYPTIYHLRKKLVDSTDKADLRLIYLALAHMIKFRGHFLIEGDLNPDNSDVDKLFIQLVQTYNQLFEENPINASGVDAKAILSARLSKSRRLENLIAQLPGEKKNGLFGNLIALSLGLTPNFKSNFDLAEDAKLQLSKDTYDDDLDNLLAQIGDQYADLFLAAKNLSDAILLSDILRVNTEITKAPLSASMIKRYDEHHQDLTLLKALVRQQLPEKYKEIFFDQSKNGYAGYIDGGASQEEFYKFIKPILEKMDGTEELLVKLNREDLLRKQRTFDNGSIPHQIHLGELHAILRRQEDFYPFLKDNREKIEKILTFRIPYYVGPLARGNSRFAWMTRKSEETITPWNFEEVVDKGASAQSFIERMTNFDKNLPNEKVLPKHSLLYEYFTVYNELTKVKYVTEGMRKPAFLSGEQKKAIVDLLFKTNRKVTVKQLKEDYFKKIECFDSVEISGVEDRFNASLGTYHDLLKIIKDKDFLDNEENEDILEDIVLTLTLFEDREMIEERLKTYAHLFDDKVMKQLKRRRYTGWGRLSRKLINGIRDKQSGKTILDFLKSDGFANRNFMQLIHDDSLTFKEDIQKAQVSGQGDSLHEHIANLAGSPAIKKGILQTVKVVDELVKVMGRHKPENIVIEMARENQTTQKGQKNSRERMKRIEEGIKELGSQILKEHPVENTQLQNEKLYLYYLQNGRDMYVDQELDINRLSDYDVDHIVPQSFLKDDSIDNKVLTRSDKARGKSDNVPSEEVVKKMKNYWRQLLNAKLITQRKFDNLTKAERGGLSELDKAGFIKRQLVETRQITKHVAQILDSRMNTKYDENDKLIREVKVITLKSKLVSDFRKDFQFYKVREINNYHHAHDAYLNAVVGTALIKKYPKLESEFVYGDYKVYDVRKMIAKSEQEIGKATAKYFFYSNIMNFFKTEITLANGEIRKRPLIETNGETGEIVWDKGRDFATVRKVLSMPQVNIVKKTEVQTGGFSKESILPKRNSDKLIARKKDWDPKKYGGFDSPTVAYSVLVVAKVEKGKSKKLKSVKELLGITIMERSSFEKNPIDFLEAKGYKEVKKDLIIKLPKYSLFELENGRKRMLASAGELQKGNELALPSKYVNFLYLASHYEKLKGSPEDNEQKQLFVEQHKHYLDEIIEQISEFSKRVILADANLDKVLSAYNKHRDKPIREQAENIIHLFTLTNLGAPAAFKYFDTTIDRKRYTSTKEVLDATLIHQSITGLYETRIDLSQLGGDGGGGGGGSPAPGGLGIEDEYRLHETSTEPDVSLGSTWLSDFPQAWAETGGMGLAVRQAPLIIPLKATSTPVSIQQYPMSHEARLGIKPHIQRLLDQGILVPCQSPWNTPLLPVKKPGTNDYRPVQDLREVNKRVEDIHPTVPNPYNLLSGLPPSHQWYTVLDLKDAFFCLRLHPTSQPLFAFEWRDPGMGISGQLTWTRLPQGFKNSPTLFNEALHRDLADFRIQHPDLILLQYVDDILLAATSELDCQQGTRALLQTLGDLGYRASAKKAQICQKQVKYLGYLLREGQRWLTEARKETVMGQPVPKTPRQLREFLGKAGFCRLFIPGFAEMAAPLYPLTKPGTLFSWGPDQQKAYQEIKQALLTAPALGLPDLTKPFELFVDEKQGYAKGVLTQKLGPWRRPVAYLSKKLDPVAAGWPPCLRMVAAIAVLTKDAGKLTMGQPLVILAPHAVEALVKQPPDRWLSNARMTHYQAMLLDTDRVQFGPVVALNPATLLPLPEEGAPHDCLEILAETHGTRPDLTDQPIPDADHTWYTDGSSFLQEGQRKAGAAVTTETEVIWAGALPAGTSAQRAELIALTQALKMAEGKRLNVYTDSRYAFATAHIHGEIYRRRGWLTSEGREIKNKSEILALLKALFLPKRLSIIHCLGHQKGDSAEARGNRLADQAAREAAIKTPPDTSTLLIAGKRTADGSEFEKRTADGSEFESPKKKAKVE

SEQ ID NO: 2134 - protein, 2091 aa, synthetic construct
MPAAKRVKLDGGDKKYSIGLDIGTNSVGWAVITDEYKVPSKKFKVLGNTDRHSIKKNLIGALLFDSGETAEATRLKRTARRRYTRRKNRICYLQEIFSNEMAKVDDSFFHRLEESFLVEEDKKHERHPIFGNIVDEVAYHEKYPTIYHLRKKLVDSTDKADLRLIYLALAHMIKFRGHFLIEGDLNPDNSDVDKLFIQLVQTYNQLFEENPINASGVDAKAILSARLSKSRRLENLIAQLPGEKKNGLFGNLIALSLGLTPNFKSNFDLAEDAKLQLSKDTYDDDLDNLLAQIGDQYADLFLAAKNLSDAILLSDILRVNTEITKAPLSASMIKRYDEHHQDLTLLKALVRQQLPEKYKEIFFDQSKNGYAGYIDGGASQEEFYKFIKPILEKMDGTEELLVKLNREDLLRKQRTFDNGSIPHQIHLGELHAILRRQEDFYPFLKDNREKIEKILTFRIPYYVGPLARGNSRFAWMTRKSEETITPWNFEEVVDKGASAQSFIERMTNFDKNLPNEKVLPKHSLLYEYFTVYNELTKVKYVTEGMRKPAFLSGEQKKAIVDLLFKTNRKVTVKQLKEDYFKKIECFDSVEISGVEDRFNASLGTYHDLLKIIKDKDFLDNEENEDILEDIVLTLTLFEDREMIEERLKTYAHLFDDKVMKQLKRRRYTGWGRLSRKLINGIRDKQSGKTILDFLKSDGFANRNFMQLIHDDSLTFKEDIQKAQVSGQGDSLHEHIANLAGSPAIKKGILQTVKVVDELVKVMGRHKPENIVIEMARENQTTQKGQKNSRERMKRIEEGIKELGSQILKEHPVENTQLQNEKLYLYYLQNGRDMYVDQELDINRLSDYDVDHIVPQSFLKDDSIDNKVLTRSDKARGKSDNVPSEEVVKKMKNYWRQLLNAKLITQRKFDNLTKAERGGLSELDKAGFIKRQLVETRQITKHVAQILDSRMNTKYDENDKLIREVKVITLKSKLVSDFRKDFQFYKVREINNYHHAHDAYLNAVVGTALIKKYPKLESEFVYGDYKVYDVRKMIAKSEQEIGKATAKYFFYSNIMNFFKTEITLANGEIRKRPLIETNGETGEIVWDKGRDFATVRKVLSMPQVNIVKKTEVQTGGFSKESILPKRNSDKLIARKKDWDPKKYGGFDSPTVAYSVLVVAKVEKGKSKKLKSVKELLGITIMERSSFEKNPIDFLEAKGYKEVKKDLIIKLPKYSLFELENGRKRMLASAGELQKGNELALPSKYVNFLYLASHYEKLKGSPEDNEQKQLFVEQHKHYLDEIIEQISEFSKRVILADANLDKVLSAYNKHRDKPIREQAENIIHLFTLTNLGAPAAFKYFDTTIDRKRYTSTKEVLDATLIHQSITGLYETRIDLSQLGGDGGPAPGGGGGLGIEDEYRLHETSTEPDVSLGSTWLSDFPQAWAETGGMGLAVRQAPLIIPLKATSTPVSIQQYPMSHEARLGIKPHIQRLLDQGILVPCQSPWNTPLLPVKKPGTNDYRPVQDLREVNKRVEDIHPTVPNPYNLLSGLPPSHQWYTVLDLKDAFFCLRLHPTSQPLFAFEWRDPGMGISGQLTWTRLPQGFKNSPTLFNEALHRDLADFRIQHPDLILLQYVDDILLAATSELDCQQGTRALLQTLGDLGYRASAKKAQICQKQVKYLGYLLREGQRWLTEARKETVMGQPVPKTPRQLREFLGKAGFCRLFIPGFAEMAAPLYPLTKPGTLFSWGPDQQKAYQEIKQALLTAPALGLPDLTKPFELFVDEKQGYAKGVLTQKLGPWRRPVAYLSKKLDPVAAGWPPCLRMVAAIAVLTKDAGKLTMGQPLVILAPHAVEALVKQPPDRWLSNARMTHYQAMLLDTDRVQFGPVVALNPATLLPLPEEGAPHDCLEILAETHGTRPDLTDQPIPDADHTWYTDGSSFLQEGQRKAGAAVTTETEVIWAGALPAGTSAQRAELIALTQALKMAEGKRLNVYTDSRYAFATAHIHGEIYRRRGWLTSEGREIKNKSEILALLKALFLPKRLSIIHCLGHQKGDSAEARGNRLADQAAREAAIKTPPDTSTLLIAGKRTADGSEFEKRTADGSEFESPKKKAKVE

SEQ ID NO: 2135 - protein, 2096 aa, synthetic construct
MPAAKRVKLDGGDKKYSIGLDIGTNSVGWAVITDEYKVPSKKFKVLGNTDRHSIKKNLIGALLFDSGETAEATRLKRTARRRYTRRKNRICYLQEIFSNEMAKVDDSFFHRLEESFLVEEDKKHERHPIFGNIVDEVAYHEKYPTIYHLRKKLVDSTDKADLRLIYLALAHMIKFRGHFLIEGDLNPDNSDVDKLFIQLVQTYNQLFEENPINASGVDAKAILSARLSKSRRLENLIAQLPGEKKNGLFGNLIALSLGLTPNFKSNFDLAEDAKLQLSKDTYDDDLDNLLAQIGDQYADLFLAAKNLSDAILLSDILRVNTEITKAPLSASMIKRYDEHHQDLTLLKALVRQQLPEKYKEIFFDQSKNGYAGYIDGGASQEEFYKFIKPILEKMDGTEELLVKLNREDLLRKQRTFDNGSIPHQIHLGELHAILRRQEDFYPFLKDNREKIEKILTFRIPYYVGPLARGNSRFAWMTRKSEETITPWNFEEVVDKGASAQSFIERMTNFDKNLPNEKVLPKHSLLYEYFTVYNELTKVKYVTEGMRKPAFLSGEQKKAIVDLLFKTNRKVTVKQLKEDYFKKIECFDSVEISGVEDRFNASLGTYHDLLKIIKDKDFLDNEENEDILEDIVLTLTLFEDREMIEERLKTYAHLFDDKVMKQLKRRRYTGWGRLSRKLINGIRDKQSGKTILDFLKSDGFANRNFMQLIHDDSLTFKEDIQKAQVSGQGDSLHEHIANLAGSPAIKKGILQTVKVVDELVKVMGRHKPENIVIEMARENQTTQKGQKNSRERMKRIEEGIKELGSQILKEHPVENTQLQNEKLYLYYLQNGRDMYVDQELDINRLSDYDVDHIVPQSFLKDDSIDNKVLTRSDKARGKSDNVPSEEVVKKMKNYWRQLLNAKLITQRKFDNLTKAERGGLSELDKAGFIKRQLVETRQITKHVAQILDSRMNTKYDENDKLIREVKVITLKSKLVSDFRKDFQFYKVREINNYHHAHDAYLNAVVGTALIKKYPKLESEFVYGDYKVYDVRKMIAKSEQEIGKATAKYFFYSNIMNFFKTEITLANGEIRKRPLIETNGETGEIVWDKGRDFATVRKVLSMPQVNIVKKTEVQTGGFSKESILPKRNSDKLIARKKDWDPKKYGGFDSPTVAYSVLVVAKVEKGKSKKLKSVKELLGITIMERSSFEKNPIDFLEAKGYKEVKKDLIIKLPKYSLFELENGRKRMLASAGELQKGNELALPSKYVNFLYLASHYEKLKGSPEDNEQKQLFVEQHKHYLDEIIEQISEFSKRVILADANLDKVLSAYNKHRDKPIREQAENIIHLFTLTNLGAPAAFKYFDTTIDRKRYTSTKEVLDATLIHQSITGLYETRIDLSQLGGDGGGGGEAAAKPAPGGLGIEDEYRLHETSTEPDVSLGSTWLSDFPQAWAETGGMGLAVRQAPLIIPLKATSTPVSIQQYPMSHEARLGIKPHIQRLLDQGILVPCQSPWNTPLLPVKKPGTNDYRPVQDLREVNKRVEDIHPTVPNPYNLLSGLPPSHQWYTVLDLKDAFFCLRLHPTSQPLFAFEWRDPGMGISGQLTWTRLPQGFKNSPTLFNEALHRDLADFRIQHPDLILLQYVDDILLAATSELDCQQGTRALLQTLGDLGYRASAKKAQICQKQVKYLGYLLREGQRWLTEARKETVMGQPVPKTPRQLREFLGKAGFCRLFIPGFAEMAAPLYPLTKPGTLFSWGPDQQKAYQEIKQALLTAPALGLPDLTKPFELFVDEKQGYAKGVLTQKLGPWRRPVAYLSKKLDPVAAGWPPCLRMVAAIAVLTKDAGKLTMGQPLVILAPHAVEALVKQPPDRWLSNARMTHYQAMLLDTDRVQFGPVVALNPATLLPLPEEGAPHDCLEILAETHGTRPDLTDQPIPDADHTWYTDGSSFLQEGQRKAGAAVTTETEVIWAGALPAGTSAQRAELIALTQALKMAEGKRLNVYTDSRYAFATAHIHGEIYRRRGWLTSEGREIKNKSEILALLKALFLPKRLSIIHCLGHQKGDSAEARGNRLADQAAREAAIKTPPDTSTLLIAGKRTADGSEFEKRTADGSEFESPKKKAKVE

SEQ ID NO: 2136 - protein, 2091 aa, synthetic construct
MPAAKRVKLDGGDKKYSIGLDIGTNSVGWAVITDEYKVPSKKFKVLGNTDRHSIKKNLIGALLFDSGETAEATRLKRTARRRYTRRKNRICYLQEIFSNEMAKVDDSFFHRLEESFLVEEDKKHERHPIFGNIVDEVAYHEKYPTIYHLRKKLVDSTDKADLRLIYLALAHMIKFRGHFLIEGDLNPDNSDVDKLFIQLVQTYNQLFEENPINASGVDAKAILSARLSKSRRLENLIAQLPGEKKNGLFGNLIALSLGLTPNFKSNFDLAEDAKLQLSKDTYDDDLDNLLAQIGDQYADLFLAAKNLSDAILLSDILRVNTEITKAPLSASMIKRYDEHHQDLTLLKALVRQQLPEKYKEIFFDQSKNGYAGYIDGGASQEEFYKFIKPILEKMDGTEELLVKLNREDLLRKQRTFDNGSIPHQIHLGELHAILRRQEDFYPFLKDNREKIEKILTFRIPYYVGPLARGNSRFAWMTRKSEETITPWNFEEVVDKGASAQSFIERMTNFDKNLPNEKVLPKHSLLYEYFTVYNELTKVKYVTEGMRKPAFLSGEQKKAIVDLLFKTNRKVTVKQLKEDYFKKIECFDSVEISGVEDRFNASLGTYHDLLKIIKDKDFLDNEENEDILEDIVLTLTLFEDREMIEERLKTYAHLFDDKVMKQLKRRRYTGWGRLSRKLINGIRDKQSGKTILDFLKSDGFANRNFMQLIHDDSLTFKEDIQKAQVSGQGDSLHEHIANLAGSPAIKKGILQTVKVVDELVKVMGRHKPENIVIEMARENQTTQKGQKNSRERMKRIEEGIKELGSQILKEHPVENTQLQNEKLYLYYLQNGRDMYVDQELDINRLSDYDVDHIVPQSFLKDDSIDNKVLTRSDKARGKSDNVPSEEVVKKMKNYWRQLLNAKLITQRKFDNLTKAERGGLSELDKAGFIKRQLVETRQITKHVAQILDSRMNTKYDENDKLIREVKVITLKSKLVSDFRKDFQFYKVREINNYHHAHDAYLNAVVGTALIKKYPKLESEFVYGDYKVYDVRKMIAKSEQEIGKATAKYFFYSNIMNFFKTEITLANGEIRKRPLIETNGETGEIVWDKGRDFATVRKVLSMPQVNIVKKTEVQTGGFSKESILPKRNSDKLIARKKDWDPKKYGGFDSPTVAYSVLVVAKVEKGKSKKLKSVKELLGITIMERSSFEKNPIDFLEAKGYKEVKKDLIIKLPKYSLFELENGRKRMLASAGELQKGNELALPSKYVNFLYLASHYEKLKGSPEDNEQKQLFVEQHKHYLDEIIEQISEFSKRVILADANLDKVLSAYNKHRDKPIREQAENIIHLFTLTNLGAPAAFKYFDTTIDRKRYTSTKEVLDATLIHQSITGLYETRIDLSQLGGDGGGGSPAPGGLGIEDEYRLHETSTEPDVSLGSTWLSDFPQAWAETGGMGLAVRQAPLIIPLKATSTPVSIQQYPMSHEARLGIKPHIQRLLDQGILVPCQSPWNTPLLPVKKPGTNDYRPVQDLREVNKRVEDIHPTVPNPYNLLSGLPPSHQWYTVLDLKDAFFCLRLHPTSQPLFAFEWRDPGMGISGQLTWTRLPQGFKNSPTLFNEALHRDLADFRIQHPDLILLQYVDDILLAATSELDCQQGTRALLQTLGDLGYRASAKKAQICQKQVKYLGYLLREGQRWLTEARKETVMGQPVPKTPRQLREFLGKAGFCRLFIPGFAEMAAPLYPLTKPGTLFSWGPDQQKAYQEIKQALLTAPALGLPDLTKPFELFVDEKQGYAKGVLTQKLGPWRRPVAYLSKKLDPVAAGWPPCLRMVAAIAVLTKDAGKLTMGQPLVILAPHAVEALVKQPPDRWLSNARMTHYQAMLLDTDRVQFGPVVALNPATLLPLPEEGAPHDCLEILAETHGTRPDLTDQPIPDADHTWYTDGSSFLQEGQRKAGAAVTTETEVIWAGALPAGTSAQRAELIALTQALKMAEGKRLNVYTDSRYAFATAHIHGEIYRRRGWLTSEGREIKNKSEILALLKALFLPKRLSIIHCLGHQKGDSAEARGNRLADQAAREAAIKTPPDTSTLLIAGKRTADGSEFEKRTADGSEFESPKKKAKVE

SEQ ID NO: 2137 - protein, 2097 aa, synthetic construct
MPAAKRVKLDGGDKKYSIGLDIGTNSVGWAVITDEYKVPSKKFKVLGNTDRHSIKKNLIGALLFDSGETAEATRLKRTARRRYTRRKNRICYLQEIFSNEMAKVDDSFFHRLEESFLVEEDKKHERHPIFGNIVDEVAYHEKYPTIYHLRKKLVDSTDKADLRLIYLALAHMIKFRGHFLIEGDLNPDNSDVDKLFIQLVQTYNQLFEENPINASGVDAKAILSARLSKSRRLENLIAQLPGEKKNGLFGNLIALSLGLTPNFKSNFDLAEDAKLQLSKDTYDDDLDNLLAQIGDQYADLFLAAKNLSDAILLSDILRVNTEITKAPLSASMIKRYDEHHQDLTLLKALVRQQLPEKYKEIFFDQSKNGYAGYIDGGASQEEFYKFIKPILEKMDGTEELLVKLNREDLLRKQRTFDNGSIPHQIHLGELHAILRRQEDFYPFLKDNREKIEKILTFRIPYYVGPLARGNSRFAWMTRKSEETITPWNFEEVVDKGASAQSFIERMTNFDKNLPNEKVLPKHSLLYEYFTVYNELTKVKYVTEGMRKPAFLSGEQKKAIVDLLFKTNRKVTVKQLKEDYFKKIECFDSVEISGVEDRFNASLGTYHDLLKIIKDKDFLDNEENEDILEDIVLTLTLFEDREMIEERLKTYAHLFDDKVMKQLKRRRYTGWGRLSRKLINGIRDKQSGKTILDFLKSDGFANRNFMQLIHDDSLTFKEDIQKAQVSGQGDSLHEHIANLAGSPAIKKGILQTVKVVDELVKVMGRHKPENIVIEMARENQTTQKGQKNSRERMKRIEEGIKELGSQILKEHPVENTQLQNEKLYLYYLQNGRDMYVDQELDINRLSDYDVDHIVPQSFLKDDSIDNKVLTRSDKARGKSDNVPSEEVVKKMKNYWRQLLNAKLITQRKFDNLTKAERGGLSELDKAGFIKRQLVETRQITKHVAQILDSRMNTKYDENDKLIREVKVITLKSKLVSDFRKDFQFYKVREINNYHHAHDAYLNAVVGTALIKKYPKLESEFVYGDYKVYDVRKMIAKSEQEIGKATAKYFFYSNIMNFFKTEITLANGEIRKRPLIETNGETGEIVWDKGRDFATVRKVLSMPQVNIVKKTEVQTGGFSKESILPKRNSDKLIARKKDWDPKKYGGFDSPTVAYSVLVVAKVEKGKSKKLKSVKELLGITIMERSSFEKNPIDFLEAKGYKEVKKDLIIKLPKYSLFELENGRKRMLASAGELQKGNELALPSKYVNFLYLASHYEKLKGSPEDNEQKQLFVEQHKHYLDEIIEQISEFSKRVILADANLDKVLSAYNKHRDKPIREQAENIIHLFTLTNLGAPAAFKYFDTTIDRKRYTSTKEVLDATLIHQSITGLYETRIDLSQLGGDGGGGSGGSGGSGGSGGLGIEDEYRLHETSTEPDVSLGSTWLSDFPQAWAETGGMGLAVRQAPLIIPLKATSTPVSIQQYPMSHEARLGIKPHIQRLLDQGILVPCQSPWNTPLLPVKKPGTNDYRPVQDLREVNKRVEDIHPTVPNPYNLLSGLPPSHQWYTVLDLKDAFFCLRLHPTSQPLFAFEWRDPGMGISGQLTWTRLPQGFKNSPTLFNEALHRDLADFRIQHPDLILLQYVDDILLAATSELDCQQGTRALLQTLGDLGYRASAKKAQICQKQVKYLGYLLREGQRWLTEARKETVMGQPVPKTPRQLREFLGKAGFCRLFIPGFAEMAAPLYPLTKPGTLFSWGPDQQKAYQEIKQALLTAPALGLPDLTKPFELFVDEKQGYAKGVLTQKLGPWRRPVAYLSKKLDPVAAGWPPCLRMVAAIAVLTKDAGKLTMGQPLVILAPHAVEALVKQPPDRWLSNARMTHYQAMLLDTDRVQFGPVVALNPATLLPLPEEGAPHDCLEILAETHGTRPDLTDQPIPDADHTWYTDGSSFLQEGQRKAGAAVTTETEVIWAGALPAGTSAQRAELIALTQALKMAEGKRLNVYTDSRYAFATAHIHGEIYRRRGWLTSEGREIKNKSEILALLKALFLPKRLSIIHCLGHQKGDSAEARGNRLADQAAREAAIKTPPDTSTLLIAGKRTADGSEFEKRTADGSEFESPKKKAKVE

SEQ ID NO: 2138 - protein, 2094 aa, synthetic construct; identical to SEQ ID NO: 2061

SEQ ID NO: 2139 - protein, 2096 aa, synthetic construct
MPAAKRVKLDGGDKKYSIGLDIGTNSVGWAVITDEYKVPSKKFKVLGNTDRHSIKKNLIGALLFDSGETAEATRLKRTARRRYTRRKNRICYLQEIFSNEMAKVDDSFFHRLEESFLVEEDKKHERHPIFGNIVDEVAYHEKYPTIYHLRKKLVDSTDKADLRLIYLALAHMIKFRGHFLIEGDLNPDNSDVDKLFIQLVQTYNQLFEENPINASGVDAKAILSARLSKSRRLENLIAQLPGEKKNGLFGNLIALSLGLTPNFKSNFDLAEDAKLQLSKDTYDDDLDNLLAQIGDQYADLFLAAKNLSDAILLSDILRVNTEITKAPLSASMIKRYDEHHQDLTLLKALVRQQLPEKYKEIFFDQSKNGYAGYIDGGASQEEFYKFIKPILEKMDGTEELLVKLNREDLLRKQRTFDNGSIPHQIHLGELHAILRRQEDFYPFLKDNREKIEKILTFRIPYYVGPLARGNSRFAWMTRKSEETITPWNFEEVVDKGASAQSFIERMTNFDKNLPNEKVLPKHSLLYEYFTVYNELTKVKYVTEGMRKPAFLSGEQKKAIVDLLFKTNRKVTVKQLKEDYFKKIECFDSVEISGVEDRFNASLGTYHDLLKIIKDKDFLDNEENEDILEDIVLTLTLFEDREMIEERLKTYAHLFDDKVMKQLKRRRYTGWGRLSRKLINGIRDKQSGKTILDFLKSDGFANRNFMQLIHDDSLTFKEDIQKAQVSGQGDSLHEHIANLAGSPAIKKGILQTVKVVDELVKVMGRHKPENIVIEMARENQTTQKGQKNSRERMKRIEEGIKELGSQILKEHPVENTQLQNEKLYLYYLQNGRDMYVDQELDINRLSDYDVDHIVPQSFLKDDSIDNKVLTRSDKARGKSDNVPSEEVVKKMKNYWRQLLNAKLITQRKFDNLTKAERGGLSELDKAGFIKRQLVETRQITKHVAQILDSRMNTKYDENDKLIREVKVITLKSKLVSDFRKDFQFYKVREINNYHHAHDAYLNAVVGTALIKKYPKLESEFVYGDYKVYDVRKMIAKSEQEIGKATAKYFFYSNIMNFFKTEITLANGEIRKRPLIETNGETGEIVWDKGRDFATVRKVLSMPQVNIVKKTEVQTGGFSKESILPKRNSDKLIARKKDWDPKKYGGFDSPTVAYSVLVVAKVEKGKSKKLKSVKELLGITIMERSSFEKNPIDFLEAKGYKEVKKDLIIKLPKYSLFELENGRKRMLASAGELQKGNELALPSKYVNFLYLASHYEKLKGSPEDNEQKQLFVEQHKHYLDEIIEQISEFSKRVILADANLDKVLSAYNKHRDKPIREQAENIIHLFTLTNLGAPAAFKYFDTTIDRKRYTSTKEVLDATLIHQSITGLYETRIDLSQLGGDGGGGSPAPEAAAKGGLGIEDEYRLHETSTEPDVSLGSTWLSDFPQAWAETGGMGLAVRQAPLIIPLKATSTPVSIQQYPMSHEARLGIKPHIQRLLDQGILVPCQSPWNTPLLPVKKPGTNDYRPVQDLREVNKRVEDIHPTVPNPYNLLSGLPPSHQWYTVLDLKDAFFCLRLHPTSQPLFAFEWRDPGMGISGQLTWTRLPQGFKNSPTLFNEALHRDLADFRIQHPDLILLQYVDDILLAATSELDCQQGTRALLQTLGDLGYRASAKKAQICQKQVKYLGYLLREGQRWLTEARKETVMGQPVPKTPRQLREFLGKAGFCRLFIPGFAEMAAPLYPLTKPGTLFSWGPDQQKAYQEIKQALLTAPALGLPDLTKPFELFVDEKQGYAKGVLTQKLGPWRRPVAYLSKKLDPVAAGWPPCLRMVAAIAVLTKDAGKLTMGQPLVILAPHAVEALVKQPPDRWLSNARMTHYQAMLLDTDRVQFGPVVALNPATLLPLPEEGAPHDCLEILAETHGTRPDLTDQPIPDADHTWYTDGSSFLQEGQRKAGAAVTTETEVIWAGALPAGTSAQRAELIALTQALKMAEGKRLNVYTDSRYAFATAHIHGEIYRRRGWLTSEGREIKNKSEILALLKALFLPKRLSIIHCLGHQKGDSAEARGNRLADQAAREAAIKTPPDTSTLLIAGKRTADGSEFEKRTADGSEFESPKKKAKVE

SEQ ID NO: 2140 - protein, 2103 aa, synthetic construct
MPAAKRVKLDGGDKKYSIGLDIGTNSVGWAVITDEYKVPSKKFKVLGNTDRHSIKKNLIGALLFDSGETAEATRLKRTARRRYTRRKNRICYLQEIFSNEMAKVDDSFFHRLEESFLVEEDKKHERHPIFGNIVDEVAYHEKYPTIYHLRKKLVDSTDKADLRLIYLALAHMIKFRGHFLIEGDLNPDNSDVDKLFIQLVQTYNQLFEENPINASGVDAKAILSARLSKSRRLENLIAQLPGEKKNGLFGNLIALSLGLTPNFKSNFDLAEDAKLQLSKDTYDDDLDNLLAQIGDQYADLFLAAKNLSDAILLSDILRVNTEITKAPLSASMIKRYDEHHQDLTLLKALVRQQLPEKYKEIFFDQSKNGYAGYIDGGASQEEFYKFIKPILEKMDGTEELLVKLNREDLLRKQRTFDNGSIPHQIHLGELHAILRRQEDFYPFLKDNREKIEKILTFRIPYYVGPLARGNSRFAWMTRKSEETITPWNFEEVVDKGASAQSFIERMTNFDKNLPNEKVLPKHSLLYEYFTVYNELTKVKYVTEGMRKPAFLSGEQKKAIVDLLFKTNRKVTVKQLKEDYFKKIECFDSVEISGVEDRFNASLGTYHDLLKIIKDKDFLDNEENEDILEDIVLTLTLFEDREMIEERLKTYAHLFDDKVMKQLKRRRYTGWGRLSRKLINGIRDKQSGKTILDFLKSDGFANRNFMQLIHDDSLTFKEDIQKAQVSGQGDSLHEHIANLAGSPAIKKGILQTVKVVDELVKVMGRHKPENIVIEMARENQTTQKGQKNSRERMKRIEEGIKELGSQILKEHPVENTQLQNEKLYLYYLQNGRDMYVDQELDINRLSDYDVDHIVPQSFLKDDSIDNKVLTRSDKARGKSDNVPSEEVVKKMKNYWRQLLNAKLITQRKFDNLTKAERGGLSELDKAGFIKRQLVETRQITKHVAQILDSRMNTKYDENDKLIREVKVITLKSKLVSDFRKDFQFYKVREINNYHHAHDAYLNAVVGTALIKKYPKLESEFVYGDYKVYDVRKMIAKSEQEIGKATAKYFFYSNIMNFFKTEITLANGEIRKRPLIETNGETGEIVWDKGRDFATVRKVLSMPQVNIVKKTEVQTGGFSKESILPKRNSDKLIARKKDWDPKKYGGFDSPTVAYSVLVVAKVEKGKSKKLKSVKELLGITIMERSSFEKNPIDFLEAKGYKEVKKDLIIKLPKYSLFELENGRKRMLASAGELQKGNELALPSKYVNFLYLASHYEKLKGSPEDNEQKQLFVEQHKHYLDEIIEQISEFSKRVILADANLDKVLSAYNKHRDKPIREQAENIIHLFTLTNLGAPAAFKYFDTTIDRKRYTSTKEVLDATLIHQSITGLYETRIDLSQLGGDGGGSSGSSGSSGSSGSSGSSGGLGIEDEYRLHETSTEPDVSLGSTWLSDFPQAWAETGGMGLAVRQAPLIIPLKATSTPVSIQQYPMSHEARLGIKPHIQRLLDQGILVPCQSPWNTPLLPVKKPGTNDYRPVQDLREVNKRVEDIHPTVPNPYNLLSGLPPSHQWYTVLDLKDAFFCLRLHPTSQPLFAFEWRDPGMGISGQLTWTRLPQGFKNSPTLFNEALHRDLADFRIQHPDLILLQYVDDILLAATSELDCQQGTRALLQTLGDLGYRASAKKAQICQKQVKYLGYLLREGQRWLTEARKETVMGQPVPKTPRQLREFLGKAGFCRLFIPGFAEMAAPLYPLTKPGTLFSWGPDQQKAYQEIKQALLTAPALGLPDLTKPFELFVDEKQGYAKGVLTQKLGPWRRPVAYLSKKLDPVAAGWPPCLRMVAAIAVLTKDAGKLTMGQPLVILAPHAVEALVKQPPDRWLSNARMTHYQAMLLDTDRVQFGPVVALNPATLLPLPEEGAPHDCLEILAETHGTRPDLTDQPIPDADHTWYTDGSSFLQEGQRKAGAAVTTETEVIWAGALPAGTSAQRAELIALTQALKMAEGKRLNVYTDSRYAFATAHIHGEIYRRRGWLTSEGREIKNKSEILALLKALFLPKRLSIIHCLGHQKGDSAEARGNRLADQAAREAAIKTPPDTSTLLIAGKRTADGSEFEKRTADGSEFESPKKKAKVE

SEQ ID NO: 2141 - protein, 2096 aa, synthetic construct
MPAAKRVKLDGGDKKYSIGLDIGTNSVGWAVITDEYKVPSKKFKVLGNTDRHSIKKNLIGALLFDSGETAEATRLKRTARRRYTRRKNRICYLQEIFSNEMAKVDDSFFHRLEESFLVEEDKKHERHPIFGNIVDEVAYHEKYPTIYHLRKKLVDSTDKADLRLIYLALAHMIKFRGHFLIEGDLNPDNSDVDKLFIQLVQTYNQLFEENPINASGVDAKAILSARLSKSRRLENLIAQLPGEKKNGLFGNLIALSLGLTPNFKSNFDLAEDAKLQLSKDTYDDDLDNLLAQIGDQYADLFLAAKNLSDAILLSDILRVNTEITKAPLSASMIKRYDEHHQDLTLLKALVRQQLPEKYKEIFFDQSKNGYAGYIDGGASQEEFYKFIKPILEKMDGTEELLVKLNREDLLRKQRTFDNGSIPHQIHLGELHAILRRQEDFYPFLKDNREKIEKILTFRIPYYVGPLARGNSRFAWMTRKSEETITPWNFEEVVDKGASAQSFIERMTNFDKNLPNEKVLPKHSLLYEYFTVYNELTKVKYVTEGMRKPAFLSGEQKKAIVDLLFKTNRKVTVKQLKEDYFKKIECFDSVEISGVEDRFNASLGTYHDLLKIIKDKDFLDNEENEDILEDIVLTLTLFEDREMIEERLKTYAHLFDDKVMKQLKRRRYTGWGRLSRKLINGIRDKQSGKTILDFLKSDGFANRNFMQLIHDDSLTFKEDIQKAQVSGQGDSLHEHIANLAGSPAIKKGILQTVKVVDELVKVMGRHKPENIVIEMARENQTTQKGQKNSRERMKRIEEGIKELGSQILKEHPVENTQLQNEKLYLYYLQNGRDMYVDQELDINRLSDYDVDHIVPQSFLKDDSIDNKVLTRSDKARGKSDNVPSEEVVKKMKNYWRQLLNAKLITQRKFDNLTKAERGGLSELDKAGFIKRQLVETRQITKHVAQILDSRMNTKYDENDKLIREVKVITLKSKLVSDFRKDFQFYKVREINNYHHAHDAYLNAVVGTALIKKYPKLESEFVYGDYKVYDVRKMIAKSEQEIGKATAKYFFYSNIMNFFKTEITLANGEIRKRPLIETNGETGEIVWDKGRDFATVRKVLSMPQVNIVKKTEVQTGGFSKESILPKRNSDKLIARKKDWDPKKYGGFDSPTVAYSVLVVAKVEKGKSKKLKSVKELLGITIMERSSFEKNPIDFLEAKGYKEVKKDLIIKLPKYSLFELENGRKRMLASAGELQKGNELALPSKYVNFLYLASHYEKLKGSPEDNEQKQLFVEQHKHYLDEIIEQISEFSKRVILADANLDKVLSAYNKHRDKPIREQAENIIHLFTLTNLGAPAAFKYFDTTIDRKRYTSTKEVLDATLIHQSITGLYETRIDLSQLGGDGGEAAAKGSSGGGGGLGIEDEYRLHETSTEPDVSLGSTWLSDFPQAWAETGGMGLAVRQAPLIIPLKATSTPVSIQQYPMSHEARLGIKPHIQRLLDQGILVPCQSPWNTPLLPVKKPGTNDYRPVQDLREVNKRVEDIHPTVPNPYNLLSGLPPSHQWYTVLDLKDAFFCLRLHPTSQPLFAFEWRDPGMGISGQLTWTRLPQGFKNSPTLFNEALHRDLADFRIQHPDLILLQYVDDILLAATSELDCQQGTRALLQTLGDLGYRASAKKAQICQKQVKYLGYLLREGQRWLTEARKETVMGQPVPKTPRQLREFLGKAGFCRLFIPGFAEMAAPLYPLTKPGTLFSWGPDQQKAYQEIKQALLTAPALGLPDLTKPFELFVDEKQGYAKGVLTQKLGPWRRPVAYLSKKLDPVAAGWPPCLRMVAAIAVLTKDAGKLTMGQPLVILAPHAVEALVKQPPDRWLSNARMTHYQAMLLDTDRVQFGPVVALNPATLLPLPEEGAPHDCLEILAETHGTRPDLTDQPIPDADHTWYTDGSSFLQEGQRKAGAAVTTETEVIWAGALPAGTSAQRAELIALTQALKMAEGKRLNVYTDSRYAFATAHIHGEIYRRRGWLTSEGREIKNKSEILALLKALFLPKRLSIIHCLGHQKGDSAEARGNRLADQAAREAAIKTPPDTSTLLIAGKRTADGSEFEKRTADGSEFESPKKKAKVE

SEQ ID NO: 2142 - protein, 2094 aa, synthetic construct
MPAAKRVKLDGGDKKYSIGLDIGTNSVGWAVITDEYKVPSKKFKVLGNTDRHSIKKNLIGALLFDSGETAEATRLKRTARRRYTRRKNRICYLQEIFSNEMAKVDDSFFHRLEESFLVEEDKKHERHPIFGNIVDEVAYHEKYPTIYHLRKKLVDSTDKADLRLIYLALAHMIKFRGHFLIEGDLNPDNSDVDKLFIQLVQTYNQLFEENPINASGVDAKAILSARLSKSRRLENLIAQLPGEKKNGLFGNLIALSLGLTPNFKSNFDLAEDAKLQLSKDTYDDDLDNLLAQIGDQYADLFLAAKNLSDAILLSDILRVNTEITKAPLSASMIKRYDEHHQDLTLLKALVRQQLPEKYKEIFFDQSKNGYAGYIDGGASQEEFYKFIKPILEKMDGTEELLVKLNREDLLRKQRTFDNGSIPHQIHLGELHAILRRQEDFYPFLKDNREKIEKILTFRIPYYVGPLARGNSRFAWMTRKSEETITPWNFEEVVDKGASAQSFIERMTNFDKNLPNEKVLPKHSLLYEYFTVYNELTKVKYVTEGMRKPAFLSGEQKKAIVDLLFKTNRKVTVKQLKEDYFKKIECFDSVEISGVEDRFNASLGTYHDLLKIIKDKDFLDNEENEDILEDIVLTLTLFEDREMIEERLKTYAHLFDDKVMKQLKRRRYTGWGRLSRKLINGIRDKQSGKTILDFLKSDGFANRNFMQLIHDDSLTFKEDIQKAQVSGQGDSLHEHIANLAGSPAIKKGILQTVKVVDELVKVMGRHKPENIVIEMARENQTTQKGQKNSRERMKRIEEGIKELGSQILKEHPVENTQLQNEKLYLYYLQNGRDMYVDQELDINRLSDYDVDHIVPQSFLKDDSIDNKVLTRSDKARGKSDNVPSEEVVKKMKNYWRQLLNAKLITQRKFDNLTKAERGGLSELDKAGFIKRQLVETRQITKHVAQILDSRMNTKYDENDKLIREVKVITLKSKLVSDFRKDFQFYKVREINNYHHAHDAYLNAVVGTALIKKYPKLESEFVYGDYKVYDVRKMIAKSEQEIGKATAKYFFYSNIMNFFKTEITLANGEIRKRPLIETNGETGEIVWDKGRDFATVRKVLSMPQVNIVKKTEVQTGGFSKESILPKRNSDKLIARKKDWDPKKYGGFDSPTVAYSVLVVAKVEKGKSKKLKSVKELLGITIMERSSFEKNPIDFLEAKGYKEVKKDLIIKLPKYSLFELENGRKRMLASAGELQKGNELALPSKYVNFLYLASHYEKLKGSPEDNEQKQLFVEQHKHYLDEIIEQISEFSKRVILADANLDKVLSAYNKHRDKPIREQAENIIHLFTLTNLGAPAAFKYFDTTIDRKRYTSTKEVLDATLIHQSITGLYETRIDLSQLGGDGGGSSGSSGSSGGLGIEDEYRLHETSTEPDVSLGSTWLSDFPQAWAETGGMGLAVRQAPLIIPLKATSTPVSIQQYPMSHEARLGIKPHIQRLLDQGILVPCQSPWNTPLLPVKKPGTNDYRPVQDLREVNKRVEDIHPTVPNPYNLLSGLPPSHQWYTVLDLKDAFFCLRLHPTSQPLFAFEWRDPGMGISGQLTWTRLPQGFKNSPTLFNEALHRDLADFRIQHPDLILLQYVDDILLAATSELDCQQGTRALLQTLGDLGYRASAKKAQICQKQVKYLGYLLREGQRWLTEARKETVMGQPVPKTPRQLREFLGKAGFCRLFIPGFAEMAAPLYPLTKPGTLFSWGPDQQKAYQEIKQALLTAPALGLPDLTKPFELFVDEKQGYAKGVLTQKLGPWRRPVAYLSKKLDPVAAGWPPCLRMVAAIAVLTKDAGKLTMGQPLVILAPHAVEALVKQPPDRWLSNARMTHYQAMLLDTDRVQFGPVVALNPATLLPLPEEGAPHDCLEILAETHGTRPDLTDQPIPDADHTWYTDGSSFLQEGQRKAGAAVTTETEVIWAGALPAGTSAQRAELIALTQALKMAEGKRLNVYTDSRYAFATAHIHGEIYRRRGWLTSEGREIKNKSEILALLKALFLPKRLSIIHCLGHQKGDSAEARGNRLADQAAREAAIKTPPDTSTLLIAGKRTADGSEFEKRTADGSEFESPKKKAKVE

SEQ ID NO: 2143 - protein, 2094 aa, synthetic construct
MPAAKRVKLDGGDKKYSIGLDIGTNSVGWAVITDEYKVPSKKFKVLGNTDRHSIKKNLIGALLFDSGETAEATRLKRTARRRYTRRKNRICYLQEIFSNEMAKVDDSFFHRLEESFLVEEDKKHERHPIFGNIVDEVAYHEKYPTIYHLRKKLVDSTDKADLRLIYLALAHMIKFRGHFLIEGDLNPDNSDVDKLFIQLVQTYNQLFEENPINASGVDAKAILSARLSKSRRLENLIAQLPGEKKNGLFGNLIALSLGLTPNFKSNFDLAEDAKLQLSKDTYDDDLDNLLAQIGDQYADLFLAAKNLSDAILLSDILRVNTEITKAPLSASMIKRYDEHHQDLTLLKALVRQQLPEKYKEIFFDQSKNGYAGYIDGGASQEEFYKFIKPILEKMDGTEELLVKLNREDLLRKQRTFDNGSIPHQIHLGELHAILRRQEDFYPFLKDNREKIEKILTFRIPYYVGPLARGNSRFAWMTRKSEETITPWNFEEVVDKGASAQSFIERMTNFDKNLPNEKVLPKHSLLYEYFTVYNELTKVKYVTEGMRKPAFLSGEQKKAIVDLLFKTNRKVTVKQLKEDYFKKIECFDSVEISGVEDRFNASLGTYHDLLKIIKDKDFLDNEENEDILEDIVLTLTLFEDREMIEERLKTYAHLFDDKVMKQLKRRRYTGWGRLSRKLINGIRDKQSGKTILDFLKSDGFANRNFMQLIHDDSLTFKEDIQKAQVSGQGDSLHEHIANLAGSPAIKKGILQTVKVVDELVKVMGRHKPENIVIEMARENQTTQKGQKNSRERMKRIEEGIKELGSQILKEHPVENTQLQNEKLYLYYLQNGRDMYVDQELDINRLSDYDVDHIVPQSFLKDDSIDNKVLTRSDKARGKSDNVPSEEVVKKMKNYWRQLLNAKLITQRKFDNLTKAERGGLSELDKAGFIKRQLVETRQITKHVAQILDSRMNTKYDENDKLIREVKVITLKSKLVSDFRKDFQFYKVREINNYHHAHDAYLNAVVGTALIKKYPKLESEFVYGDYKVYDVRKMIAKSEQEIGKATAKYFFYSNIMNFFKTEITLANGEIRKRPLIETNGETGEIVWDKGRDFATVRKVLSMPQVNIVKKTEVQTGGFSKESILPKRNSDKLIARKKDWDPKKYGGFDSPTVAYSVLVVAKVEKGKSKKLKSVKELLGITIMERSSFEKNPIDFLEAKGYKEVKKDLIIKLPKYSLFELENGRKRMLASAGELQKGNELALPSKYVNFLYLASHYEKLKGSPEDNEQKQLFVEQHKHYLDEIIEQISEFSKRVILADANLDKVLSAYNKHRDKPIREQAENIIHLFTLTNLGAPAAFKYFDTTIDRKRYTSTKEVLDATLIHQSITGLYETRIDLSQLGGDGGGSSGGSPAPGGLGIEDEYRLHETSTEPDVSLGSTWLSDFPQAWAETGGMGLAVRQAPLIIPLKATSTPVSIQQYPMSHEARLGIKPHIQRLLDQGILVPCQSPWNTPLLPVKKPGTNDYRPVQDLREVNKRVEDIHPTVPNPYNLLSGLPPSHQWYTVLDLKDAFFCLRLHPTSQPLFAFEWRDPGMGISGQLTWTRLPQGFKNSPTLFNEALHRDLADFRIQHPDLILLQYVDDILLAATSELDCQQGTRALLQTLGDLGYRASAKKAQICQKQVKYLGYLLREGQRWLTEARKETVMGQPVPKTPRQLREFLGKAGFCRLFIPGFAEMAAPLYPLTKPGTLFSWGPDQQKAYQEIKQALLTAPALGLPDLTKPFELFVDEKQGYAKGVLTQKLGPWRRPVAYLSKKLDPVAAGWPPCLRMVAAIAVLTKDAGKLTMGQPLVILAPHAVEALVKQPPDRWLSNARMTHYQAMLLDTDRVQFGPVVALNPATLLPLPEEGAPHDCLEILAETHGTRPDLTDQPIPDADHTWYTDGSSFLQEGQRKAGAAVTTETEVIWAGALPAGTSAQRAELIALTQALKMAEGKRLNVYTDSRYAFATAHIHGEIYRRRGWLTSEGREIKNKSEILALLKALFLPKRLSIIHCLGHQKGDSAEARGNRLADQAAREAAIKTPPDTSTLLIAGKRTADGSEFEKRTADGSEFESPKKKAKVE

SEQ ID NO: 2144 - protein, 2090 aa, synthetic construct
MPAAKRVKLDGGDKKYSIGLDIGTNSVGWAVITDEYKVPSKKFKVLGNTDRHSIKKNLIGALLFDSGETAEATRLKRTARRRYTRRKNRICYLQEIFSNEMAKVDDSFFHRLEESFLVEEDKKHERHPIFGNIVDEVAYHEKYPTIYHLRKKLVDSTDKADLRLIYLALAHMIKFRGHFLIEGDLNPDNSDVDKLFIQLVQTYNQLFEENPINASGVDAKAILSARLSKSRRLENLIAQLPGEKKNGLFGNLIALSLGLTPNFKSNFDLAEDAKLQLSKDTYDDDLDNLLAQIGDQYADLFLAAKNLSDAILLSDILRVNTEITKAPLSASMIKRYDEHHQDLTLLKALVRQQLPEKYKEIFFDQSKNGYAGYIDGGASQEEFYKFIKPILEKMDGTEELLVKLNREDLLRKQRTFDNGSIPHQIHLGELHAILRRQEDFYPFLKDNREKIEKILTFRIPYYVGPLARGNSRFAWMTRKSEETITPWNFEEVVDKGASAQSFIERMTNFDKNLPNEKVLPKHSLLYEYFTVYNELTKVKYVTEGMRKPAFLSGEQKKAIVDLLFKTNRKVTVKQLKEDYFKKIECFDSVEISGVEDRFNASLGTYHDLLKIIKDKDFLDNEENEDILEDIVLTLTLFEDREMIEERLKTYAHLFDDKVMKQLKRRRYTGWGRLSRKLINGIRDKQSGKTILDFLKSDGFANRNFMQLIHDDSLTFKEDIQKAQVSGQGDSLHEHIANLAGSPAIKKGILQTVKVVDELVKVMGRHKPENIVIEMARENQTTQKGQKNSRERMKRIEEGIKELGSQILKEHPVENTQLQNEKLYLYYLQNGRDMYVDQELDINRLSDYDVDHIVPQSFLKDDSIDNKVLTRSDKARGKSDNVPSEEVVKKMKNYWRQLLNAKLITQRKFDNLTKAERGGLSELDKAGFIKRQLVETRQITKHVAQILDSRMNTKYDENDKLIREVKVITLKSKLVSDFRKDFQFYKVREINNYHHAHDAYLNAVVGTALIKKYPKLESEFVYGDYKVYDVRKMIAKSEQEIGKATAKYFFYSNIMNFFKTEITLANGEIRKRPLIETNGETGEIVWDKGRDFATVRKVLSMPQVNIVKKTEVQTGGFSKESILPKRNSDKLIARKKDWDPKKYGGFDSPTVAYSVLVVAKVEKGKSKKLKSVKELLGITIMERSSFEKNPIDFLEAKGYKEVKKDLIIKLPKYSLFELENGRKRMLASAGELQKGNELALPSKYVNFLYLASHYEKLKGSPEDNEQKQLFVEQHKHYLDEIIEQISEFSKRVILADANLDKVLSAYNKHRDKPIREQAENIIHLFTLTNLGAPAAFKYFDTTIDRKRYTSTKEVLDATLIHQSITGLYETRIDLSQLGGDGGPAPAPGGLGIEDEYRLHETSTEPDVSLGSTWLSDFPQAWAETGGMGLAVRQAPLIIPLKATSTPVSIQQYPMSHEARLGIKPHIQRLLDQGILVPCQSPWNTPLLPVKKPGTNDYRPVQDLREVNKRVEDIHPTVPNPYNLLSGLPPSHQWYTVLDLKDAFFCLRLHPTSQPLFAFEWRDPGMGISGQLTWTRLPQGFKNSPTLFNEALHRDLADFRIQHPDLILLQYVDDILLAATSELDCQQGTRALLQTLGDLGYRASAKKAQICQKQVKYLGYLLREGQRWLTEARKETVMGQPVPKTPRQLREFLGKAGFCRLFIPGFAEMAAPLYPLTKPGTLFSWGPDQQKAYQEIKQALLTAPALGLPDLTKPFELFVDEKQGYAKGVLTQKLGPWRRPVAYLSKKLDPVAAGWPPCLRMVAAIAVLTKDAGKLTMGQPLVILAPHAVEALVKQPPDRWLSNARMTHYQAMLLDTDRVQFGPVVALNPATLLPLPEEGAPHDCLEILAETHGTRPDLTDQPIPDADHTWYTDGSSFLQEGQRKAGAAVTTETEVIWAGALPAGTSAQRAELIALTQALKMAEGKRLNVYTDSRYAFATAHIHGEIYRRRGWLTSEGREIKNKSEILALLKALFLPKRLSIIHCLGHQKGDSAEARGNRLADQAAREAAIKTPPDTSTLLIAGKRTADGSEFEKRTADGSEFESPKKKAKVE

SEQ ID NO: 2145 - protein, 2096 aa, synthetic construct
MPAAKRVKLDGGDKKYSIGLDIGTNSVGWAVITDEYKVPSKKFKVLGNTDRHSIKKNLIGALLFDSGETAEATRLKRTARRRYTRRKNRICYLQEIFSNEMAKVDDSFFHRLEESFLVEEDKKHERHPIFGNIVDEVAYHEKYPTIYHLRKKLVDSTDKADLRLIYLALAHMIKFRGHFLIEGDLNPDNSDVDKLFIQLVQTYNQLFEENPINASGVDAKAILSARLSKSRRLENLIAQLPGEKKNGLFGNLIALSLGLTPNFKSNFDLAEDAKLQLSKDTYDDDLDNLLAQIGDQYADLFLAAKNLSDAILLSDILRVNTEITKAPLSASMIKRYDEHHQDLTLLKALVRQQLPEKYKEIFFDQSKNGYAGYIDGGASQEEFYKFIKPILEKMDGTEELLVKLNREDLLRKQRTFDNGSIPHQIHLGELHAILRRQEDFYPFLKDNREKIEKILTFRIPYYVGPLARGNSRFAWMTRKSEETITPWNFEEVVDKGASAQSFIERMTNFDKNLPNEKVLPKHSLLYEYFTVYNELTKVKYVTEGMRKPAFLSGEQKKAIVDLLFKTNRKVTVKQLKEDYFKKIECFDSVEISGVEDRFNASLGTYHDLLKIIKDKDFLDNEENEDILEDIVLTLTLFEDREMIEERLKTYAHLFDDKVMKQLKRRRYTGWGRLSRKLINGIRDKQSGKTILDFLKSDGFANRNFMQLIHDDSLTFKEDIQKAQVSGQGDSLHEHIANLAGSPAIKKGILQTVKVVDELVKVMGRHKPENIVIEMARENQTTQKGQKNSRERMKRIEEGIKELGSQILKEHPVENTQLQNEKLYLYYLQNGRDMYVDQELDINRLSDYDVDHIVPQSFLKDDSIDNKVLTRSDKARGKSDNVPSEEVVKKMKNYWRQLLNAKLITQRKFDNLTKAERGGLSELDKAGFIKRQLVETRQITKHVAQILDSRMNTKYDENDKLIREVKVITLKSKLVSDFRKDFQFYKVREINNYHHAHDAYLNAVVGTALIKKYPKLESEFVYGDYKVYDVRKMIAKSEQEIGKATAKYFFYSNIMNFFKTEITLANGEIRKRPLIETNGETGEIVWDKGRDFATVRKVLSMPQVNIVKKTEVQTGGFSKESILPKRNSDKLIARKKDWDPKKYGGFDSPTVAYSVLVVAKVEKGKSKKLKSVKELLGITIMERSSFEKNPIDFLEAKGYKEVKKDLIIKLPKYSLFELENGRKRMLASAGELQKGNELALPSKYVNFLYLASHYEKLKGSPEDNEQKQLFVEQHKHYLDEIIEQISEFSKRVILADANLDKVLSAYNKHRDKPIREQAENIIHLFTLTNLGAPAAFKYFDTTIDRKRYTSTKEVLDATLIHQSITGLYETRIDLSQLGGDGGGGGGSSEAAAKGGLGIEDEYRLHETSTEPDVSLGSTWLSDFPQAWAETGGMGLAVRQAPLIIPLKATSTPVSIQQYPMSHEARLGIKPHIQRLLDQGILVPCQSPWNTPLLPVKKPGTNDYRPVQDLREVNKRVEDIHPTVPNPYNLLSGLPPSHQWYTVLDLKDAFFCLRLHPTSQPLFAFEWRDPGMGISGQLTWTRLPQGFKNSPTLFNEALHRDLADFRIQHPDLILLQYVDDILLAATSELDCQQGTRALLQTLGDLGYRASAKKAQICQKQVKYLGYLLREGQRWLTEARKETVMGQPVPKTPRQLREFLGKAGFCRLFIPGFAEMAAPLYPLTKPGTLFSWGPDQQKAYQEIKQALLTAPALGLPDLTKPFELFVDEKQGYAKGVLTQKLGPWRRPVAYLSKKLDPVAAGWPPCLRMVAAIAVLTKDAGKLTMGQPLVILAPHAVEALVKQPPDRWLSNARMTHYQAMLLDTDRVQFGPVVALNPATLLPLPEEGAPHDCLEILAETHGTRPDLTDQPIPDADHTWYTDGSSFLQEGQRKAGAAVTTETEVIWAGALPAGTSAQRAELIALTQALKMAEGKRLNVYTDSRYAFATAHIHGEIYRRRGWLTSEGREIKNKSEILALLKALFLPKRLSIIHCLGHQKGDSAEARGNRLADQAAREAAIKTPPDTSTLLIAGKRTADGSEFEKRTADGSEFESPKKKAKVE

SEQ ID NO: 2146 - protein, 2096 aa, synthetic construct
MPAAKRVKLDGGDKKYSIGLDIGTNSVGWAVITDEYKVPSKKFKVLGNTDRHSIKKNLIGALLFDSGETAEATRLKRTARRRYTRRKNRICYLQEIFSNEMAKVDDSFFHRLEESFLVEEDKKHERHPIFGNIVDEVAYHEKYPTIYHLRKKLVDSTDKADLRLIYLALAHMIKFRGHFLIEGDLNPDNSDVDKLFIQLVQTYNQLFEENPINASGVDAKAILSARLSKSRRLENLIAQLPGEKKNGLFGNLIALSLGLTPNFKSNFDLAEDAKLQLSKDTYDDDLDNLLAQIGDQYADLFLAAKNLSDAILLSDILRVNTEITKAPLSASMIKRYDEHHQDLTLLKALVRQQLPEKYKEIFFDQSKNGYAGYIDGGASQEEFYKFIKPILEKMDGTEELLVKLNREDLLRKQRTFDNGSIPHQIHLGELHAILRRQEDFYPFLKDNREKIEKILTFRIPYYVGPLARGNSRFAWMTRKSEETITPWNFEEVVDKGASAQSFIERMTNFDKNLPNEKVLPKHSLLYEYFTVYNELTKVKYVTEGMRKPAFLSGEQKKAIVDLLFKTNRKVTVKQLKEDYFKKIECFDSVEISGVEDRFNASLGTYHDLLKIIKDKDFLDNEENEDILEDIVLTLTLFEDREMIEERLKTYAHLFDDKVMKQLKRRRYTGWGRLSRKLINGIRDKQSGKTILDFLKSDGFANRNFMQLIHDDSLTFKEDIQKAQVSGQGDSLHEHIANLAGSPAIKKGILQTVKVVDELVKVMGRHKPENIVIEMARENQTTQKGQKNSRERMKRIEEGIKELGSQILKEHPVENTQLQNEKLYLYYLQNGRDMYVDQELDINRLSDYDVDHIVPQSFLKDDSIDNKVLTRSDKARGKSDNVPSEEVVKKMKNYWRQLLNAKLITQRKFDNLTKAERGGLSELDKAGFIKRQLVETRQITKHVAQILDSRMNTKYDENDKLIREVKVITLKSKLVSDFRKDFQFYKVREINNYHHAHDAYLNAVVGTALIKKYPKLESEFVYGDYKVYDVRKMIAKSEQEIGKATAKYFFYSNIMNFFKTEITLANGEIRKRPLIETNGETGEIVWDKGRDFATVRKVLSMPQVNIVKKTEVQTGGFSKESILPKRNSDKLIARKKDWDPKKYGGFDSPTVAYSVLVVAKVEKGKSKKLKSVKELLGITIMERSSFEKNPIDFLEAKGYKEVKKDLIIKLPKYSLFELENGRKRMLASAGELQKGNELALPSKYVNFLYLASHYEKLKGSPEDNEQKQLFVEQHKHYLDEIIEQISEFSKRVILADANLDKVLSAYNKHRDKPIREQAENIIHLFTLTNLGAPAAFKYFDTTIDRKRYTSTKEVLDATLIHQSITGLYETRIDLSQLGGDGGGGSEAAAKPAPGGLGIEDEYRLHETSTEPDVSLGSTWLSDFPQAWAETGGMGLAVRQAPLIIPLKATSTPVSIQQYPMSHEARLGIKPHIQRLLDQGILVPCQSPWNTPLLPVKKPGTNDYRPVQDLREVNKRVEDIHPTVPNPYNLLSGLPPSHQWYTVLDLKDAFFCLRLHPTSQPLFAFEWRDPGMGISGQLTWTRLPQGFKNSPTLFNEALHRDLADFRIQHPDLILLQYVDDILLAATSELDCQQGTRALLQTLGDLGYRASAKKAQICQKQVKYLGYLLREGQRWLTEARKETVMGQPVPKTPRQLREFLGKAGFCRLFIPGFAEMAAPLYPLTKPGTLFSWGPDQQKAYQEIKQALLTAPALGLPDLTKPFELFVDEKQGYAKGVLTQKLGPWRRPVAYLSKKLDPVAAGWPPCLRMVAAIAVLTKDAGKLTMGQPLVILAPHAVEALVKQPPDRWLSNARMTHYQAMLLDTDRVQFGPVVALNPATLLPLPEEGAPHDCLEILAETHGTRPDLTDQPIPDADHTWYTDGSSFLQEGQRKAGAAVTTETEVIWAGALPAGTSAQRAELIALTQALKMAEGKRLNVYTDSRYAFATAHIHGEIYRRRGWLTSEGREIKNKSEILALLKALFLPKRLSIIHCLGHQKGDSAEARGNRLADQAAREAAIKTPPDTSTLLIAGKRTADGSEFEKRTADGSEFESPKKKAKVE

SEQ ID NO: 2147 - protein, 2093 aa, synthetic construct
MPAAKRVKLDGGDKKYSIGLDIGTNSVGWAVITDEYKVPSKKFKVLGNTDRHSIKKNLIGALLFDSGETAEATRLKRTARRRYTRRKNRICYLQEIFSNEMAKVDDSFFHRLEESFLVEEDKKHERHPIFGNIVDEVAYHEKYPTIYHLRKKLVDSTDKADLRLIYLALAHMIKFRGHFLIEGDLNPDNSDVDKLFIQLVQTYNQLFEENPINASGVDAKAILSARLSKSRRLENLIAQLPGEKKNGLFGNLIALSLGLTPNFKSNFDLAEDAKLQLSKDTYDDDLDNLLAQIGDQYADLFLAAKNLSDAILLSDILRVNTEITKAPLSASMIKRYDEHHQDLTLLKALVRQQLPEKYKEIFFDQSKNGYAGYIDGGASQEEFYKFIKPILEKMDGTEELLVKLNREDLLRKQRTFDNGSIPHQIHLGELHAILRRQEDFYPFLKDNREKIEKILTFRIPYYVGPLARGNSRFAWMTRKSEETITPWNFEEVVDKGASAQSFIERMTNFDKNLPNEKVLPKHSLLYEYFTVYNELTKVKYVTEGMRKPAFLSGEQKKAIVDLLFKTNRKVTVKQLKEDYFKKIECFDSVEISGVEDRFNASLGTYHDLLKIIKDKDFLDNEENEDILEDIVLTLTLFEDREMIEERLKTYAHLFDDKVMKQLKRRRYTGWGRLSRKLINGIRDKQSGKTILDFLKSDGFANRNFMQLIHDDSLTFKEDIQKAQVSGQGDSLHEHIANLAGSPAIKKGILQTVKVVDELVKVMGRHKPENIVIEMARENQTTQKGQKNSRERMKRIEEGIKELGSQILKEHPVENTQLQNEKLYLYYLQNGRDMYVDQELDINRLSDYDVDHIVPQSFLKDDSIDNKVLTRSDKARGKSDNVPSEEVVKKMKNYWRQLLNAKLITQRKFDNLTKAERGGLSELDKAGFIKRQLVETRQITKHVAQILDSRMNTKYDENDKLIREVKVITLKSKLVSDFRKDFQFYKVREINNYHHAHDAYLNAVVGTALIKKYPKLESEFVYGDYKVYDVRKMIAKSEQEIGKATAKYFFYSNIMNFFKTEITLANGEIRKRPLIETNGETGEIVWDKGRDFATVRKVLSMPQVNIVKKTEVQTGGFSKESILPKRNSDKLIARKKDWDPKKYGGFDSPTVAYSVLVVAKVEKGKSKKLKSVKELLGITIMERSSFEKNPIDFLEAKGYKEVKKDLIIKLPKYSLFELENGRKRMLASAGELQKGNELALPSKYVNFLYLASHYEKLKGSPEDNEQKQLFVEQHKHYLDEIIEQISEFSKRVILADANLDKVLSAYNKHRDKPIREQAENIIHLFTLTNLGAPAAFKYFDTTIDRKRYTSTKEVLDATLIHQSITGLYETRIDLSQLGGDGGEAAAKPAPGGLGIEDEYRLHETSTEPDVSLGSTWLSDFPQAWAETGGMGLAVRQAPLIIPLKATSTPVSIQQYPMSHEARLGIKPHIQRLLDQGILVPCQSPWNTPLLPVKKPGTNDYRPVQDLREVNKRVEDIHPTVPNPYNLLSGLPPSHQWYTVLDLKDAFFCLRLHPTSQPLFAFEWRDPGMGISGQLTWTRLPQGFKNSPTLFNEALHRDLADFRIQHPDLILLQYVDDILLAATSELDCQQGTRALLQTLGDLGYRASAKKAQICQKQVKYLGYLLREGQRWLTEARKETVMGQPVPKTPRQLREFLGKAGFCRLFIPGFAEMAAPLYPLTKPGTLFSWGPDQQKAYQEIKQALLTAPALGLPDLTKPFELFVDEKQGYAKGVLTQKLGPWRRPVAYLSKKLDPVAAGWPPCLRMVAAIAVLTKDAGKLTMGQPLVILAPHAVEALVKQPPDRWLSNARMTHYQAMLLDTDRVQFGPVVALNPATLLPLPEEGAPHDCLEILAETHGTRPDLTDQPIPDADHTWYTDGSSFLQEGQRKAGAAVTTETEVIWAGALPAGTSAQRAELIALTQALKMAEGKRLNVYTDSRYAFATAHIHGEIYRRRGWLTSEGREIKNKSEILALLKALFLPKRLSIIHCLGHQKGDSAEARGNRLADQAAREAAIKTPPDTSTLLIAGKRTADGSEFEKRTADGSEFESPKKKAKVE

SEQ ID NO: 2148 - protein, 2091 aa, synthetic construct
MPAAKRVKLDGGDKKYSIGLDIGTNSVGWAVITDEYKVPSKKFKVLGNTDRHSIKKNLIGALLFDSGETAEATRLKRTARRRYTRRKNRICYLQEIFSNEMAKVDDSFFHRLEESFLVEEDKKHERHPIFGNIVDEVAYHEKYPTIYHLRKKLVDSTDKADLRLIYLALAHMIKFRGHFLIEGDLNPDNSDVDKLFIQLVQTYNQLFEENPINASGVDAKAILSARLSKSRRLENLIAQLPGEKKNGLFGNLIALSLGLTPNFKSNFDLAEDAKLQLSKDTYDDDLDNLLAQIGDQYADLFLAAKNLSDAILLSDILRVNTEITKAPLSASMIKRYDEHHQDLTLLKALVRQQLPEKYKEIFFDQSKNGYAGYIDGGASQEEFYKFIKPILEKMDGTEELLVKLNREDLLRKQRTFDNGSIPHQIHLGELHAILRRQEDFYPFLKDNREKIEKILTFRIPYYVGPLARGNSRFAWMTRKSEETITPWNFEEVVDKGASAQSFIERMTNFDKNLPNEKVLPKHSLLYEYFTVYNELTKVKYVTEGMRKPAFLSGEQKKAIVDLLFKTNRKVTVKQLKEDYFKKIECFDSVEISGVEDRFNASLGTYHDLLKIIKDKDFLDNEENEDILEDIVLTLTLFEDREMIEERLKTYAHLFDDKVMKQLKRRRYTGWGRLSRKLINGIRDKQSGKTILDFLKSDGFANRNFMQLIHDDSLTFKEDIQKAQVSGQGDSLHEHIANLAGSPAIKKGILQTVKVVDELVKVMGRHKPENIVIEMARENQTTQKGQKNSRERMKRIEEGIKELGSQILKEHPVENTQLQNEKLYLYYLQNGRDMYVDQELDINRLSDYDVDHIVPQSFLKDDSIDNKVLTRSDKARGKSDNVPSEEVVKKMKNYWRQLLNAKLITQRKFDNLTKAERGGLSELDKAGFIKRQLVETRQITKHVAQILDSRMNTKYDENDKLIREVKVITLKSKLVSDFRKDFQFYKVREINNYHHAHDAYLNAVVGTALIKKYPKLESEFVYGDYKVYDVRKMIAKSEQEIGKATAKYFFYSNIMNFFKTEITLANGEIRKRPLIETNGETGEIVWDKGRDFATVRKVLSMPQVNIVKKTEVQTGGFSKESILPKRNSDKLIARKKDWDPKKYGGFDSPTVAYSVLVVAKVEKGKSKKLKSVKELLGITIMERSSFEKNPIDFLEAKGYKEVKKDLIIKLPKYSLFELENGRKRMLASAGELQKGNELALPSKYVNFLYLASHYEKLKGSPEDNEQKQLFVEQHKHYLDEIIEQISEFSKRVILADANLDKVLSAYNKHRDKPIREQAENIIHLFTLTNLGAPAAFKYFDTTIDRKRYTSTKEVLDATLIHQSITGLYETRIDLSQLGGDGGGGSGGGGGLGIEDEYRLHETSTEPDVSLGSTWLSDFPQAWAETGGMGLAVRQAPLIIPLKATSTPVSIQQYPMSHEARLGIKPHIQRLLDQGILVPCQSPWNTPLLPVKKPGTNDYRPVQDLREVNKRVEDIHPTVPNPYNLLSGLPPSHQWYTVLDLKDAFFCLRLHPTSQPLFAFEWRDPGMGISGQLTWTRLPQGFKNSPTLFNEALHRDLADFRIQHPDLILLQYVDDILLAATSELDCQQGTRALLQTLGDLGYRASAKKAQICQKQVKYLGYLLREGQRWLTEARKETVMGQPVPKTPRQLREFLGKAGFCRLFIPGFAEMAAPLYPLTKPGTLFSWGPDQQKAYQEIKQALLTAPALGLPDLTKPFELFVDEKQGYAKGVLTQKLGPWRRPVAYLSKKLDPVAAGWPPCLRMVAAIAVLTKDAGKLTMGQPLVILAPHAVEALVKQPPDRWLSNARMTHYQAMLLDTDRVQFGPVVALNPATLLPLPEEGAPHDCLEILAETHGTRPDLTDQPIPDADHTWYTDGSSFLQEGQRKAGAAVTTETEVIWAGALPAGTSAQRAELIALTQALKMAEGKRLNVYTDSRYAFATAHIHGEIYRRRGWLTSEGREIKNKSEILALLKALFLPKRLSIIHCLGHQKGDSAEARGNRLADQAAREAAIKTPPDTSTLLIAGKRTADGSEFEKRTADGSEFESPKKKAKVE

SEQ ID NO: 2149 - protein, 2096 aa, synthetic construct
MPAAKRVKLDGGDKKYSIGLDIGTNSVGWAVITDEYKVPSKKFKVLGNTDRHSIKKNLIGALLFDSGETAEATRLKRTARRRYTRRKNRICYLQEIFSNEMAKVDDSFFHRLEESFLVEEDKKHERHPIFGNIVDEVAYHEKYPTIYHLRKKLVDSTDKADLRLIYLALAHMIKFRGHFLIEGDLNPDNSDVDKLFIQLVQTYNQLFEENPINASGVDAKAILSARLSKSRRLENLIAQLPGEKKNGLFGNLIALSLGLTPNFKSNFDLAEDAKLQLSKDTYDDDLDNLLAQIGDQYADLFLAAKNLSDAILLSDILRVNTEITKAPLSASMIKRYDEHHQDLTLLKALVRQQLPEKYKEIFFDQSKNGYAGYIDGGASQEEFYKFIKPILEKMDGTEELLVKLNREDLLRKQRTFDNGSIPHQIHLGELHAILRRQEDFYPFLKDNREKIEKILTFRIPYYVGPLARGNSRFAWMTRKSEETITPWNFEEVVDKGASAQSFIERMTNFDKNLPNEKVLPKHSLLYEYFTVYNELTKVKYVTEGMRKPAFLSGEQKKAIVDLLFKTNRKVTVKQLKEDYFKKIECFDSVEISGVEDRFNASLGTYHDLLKIIKDKDFLDNEENEDILEDIVLTLTLFEDREMIEERLKTYAHLFDDKVMKQLKRRRYTGWGRLSRKLINGIRDKQSGKTILDFLKSDGFANRNFMQLIHDDSLTFKEDIQKAQVSGQGDSLHEHIANLAGSPAIKKGILQTVKVVDELVKVMGRHKPENIVIEMARENQTTQKGQKNSRERMKRIEEGIKELGSQILKEHPVENTQLQNEKLYLYYLQNGRDMYVDQELDINRLSDYDVDHIVPQSFLKDDSIDNKVLTRSDKARGKSDNVPSEEVVKKMKNYWRQLLNAKLITQRKFDNLTKAERGGLSELDKAGFIKRQLVETRQITKHVAQILDSRMNTKYDENDKLIREVKVITLKSKLVSDFRKDFQFYKVREINNYHHAHDAYLNAVVGTALIKKYPKLESEFVYGDYKVYDVRKMIAKSEQEIGKATAKYFFYSNIMNFFKTEITLANGEIRKRPLIETNGETGEIVWDKGRDFATVRKVLSMPQVNIVKKTEVQTGGFSKESILPKRNSDKLIARKKDWDPKKYGGFDSPTVAYSVLVVAKVEKGKSKKLKSVKELLGITIMERSSFEKNPIDFLEAKGYKEVKKDLIIKLPKYSLFELENGRKRMLASAGELQKGNELALPSKYVNFLYLASHYEKLKGSPEDNEQKQLFVEQHKHYLDEIIEQISEFSKRVILADANLDKVLSAYNKHRDKPIREQAENIIHLFTLTNLGAPAAFKYFDTTIDRKRYTSTKEVLDATLIHQSITGLYETRIDLSQLGGDGGGSSPAPEAAAKGGLGIEDEYRLHETSTEPDVSLGSTWLSDFPQAWAETGGMGLAVRQAPLIIPLKATSTPVSIQQYPMSHEARLGIKPHIQRLLDQGILVPCQSPWNTPLLPVKKPGTNDYRPVQDLREVNKRVEDIHPTVPNPYNLLSGLPPSHQWYTVLDLKDAFFCLRLHPTSQPLFAFEWRDPGMGISGQLTWTRLPQGFKNSPTLFNEALHRDLADFRIQHPDLILLQYVDDILLAATSELDCQQGTRALLQTLGDLGYRASAKKAQICQKQVKYLGYLLREGQRWLTEARKETVMGQPVPKTPRQLREFLGKAGFCRLFIPGFAEMAAPLYPLTKPGTLFSWGPDQQKAYQEIKQALLTAPALGLPDLTKPFELFVDEKQGYAKGVLTQKLGPWRRPVAYLSKKLDPVAAGWPPCLRMVAAIAVLTKDAGKLTMGQPLVILAPHAVEALVKQPPDRWLSNARMTHYQAMLLDTDRVQFGPVVALNPATLLPLPEEGAPHDCLEILAETHGTRPDLTDQPIPDADHTWYTDGSSFLQEGQRKAGAAVTTETEVIWAGALPAGTSAQRAELIALTQALKMAEGKRLNVYTDSRYAFATAHIHGEIYRRRGWLTSEGREIKNKSEILALLKALFLPKRLSIIHCLGHQKGDSAEARGNRLADQAAREAAIKTPPDTSTLLIAGKRTADGSEFEKRTADGSEFESPKKKAKVE

SEQ ID NO: 2150 - protein, 2091 aa, synthetic construct; identical to SEQ ID NO: 2057

SEQ ID NO: 2151 - protein, 2094 aa, synthetic construct
MPAAKRVKLDGGDKKYSIGLDIGTNSVGWAVITDEYKVPSKKFKVLGNTDRHSIKKNLIGALLFDSGETAEATRLKRTARRRYTRRKNRICYLQEIFSNEMAKVDDSFFHRLEESFLVEEDKKHERHPIFGNIVDEVAYHEKYPTIYHLRKKLVDSTDKADLRLIYLALAHMIKFRGHFLIEGDLNPDNSDVDKLFIQLVQTYNQLFEENPINASGVDAKAILSARLSKSRRLENLIAQLPGEKKNGLFGNLIALSLGLTPNFKSNFDLAEDAKLQLSKDTYDDDLDNLLAQIGDQYADLFLAAKNLSDAILLSDILRVNTEITKAPLSASMIKRYDEHHQDLTLLKALVRQQLPEKYKEIFFDQSKNGYAGYIDGGASQEEFYKFIKPILEKMDGTEELLVKLNREDLLRKQRTFDNGSIPHQIHLGELHAILRRQEDFYPFLKDNREKIEKILTFRIPYYVGPLARGNSRFAWMTRKSEETITPWNFEEVVDKGASAQSFIERMTNFDKNLPNEKVLPKHSLLYEYFTVYNELTKVKYVTEGMRKPAFLSGEQKKAIVDLLFKTNRKVTVKQLKEDYFKKIECFDSVEISGVEDRFNASLGTYHDLLKIIKDKDFLDNEENEDILEDIVLTLTLFEDREMIEERLKTYAHLFDDKVMKQLKRRRYTGWGRLSRKLINGIRDKQSGKTILDFLKSDGFANRNFMQLIHDDSLTFKEDIQKAQVSGQGDSLHEHIANLAGSPAIKKGILQTVKVVDELVKVMGRHKPENIVIEMARENQTTQKGQKNSRERMKRIEEGIKELGSQILKEHPVENTQLQNEKLYLYYLQNGRDMYVDQELDINRLSDYDVDHIVPQSFLKDDSIDNKVLTRSDKARGKSDNVPSEEVVKKMKNYWRQLLNAKLITQRKFDNLTKAERGGLSELDKAGFIKRQLVETRQITKHVAQILDSRMNTKYDENDKLIREVKVITLKSKLVSDFRKDFQFYKVREINNYHHAHDAYLNAVVGTALIKKYPKLESEFVYGDYKVYDVRKMIAKSEQEIGKATAKYFFYSNIMNFFKTEITLANGEIRKRPLIETNGETGEIVWDKGRDFATVRKVLSMPQVNIVKKTEVQTGGFSKESILPKRNSDKLIARKKDWDPKKYGGFDSPTVAYSVLVVAKVEKGKSKKLKSVKELLGITIMERSSFEKNPIDFLEAKGYKEVKKDLIIKLPKYSLFELENGRKRMLASAGELQKGNELALPSKYVNFLYLASHYEKLKGSPEDNEQKQLFVEQHKHYLDEIIEQISEFSKRVILADANLDKVLSAYNKHRDKPIREQAENIIHLFTLTNLGAPAAFKYFDTTIDRKRYTSTKEVLDATLIHQSITGLYETRIDLSQLGGDGGPAPGGGGGSGGLGIEDEYRLHETSTEPDVSLGSTWLSDFPQAWAETGGMGLAVRQAPLIIPLKATSTPVSIQQYPMSHEARLGIKPHIQRLLDQGILVPCQSPWNTPLLPVKKPGTNDYRPVQDLREVNKRVEDIHPTVPNPYNLLSGLPPSHQWYTVLDLKDAFFCLRLHPTSQPLFAFEWRDPGMGISGQLTWTRLPQGFKNSPTLFNEALHRDLADFRIQHPDLILLQYVDDILLAATSELDCQQGTRALLQTLGDLGYRASAKKAQICQKQVKYLGYLLREGQRWLTEARKETVMGQPVPKTPRQLREFLGKAGFCRLFIPGFAEMAAPLYPLTKPGTLFSWGPDQQKAYQEIKQALLTAPALGLPDLTKPFELFVDEKQGYAKGVLTQKLGPWRRPVAYLSKKLDPVAAGWPPCLRMVAAIAVLTKDAGKLTMGQPLVILAPHAVEALVKQPPDRWLSNARMTHYQAMLLDTDRVQFGPVVALNPATLLPLPEEGAPHDCLEILAETHGTRPDLTDQPIPDADHTWYTDGSSFLQEGQRKAGAAVTTETEVIWAGALPAGTSAQRAELIALTQALKMAEGKRLNVYTDSRYAFATAHIHGEIYRRRGWLTSEGREIKNKSEILALLKALFLPKRLSIIHCLGHQKGDSAEARGNRLADQAAREAAIKTPPDTSTLLIAGKRTADGSEFEKRTADGSEFESPKKKAKVE

SEQ ID NO: 2152 - protein, 2093 aa, synthetic construct
MPAAKRVKLDGGDKKYSIGLDIGTNSVGWAVITDEYKVPSKKFKVLGNTDRHSIKKNLIGALLFDSGETAEATRLKRTARRRYTRRKNRICYLQEIFSNEMAKVDDSFFHRLEESFLVEEDKKHERHPIFGNIVDEVAYHEKYPTIYHLRKKLVDSTDKADLRLIYLALAHMIKFRGHFLIEGDLNPDNSDVDKLFIQLVQTYNQLFEENPINASGVDAKAILSARLSKSRRLENLIAQLPGEKKNGLFGNLIALSLGLTPNFKSNFDLAEDAKLQLSKDTYDDDLDNLLAQIGDQYADLFLAAKNLSDAILLSDILRVNTEITKAPLSASMIKRYDEHHQDLTLLKALVRQQLPEKYKEIFFDQSKNGYAGYIDGGASQEEFYKFIKPILEKMDGTEELLVKLNREDLLRKQRTFDNGSIPHQIHLGELHAILRRQEDFYPFLKDNREKIEKILTFRIPYYVGPLARGNSRFAWMTRKSEETITPWNFEEVVDKGASAQSFIERMTNFDKNLPNEKVLPKHSLLYEYFTVYNELTKVKYVTEGMRKPAFLSGEQKKAIVDLLFKTNRKVTVKQLKEDYFKKIECFDSVEISGVEDRFNASLGTYHDLLKIIKDKDFLDNEENEDILEDIVLTLTLFEDREMIEERLKTYAHLFDDKVMKQLKRRRYTGWGRLSRKLINGIRDKQSGKTILDFLKSDGFANRNFMQLIHDDSLTFKEDIQKAQVSGQGDSLHEHIANLAGSPAIKKGILQTVKVVDELVKVMGRHKPENIVIEMARENQTTQKGQKNSRERMKRIEEGIKELGSQILKEHPVENTQLQNEKLYLYYLQNGRDMYVDQELDINRLSDYDVDHIVPQSFLKDDSIDNKVLTRSDKARGKSDNVPSEEVVKKMKNYWRQLLNAKLITQRKFDNLTKAERGGLSELDKAGFIKRQLVETRQITKHVAQILDSRMNTKYDENDKLIREVKVITLKSKLVSDFRKDFQFYKVREINNYHHAHDAYLNAVVGTALIKKYPKLESEFVYGDYKVYDVRKMIAKSEQEIGKATAKYFFYSNIMNFFKTEITLANGEIRKRPLIETNGETGEIVWDKGRDFATVRKVLSMPQVNIVKKTEVQTGGFSKESILPKRNSDKLIARKKDWDPKKYGGFDSPTVAYSVLVVAKVEKGKSKKLKSVKELLGITIMERSSFEKNPIDFLEAKGYKEVKKDLIIKLPKYSLFELENGRKRMLASAGELQKGNELALPSKYVNFLYLASHYEKLKGSPEDNEQKQLFVEQHKHYLDEIIEQISEFSKRVILADANLDKVLSAYNKHRDKPIREQAENIIHLFTLTNLGAPAAFKYFDTTIDRKRYTSTKEVLDATLIHQSITGLYETRIDLSQLGGDGGEAAAKGGGGGLGIEDEYRLHETSTEPDVSLGSTWLSDFPQAWAETGGMGLAVRQAPLIIPLKATSTPVSIQQYPMSHEARLGIKPHIQRLLDQGILVPCQSPWNTPLLPVKKPGTNDYRPVQDLREVNKRVEDIHPTVPNPYNLLSGLPPSHQWYTVLDLKDAFFCLRLHPTSQPLFAFEWRDPGMGISGQLTWTRLPQGFKNSPTLFNEALHRDLADFRIQHPDLILLQYVDDILLAATSELDCQQGTRALLQTLGDLGYRASAKKAQICQKQVKYLGYLLREGQRWLTEARKETVMGQPVPKTPRQLREFLGKAGFCRLFIPGFAEMAAPLYPLTKPGTLFSWGPDQQKAYQEIKQALLTAPALGLPDLTKPFELFVDEKQGYAKGVLTQKLGPWRRPVAYLSKKLDPVAAGWPPCLRMVAAIAVLTKDAGKLTMGQPLVILAPHAVEALVKQPPDRWLSNARMTHYQAMLLDTDRVQFGPVVALNPATLLPLPEEGAPHDCLEILAETHGTRPDLTDQPIPDADHTWYTDGSSFLQEGQRKAGAAVTTETEVIWAGALPAGTSAQRAELIALTQALKMAEGKRLNVYTDSRYAFATAHIHGEIYRRRGWLTSEGREIKNKSEILALLKALFLPKRLSIIHCLGHQKGDSAEARGNRLADQAAREAAIKTPPDTSTLLIAGKRTADGSEFEKRTADGSEFESPKKKAKVE

SEQ ID NO: 2153 - protein, 2094 aa, synthetic construct
MPAAKRVKLDGGDKKYSIGLDIGTNSVGWAVITDEYKVPSKKFKVLGNTDRHSIKKNLIGALLFDSGETAEATRLKRTARRRYTRRKNRICYLQEIFSNEMAKVDDSFFHRLEESFLVEEDKKHERHPIFGNIVDEVAYHEKYPTIYHLRKKLVDSTDKADLRLIYLALAHMIKFRGHFLIEGDLNPDNSDVDKLFIQLVQTYNQLFEENPINASGVDAKAILSARLSKSRRLENLIAQLPGEKKNGLFGNLIALSLGLTPNFKSNFDLAEDAKLQLSKDTYDDDLDNLLAQIGDQYADLFLAAKNLSDAILLSDILRVNTEITKAPLSASMIKRYDEHHQDLTLLKALVRQQLPEKYKEIFFDQSKNGYAGYIDGGASQEEFYKFIKPILEKMDGTEELLVKLNREDLLRKQRTFDNGSIPHQIHLGELHAILRRQEDFYPFLKDNREKIEKILTFRIPYYVGPLARGNSRFAWMTRKSEETITPWNFEEVVDKGASAQSFIERMTNFDKNLPNEKVLPKHSLLYEYFTVYNELTKVKYVTEGMRKPAFLSGEQKKAIVDLLFKTNRKVTVKQLKEDYFKKIECFDSVEISGVEDRFNASLGTYHDLLKIIKDKDFLDNEENEDILEDIVLTLTLFEDREMIEERLKTYAHLFDDKVMKQLKRRRYTGWGRLSRKLINGIRDKQSGKTILDFLKSDGFANRNFMQLIHDDSLTFKEDIQKAQVSGQGDSLHEHIANLAGSPAIKKGILQTVKVVDELVKVMGRHKPENIVIEMARENQTTQKGQKNSRERMKRIEEGIKELGSQILKEHPVENTQLQNEKLYLYYLQNGRDMYVDQELDINRLSDYDVDHIVPQSFLKDDSIDNKVLTRSDKARGKSDNVPSEEVVKKMKNYWRQLLNAKLITQRKFDNLTKAERGGLSELDKAGFIKRQLVETRQITKHVAQILDSRMNTKYDENDKLIREVKVITLKSKLVSDFRKDFQFYKVREINNYHHAHDAYLNAVVGTALIKKYPKLESEFVYGDYKVYDVRKMIAKSEQEIGKATAKYFFYSNIMNFFKTEITLANGEIRKRPLIETNGETGEIVWDKGRDFATVRKVLSMPQVNIVKKTEVQTGGFSKESILPKRNSDKLIARKKDWDPKKYGGFDSPTVAYSVLVVAKVEKGKSKKLKSVKELLGITIMERSSFEKNPIDFLEAKGYKEVKKDLIIKLPKYSLFELENGRKRMLASAGELQKGNELALPSKYVNFLYLASHYEKLKGSPEDNEQKQLFVEQHKHYLDEIIEQISEFSKRVILADANLDKVLSAYNKHRDKPIREQAENIIHLFTLTNLGAPAAFKYFDTTIDRKRYTSTKEVLDATLIHQSITGLYETRIDLSQLGGDGGPAPGGSGGGGGLGIEDEYRLHETSTEPDVSLGSTWLSDFPQAWAETGGMGLAVRQAPLIIPLKATSTPVSIQQYPMSHEARLGIKPHIQRLLDQGILVPCQSPWNTPLLPVKKPGTNDYRPVQDLREVNKRVEDIHPTVPNPYNLLSGLPPSHQWYTVLDLKDAFFCLRLHPTSQPLFAFEWRDPGMGISGQLTWTRLPQGFKNSPTLFNEALHRDLADFRIQHPDLILLQYVDDILLAATSELDCQQGTRALLQTLGDLGYRASAKKAQICQKQVKYLGYLLREGQRWLTEARKETVMGQPVPKTPRQLREFLGKAGFCRLFIPGFAEMAAPLYPLTKPGTLFSWGPDQQKAYQEIKQALLTAPALGLPDLTKPFELFVDEKQGYAKGVLTQKLGPWRRPVAYLSKKLDPVAAGWPPCLRMVAAIAVLTKDAGKLTMGQPLVILAPHAVEALVKQPPDRWLSNARMTHYQAMLLDTDRVQFGPVVALNPATLLPLPEEGAPHDCLEILAETHGTRPDLTDQPIPDADHTWYTDGSSFLQEGQRKAGAAVTTETEVIWAGALPAGTSAQRAELIALTQALKMAEGKRLNVYTDSRYAFATAHIHGEIYRRRGWLTSEGREIKNKSEILALLKALFLPKRLSIIHCLGHQKGDSAEARGNRLADQAAREAAIKTPPDTSTLLIAGKRTADGSEFEKRTADGSEFESPKKKAKVE

SEQ ID NO: 2154 - protein, 2094 aa, synthetic construct
MPAAKRVKLDGGDKKYSIGLDIGTNSVGWAVITDEYKVPSKKFKVLGNTDRHSIKKNLIGALLFDSGETAEATRLKRTARRRYTRRKNRICYLQEIFSNEMAKVDDSFFHRLEESFLVEEDKKHERHPIFGNIVDEVAYHEKYPTIYHLRKKLVDSTDKADLRLIYLALAHMIKFRGHFLIEGDLNPDNSDVDKLFIQLVQTYNQLFEENPINASGVDAKAILSARLSKSRRLENLIAQLPGEKKNGLFGNLIALSLGLTPNFKSNFDLAEDAKLQLSKDTYDDDLDNLLAQIGDQYADLFLAAKNLSDAILLSDILRVNTEITKAPLSASMIKRYDEHHQDLTLLKALVRQQLPEKYKEIFFDQSKNGYAGYIDGGASQEEFYKFIKPILEKMDGTEELLVKLNREDLLRKQRTFDNGSIPHQIHLGELHAILRRQEDFYPFLKDNREKIEKILTFRIPYYVGPLARGNSRFAWMTRKSEETITPWNFEEVVDKGASAQSFIERMTNFDKNLPNEKVLPKHSLLYEYFTVYNELTKVKYVTEGMRKPAFLSGEQKKAIVDLLFKTNRKVTVKQLKEDYFKKIECFDSVEISGVEDRFNASLGTYHDLLKIIKDKDFLDNEENEDILEDIVLTLTLFEDREMIEERLKTYAHLFDDKVMKQLKRRRYTGWGRLSRKLINGIRDKQSGKTILDFLKSDGFANRNFMQLIHDDSLTFKEDIQKAQVSGQGDSLHEHIANLAGSPAIKKGILQTVKVVDELVKVMGRHKPENIVIEMARENQTTQKGQKNSRERMKRIEEGIKELGSQILKEHPVENTQLQNEKLYLYYLQNGRDMYVDQELDINRLSDYDVDHIVPQSFLKDDSIDNKVLTRSDKARGKSDNVPSEEVVKKMKNYWRQLLNAKLITQRKFDNLTKAERGGLSELDKAGFIKRQLVETRQITKHVAQILDSRMNTKYDENDKLIREVKVITLKSKLVSDFRKDFQFYKVREINNYHHAHDAYLNAVVGTALIKKYPKLESEFVYGDYKVYDVRKMIAKSEQEIGKATAKYFFYSNIMNFFKTEITLANGEIRKRPLIETNGETGEIVWDKGRDFATVRKVLSMPQVNIVKKTEVQTGGFSKESILPKRNSDKLIARKKDWDPKKYGGFDSPTVAYSVLVVAKVEKGKSKKLKSVKELLGITIMERSSFEKNPIDFLEAKGYKEVKKDLIIKLPKYSLFELENGRKRMLASAGELQKGNELALPSKYVNFLYLASHYEKLKGSPEDNEQKQLFVEQHKHYLDEIIEQISEFSKRVILADANLDKVLSAYNKHRDKPIREQAENIIHLFTLTNLGAPAAFKYFDTTIDRKRYTSTKEVLDATLIHQSITGLYETRIDLSQLGGDGGGGGPAPGGSGGLGIEDEYRLHETSTEPDVSLGSTWLSDFPQAWAETGGMGLAVRQAPLIIPLKATSTPVSIQQYPMSHEARLGIKPHIQRLLDQGILVPCQSPWNTPLLPVKKPGTNDYRPVQDLREVNKRVEDIHPTVPNPYNLLSGLPPSHQWYTVLDLKDAFFCLRLHPTSQPLFAFEWRDPGMGISGQLTWTRLPQGFKNSPTLFNEALHRDLADFRIQHPDLILLQYVDDILLAATSELDCQQGTRALLQTLGDLGYRASAKKAQICQKQVKYLGYLLREGQRWLTEARKETVMGQPVPKTPRQLREFLGKAGFCRLFIPGFAEMAAPLYPLTKPGTLFSWGPDQQKAYQEIKQALLTAPALGLPDLTKPFELFVDEKQGYAKGVLTQKLGPWRRPVAYLSKKLDPVAAGWPPCLRMVAAIAVLTKDAGKLTMGQPLVILAPHAVEALVKQPPDRWLSNARMTHYQAMLLDTDRVQFGPVVALNPATLLPLPEEGAPHDCLEILAETHGTRPDLTDQPIPDADHTWYTDGSSFLQEGQRKAGAAVTTETEVIWAGALPAGTSAQRAELIALTQALKMAEGKRLNVYTDSRYAFATAHIHGEIYRRRGWLTSEGREIKNKSEILALLKALFLPKRLSIIHCLGHQKGDSAEARGNRLADQAAREAAIKTPPDTSTLLIAGKRTADGSEFEKRTADGSEFESPKKKAKVE

SEQ ID NO: 2155 - protein, 2097 aa, synthetic construct; identical to SEQ ID NO: 2056

SEQ ID NO: 2156 - protein, 2094 aa, synthetic construct
MPAAKRVKLDGGDKKYSIGLDIGTNSVGWAVITDEYKVPSKKFKVLGNTDRHSIKKNLIGALLFDSGETAEATRLKRTARRRYTRRKNRICYLQEIFSNEMAKVDDSFFHRLEESFLVEEDKKHERHPIFGNIVDEVAYHEKYPTIYHLRKKLVDSTDKADLRLIYLALAHMIKFRGHFLIEGDLNPDNSDVDKLFIQLVQTYNQLFEENPINASGVDAKAILSARLSKSRRLENLIAQLPGEKKNGLFGNLIALSLGLTPNFKSNFDLAEDAKLQLSKDTYDDDLDNLLAQIGDQYADLFLAAKNLSDAILLSDILRVNTEITKAPLSASMIKRYDEHHQDLTLLKALVRQQLPEKYKEIFFDQSKNGYAGYIDGGASQEEFYKFIKPILEKMDGTEELLVKLNREDLLRKQRTFDNGSIPHQIHLGELHAILRRQEDFYPFLKDNREKIEKILTFRIPYYVGPLARGNSRFAWMTRKSEETITPWNFEEVVDKGASAQSFIERMTNFDKNLPNEKVLPKHSLLYEYFTVYNELTKVKYVTEGMRKPAFLSGEQKKAIVDLLFKTNRKVTVKQLKEDYFKKIECFDSVEISGVEDRFNASLGTYHDLLKIIKDKDFLDNEENEDILEDIVLTLTLFEDREMIEERLKTYAHLFDDKVMKQLKRRRYTGWGRLSRKLINGIRDKQSGKTILDFLKSDGFANRNFMQLIHDDSLTFKEDIQKAQVSGQGDSLHEHIANLAGSPAIKKGILQTVKVVDELVKVMGRHKPENIVIEMARENQTTQKGQKNSRERMKRIEEGIKELGSQILKEHPVENTQLQNEKLYLYYLQNGRDMYVDQELDINRLSDYDVDHIVPQSFLKDDSIDNKVLTRSDKARGKSDNVPSEEVVKKMKNYWRQLLNAKLITQRKFDNLTKAERGGLSELDKAGFIKRQLVETRQITKHVAQILDSRMNTKYDENDKLIREVKVITLKSKLVSDFRKDFQFYKVREINNYHHAHDAYLNAVVGTALIKKYPKLESEFVYGDYKVYDVRKMIAKSEQEIGKATAKYFFYSNIMNFFKTEITLANGEIRKRPLIETNGETGEIVWDKGRDFATVRKVLSMPQVNIVKKTEVQTGGFSKESILPKRNSDKLIARKKDWDPKKYGGFDSPTVAYSVLVVAKVEKGKSKKLKSVKELLGITIMERSSFEKNPIDFLEAKGYKEVKKDLIIKLPKYSLFELENGRKRMLASAGELQKGNELALPSKYVNFLYLASHYEKLKGSPEDNEQKQLFVEQHKHYLDEIIEQISEFSKRVILADANLDKVLSAYNKHRDKPIREQAENIIHLFTLTNLGAPAAFKYFDTTIDRKRYTSTKEVLDATLIHQSITGLYETRIDLSQLGGDGGGSSPAPGGSGGLGIEDEYRLHETSTEPDVSLGSTWLSDFPQAWAETGGMGLAVRQAPLIIPLKATSTPVSIQQYPMSHEARLGIKPHIQRLLDQGILVPCQSPWNTPLLPVKKPGTNDYRPVQDLREVNKRVEDIHPTVPNPYNLLSGLPPSHQWYTVLDLKDAFFCLRLHPTSQPLFAFEWRDPGMGISGQLTWTRLPQGFKNSPTLFNEALHRDLADFRIQHPDLILLQYVDDILLAATSELDCQQGTRALLQTLGDLGYRASAKKAQICQKQVKYLGYLLREGQRWLTEARKETVMGQPVPKTPRQLREFLGKAGFCRLFIPGFAEMAAPLYPLTKPGTLFSWGPDQQKAYQEIKQALLTAPALGLPDLTKPFELFVDEKQGYAKGVLTQKLGPWRRPVAYLSKKLDPVAAGWPPCLRMVAAIAVLTKDAGKLTMGQPLVILAPHAVEALVKQPPDRWLSNARMTHYQAMLLDTDRVQFGPVVALNPATLLPLPEEGAPHDCLEILAETHGTRPDLTDQPIPDADHTWYTDGSSFLQEGQRKAGAAVTTETEVIWAGALPAGTSAQRAELIALTQALKMAEGKRLNVYTDSRYAFATAHIHGEIYRRRGWLTSEGREIKNKSEILALLKALFLPKRLSIIHCLGHQKGDSAEARGNRLADQAAREAAIKTPPDTSTLLIAGKRTADGSEFEKRTADGSEFESPKKKAKVE

SEQ ID NO: 2157 - protein, 2095 aa, synthetic construct
MPAAKRVKLDGGDKKYSIGLDIGTNSVGWAVITDEYKVPSKKFKVLGNTDRHSIKKNLIGALLFDSGETAEATRLKRTARRRYTRRKNRICYLQEIFSNEMAKVDDSFFHRLEESFLVEEDKKHERHPIFGNIVDEVAYHEKYPTIYHLRKKLVDSTDKADLRLIYLALAHMIKFRGHFLIEGDLNPDNSDVDKLFIQLVQTYNQLFEENPINASGVDAKAILSARLSKSRRLENLIAQLPGEKKNGLFGNLIALSLGLTPNFKSNFDLAEDAKLQLSKDTYDDDLDNLLAQIGDQYADLFLAAKNLSDAILLSDILRVNTEITKAPLSASMIKRYDEHHQDLTLLKALVRQQLPEKYKEIFFDQSKNGYAGYIDGGASQEEFYKFIKPILEKMDGTEELLVKLNREDLLRKQRTFDNGSIPHQIHLGELHAILRRQEDFYPFLKDNREKIEKILTFRIPYYVGPLARGNSRFAWMTRKSEETITPWNFEEVVDKGASAQSFIERMTNFDKNLPNEKVLPKHSLLYEYFTVYNELTKVKYVTEGMRKPAFLSGEQKKAIVDLLFKTNRKVTVKQLKEDYFKKIECFDSVEISGVEDRFNASLGTYHDLLKIIKDKDFLDNEENEDILEDIVLTLTLFEDREMIEERLKTYAHLFDDKVMKQLKRRRYTGWGRLSRKLINGIRDKQSGKTILDFLKSDGFANRNFMQLIHDDSLTFKEDIQKAQVSGQGDSLHEHIANLAGSPAIKKGILQTVKVVDELVKVMGRHKPENIVIEMARENQTTQKGQKNSRERMKRIEEGIKELGSQILKEHPVENTQLQNEKLYLYYLQNGRDMYVDQELDINRLSDYDVDHIVPQSFLKDDSIDNKVLTRSDKARGKSDNVPSEEVVKKMKNYWRQLLNAKLITQRKFDNLTKAERGGLSELDKAGFIKRQLVETRQITKHVAQILDSRMNTKYDENDKLIREVKVITLKSKLVSDFRKDFQFYKVREINNYHHAHDAYLNAVVGTALIKKYPKLESEFVYGDYKVYDVRKMIAKSEQEIGKATAKYFFYSNIMNFFKTEITLANGEIRKRPLIETNGETGEIVWDKGRDFATVRKVLSMPQVNIVKKTEVQTGGFSKESILPKRNSDKLIARKKDWDPKKYGGFDSPTVAYSVLVVAKVEKGKSKKLKSVKELLGITIMERSSFEKNPIDFLEAKGYKEVKKDLIIKLPKYSLFELENGRKRMLASAGELQKGNELALPSKYVNFLYLASHYEKLKGSPEDNEQKQLFVEQHKHYLDEIIEQISEFSKRVILADANLDKVLSAYNKHRDKPIREQAENIIHLFTLTNLGAPAAFKYFDTTIDRKRYTSTKEVLDATLIHQSITGLYETRIDLSQLGGDGGGGGGSGGGGSGGLGIEDEYRLHETSTEPDVSLGSTWLSDFPQAWAETGGMGLAVRQAPLIIPLKATSTPVSIQQYPMSHEARLGIKPHIQRLLDQGILVPCQSPWNTPLLPVKKPGTNDYRPVQDLREVNKRVEDIHPTVPNPYNLLSGLPPSHQWYTVLDLKDAFFCLRLHPTSQPLFAFEWRDPGMGISGQLTWTRLPQGFKNSPTLFNEALHRDLADFRIQHPDLILLQYVDDILLAATSELDCQQGTRALLQTLGDLGYRASAKKAQICQKQVKYLGYLLREGQRWLTEARKETVMGQPVPKTPRQLREFLGKAGFCRLFIPGFAEMAAPLYPLTKPGTLFSWGPDQQKAYQEIKQALLTAPALGLPDLTKPFELFVDEKQGYAKGVLTQKLGPWRRPVAYLSKKLDPVAAGWPPCLRMVAAIAVLTKDAGKLTMGQPLVILAPHAVEALVKQPPDRWLSNARMTHYQAMLLDTDRVQFGPVVALNPATLLPLPEEGAPHDCLEILAETHGTRPDLTDQPIPDADHTWYTDGSSFLQEGQRKAGAAVTTETEVIWAGALPAGTSAQRAELIALTQALKMAEGKRLNVYTDSRYAFATAHIHGEIYRRRGWLTSEGREIKNKSEILALLKALFLPKRLSIIHCLGHQKGDSAEARGNRLADQAAREAAIKTPPDTSTLLIAGKRTADGSEFEKRTADGSEFESPKKKAKVE

SEQ ID NO: 2158 - protein, 2091 aa, synthetic construct
MPAAKRVKLDGGDKKYSIGLDIGTNSVGWAVITDEYKVPSKKFKVLGNTDRHSIKKNLIGALLFDSGETAEATRLKRTARRRYTRRKNRICYLQEIFSNEMAKVDDSFFHRLEESFLVEEDKKHERHPIFGNIVDEVAYHEKYPTIYHLRKKLVDSTDKADLRLIYLALAHMIKFRGHFLIEGDLNPDNSDVDKLFIQLVQTYNQLFEENPINASGVDAKAILSARLSKSRRLENLIAQLPGEKKNGLFGNLIALSLGLTPNFKSNFDLAEDAKLQLSKDTYDDDLDNLLAQIGDQYADLFLAAKNLSDAILLSDILRVNTEITKAPLSASMIKRYDEHHQDLTLLKALVRQQLPEKYKEIFFDQSKNGYAGYIDGGASQEEFYKFIKPILEKMDGTEELLVKLNREDLLRKQRTFDNGSIPHQIHLGELHAILRRQEDFYPFLKDNREKIEKILTFRIPYYVGPLARGNSRFAWMTRKSEETITPWNFEEVVDKGASAQSFIERMTNFDKNLPNEKVLPKHSLLYEYFTVYNELTKVKYVTEGMRKPAFLSGEQKKAIVDLLFKTNRKVTVKQLKEDYFKKIECFDSVEISGVEDRFNASLGTYHDLLKIIKDKDFLDNEENEDILEDIVLTLTLFEDREMIEERLKTYAHLFDDKVMKQLKRRRYTGWGRLSRKLINGIRDKQSGKTILDFLKSDGFANRNFMQLIHDDSLTFKEDIQKAQVSGQGDSLHEHIANLAGSPAIKKGILQTVKVVDELVKVMGRHKPENIVIEMARENQTTQKGQKNSRERMKRIEEGIKELGSQILKEHPVENTQLQNEKLYLYYLQNGRDMYVDQELDINRLSDYDVDHIVPQSFLKDDSIDNKVLTRSDKARGKSDNVPSEEVVKKMKNYWRQLLNAKLITQRKFDNLTKAERGGLSELDKAGFIKRQLVETRQITKHVAQILDSRMNTKYDENDKLIREVKVITLKSKLVSDFRKDFQFYKVREINNYHHAHDAYLNAVVGTALIKKYPKLESEFVYGDYKVYDVRKMIAKSEQEIGKATAKYFFYSNIMNFFKTEITLANGEIRKRPLIETNGETGEIVWDKGRDFATVRKVLSMPQVNIVKKTEVQTGGFSKESILPKRNSDKLIARKKDWDPKKYGGFDSPTVAYSVLVVAKVEKGKSKKLKSVKELLGITIMERSSFEKNPIDFLEAKGYKEVKKDLIIKLPKYSLFELENGRKRMLASAGELQKGNELALPSKYVNFLYLASHYEKLKGSPEDNEQKQLFVEQHKHYLDEIIEQISEFSKRVILADANLDKVLSAYNKHRDKPIREQAENIIHLFTLTNLGAPAAFKYFDTTIDRKRYTSTKEVLDATLIHQSITGLYETRIDLSQLGGDGGGGSGSSGGLGIEDEYRLHETSTEPDVSLGSTWLSDFPQAWAETGGMGLAVRQAPLIIPLKATSTPVSIQQYPMSHEARLGIKPHIQRLLDQGILVPCQSPWNTPLLPVKKPGTNDYRPVQDLREVNKRVEDIHPTVPNPYNLLSGLPPSHQWYTVLDLKDAFFCLRLHPTSQPLFAFEWRDPGMGISGQLTWTRLPQGFKNSPTLFNEALHRDLADFRIQHPDLILLQYVDDILLAATSELDCQQGTRALLQTLGDLGYRASAKKAQICQKQVKYLGYLLREGQRWLTEARKETVMGQPVPKTPRQLREFLGKAGFCRLFIPGFAEMAAPLYPLTKPGTLFSWGPDQQKAYQEIKQALLTAPALGLPDLTKPFELFVDEKQGYAKGVLTQKLGPWRRPVAYLSKKLDPVAAGWPPCLRMVAAIAVLTKDAGKLTMGQPLVILAPHAVEALVKQPPDRWLSNARMTHYQAMLLDTDRVQFGPVVALNPATLLPLPEEGAPHDCLEILAETHGTRPDLTDQPIPDADHTWYTDGSSFLQEGQRKAGAAVTTETEVIWAGALPAGTSAQRAELIALTQALKMAEGKRLNVYTDSRYAFATAHIHGEIYRRRGWLTSEGREIKNKSEILALLKALFLPKRLSIIHCLGHQKGDSAEARGNRLADQAAREAAIKTPPDTSTLLIAGKRTADGSEFEKRTADGSEFESPKKKAKVE

SEQ ID NO: 2159 - protein, 2096 aa, synthetic construct; identical to SEQ ID NO: 2055

SEQ ID NO: 2160 - protein, 2094 aa, synthetic construct
MPAAKRVKLDGGDKKYSIGLDIGTNSVGWAVITDEYKVPSKKFKVLGNTDRHSIKKNLIGALLFDSGETAEATRLKRTARRRYTRRKNRICYLQEIFSNEMAKVDDSFFHRLEESFLVEEDKKHERHPIFGNIVDEVAYHEKYPTIYHLRKKLVDSTDKADLRLIYLALAHMIKFRGHFLIEGDLNPDNSDVDKLFIQLVQTYNQLFEENPINASGVDAKAILSARLSKSRRLENLIAQLPGEKKNGLFGNLIALSLGLTPNFKSNFDLAEDAKLQLSKDTYDDDLDNLLAQIGDQYADLFLAAKNLSDAILLSDILRVNTEITKAPLSASMIKRYDEHHQDLTLLKALVRQQLPEKYKEIFFDQSKNGYAGYIDGGASQEEFYKFIKPILEKMDGTEELLVKLNREDLLRKQRTFDNGSIPHQIHLGELHAILRRQEDFYPFLKDNREKIEKILTFRIPYYVGPLARGNSRFAWMTRKSEETITPWNFEEVVDKGASAQSFIERMTNFDKNLPNEKVLPKHSLLYEYFTVYNELTKVKYVTEGMRKPAFLSGEQKKAIVDLLFKTNRKVTVKQLKEDYFKKIECFDSVEISGVEDRFNASLGTYHDLLKIIKDKDFLDNEENEDILEDIVLTLTLFEDREMIEERLKTYAHLFDDKVMKQLKRRRYTGWGRLSRKLINGIRDKQSGKTILDFLKSDGFANRNFMQLIHDDSLTFKEDIQKAQVSGQGDSLHEHIANLAGSPAIKKGILQTVKVVDELVKVMGRHKPENIVIEMARENQTTQKGQKNSRERMKRIEEGIKELGSQILKEHPVENTQLQNEKLYLYYLQNGRDMYVDQELDINRLSDYDVDHIVPQSFLKDDSIDNKVLTRSDKARGKSDNVPSEEVVKKMKNYWRQLLNAKLITQRKFDNLTKAERGGLSELDKAGFIKRQLVETRQITKHVAQILDSRMNTKYDENDKLIREVKVITLKSKLVSDFRKDFQFYKVREINNYHHAHDAYLNAVVGTALIKKYPKLESEFVYGDYKVYDVRKMIAKSEQEIGKATAKYFFYSNIMNFFKTEITLANGEIRKRPLIETNGETGEIVWDKGRDFATVRKVLSMPQVNIVKKTEVQTGGFSKESILPKRNSDKLIARKKDWDPKKYGGFDSPTVAYSVLVVAKVEKGKSKKLKSVKELLGITIMERSSFEKNPIDFLEAKGYKEVKKDLIIKLPKYSLFELENGRKRMLASAGELQKGNELALPSKYVNFLYLASHYEKLKGSPEDNEQKQLFVEQHKHYLDEIIEQISEFSKRVILADANLDKVLSAYNKHRDKPIREQAENIIHLFTLTNLGAPAAFKYFDTTIDRKRYTSTKEVLDATLIHQSITGLYETRIDLSQLGGDGGGGGGGSGSSGGLGIEDEYRLHETSTEPDVSLGSTWLSDFPQAWAETGGMGLAVRQAPLIIPLKATSTPVSIQQYPMSHEARLGIKPHIQRLLDQGILVPCQSPWNTPLLPVKKPGTNDYRPVQDLREVNKRVEDIHPTVPNPYNLLSGLPPSHQWYTVLDLKDAFFCLRLHPTSQPLFAFEWRDPGMGISGQLTWTRLPQGFKNSPTLFNEALHRDLADFRIQHPDLILLQYVDDILLAATSELDCQQGTRALLQTLGDLGYRASAKKAQICQKQVKYLGYLLREGQRWLTEARKETVMGQPVPKTPRQLREFLGKAGFCRLFIPGFAEMAAPLYPLTKPGTLFSWGPDQQKAYQEIKQALLTAPALGLPDLTKPFELFVDEKQGYAKGVLTQKLGPWRRPVAYLSKKLDPVAAGWPPCLRMVAAIAVLTKDAGKLTMGQPLVILAPHAVEALVKQPPDRWLSNARMTHYQAMLLDTDRVQFGPVVALNPATLLPLPEEGAPHDCLEILAETHGTRPDLTDQPIPDADHTWYTDGSSFLQEGQRKAGAAVTTETEVIWAGALPAGTSAQRAELIALTQALKMAEGKRLNVYTDSRYAFATAHIHGEIYRRRGWLTSEGREIKNKSEILALLKALFLPKRLSIIHCLGHQKGDSAEARGNRLADQAAREAAIKTPPDTSTLLIAGKRTADGSEFEKRTADGSEFESPKKKAKVE

SEQ ID NO: 2161 - protein, 2096 aa, synthetic construct
MPAAKRVKLDGGDKKYSIGLDIGTNSVGWAVITDEYKVPSKKFKVLGNTDRHSIKKNLIGALLFDSGETAEATRLKRTARRRYTRRKNRICYLQEIFSNEMAKVDDSFFHRLEESFLVEEDKKHERHPIFGNIVDEVAYHEKYPTIYHLRKKLVDSTDKADLRLIYLALAHMIKFRGHFLIEGDLNPDNSDVDKLFIQLVQTYNQLFEENPINASGVDAKAILSARLSKSRRLENLIAQLPGEKKNGLFGNLIALSLGLTPNFKSNFDLAEDAKLQLSKDTYDDDLDNLLAQIGDQYADLFLAAKNLSDAILLSDILRVNTEITKAPLSASMIKRYDEHHQDLTLLKALVRQQLPEKYKEIFFDQSKNGYAGYIDGGASQEEFYKFIKPILEKMDGTEELLVKLNREDLLRKQRTFDNGSIPHQIHLGELHAILRRQEDFYPFLKDNREKIEKILTFRIPYYVGPLARGNSRFAWMTRKSEETITPWNFEEVVDKGASAQSFIERMTNFDKNLPNEKVLPKHSLLYEYFTVYNELTKVKYVTEGMRKPAFLSGEQKKAIVDLLFKTNRKVTVKQLKEDYFKKIECFDSVEISGVEDRFNASLGTYHDLLKIIKDKDFLDNEENEDILEDIVLTLTLFEDREMIEERLKTYAHLFDDKVMKQLKRRRYTGWGRLSRKLINGIRDKQSGKTILDFLKSDGFANRNFMQLIHDDSLTFKEDIQKAQVSGQGDSLHEHIANLAGSPAIKKGILQTVKVVDELVKVMGRHKPENIVIEMARENQTTQKGQKNSRERMKRIEEGIKELGSQILKEHPVENTQLQNEKLYLYYLQNGRDMYVDQELDINRLSDYDVDHIVPQSFLKDDSIDNKVLTRSDKARGKSDNVPSEEVVKKMKNYWRQLLNAKLITQRKFDNLTKAERGGLSELDKAGFIKRQLVETRQITKHVAQILDSRMNTKYDENDKLIREVKVITLKSKLVSDFRKDFQFYKVREINNYHHAHDAYLNAVVGTALIKKYPKLESEFVYGDYKVYDVRKMIAKSEQEIGKATAKYFFYSNIMNFFKTEITLANGEIRKRPLIETNGETGEIVWDKGRDFATVRKVLSMPQVNIVKKTEVQTGGFSKESILPKRNSDKLIARKKDWDPKKYGGFDSPTVAYSVLVVAKVEKGKSKKLKSVKELLGITIMERSSFEKNPIDFLEAKGYKEVKKDLIIKLPKYSLFELENGRKRMLASAGELQKGNELALPSKYVNFLYLASHYEKLKGSPEDNEQKQLFVEQHKHYLDEIIEQISEFSKRVILADANLDKVLSAYNKHRDKPIREQAENIIHLFTLTNLGAPAAFKYFDTTIDRKRYTSTKEVLDATLIHQSITGLYETRIDLSQLGGDGGEAAAKGGGGGSGGLGIEDEYRLHETSTEPDVSLGSTWLSDFPQAWAETGGMGLAVRQAPLIIPLKATSTPVSIQQYPMSHEARLGIKPHIQRLLDQGILVPCQSPWNTPLLPVKKPGTNDYRPVQDLREVNKRVEDIHPTVPNPYNLLSGLPPSHQWYTVLDLKDAFFCLRLHPTSQPLFAFEWRDPGMGISGQLTWTRLPQGFKNSPTLFNEALHRDLADFRIQHPDLILLQYVDDILLAATSELDCQQGTRALLQTLGDLGYRASAKKAQICQKQVKYLGYLLREGQRWLTEARKETVMGQPVPKTPRQLREFLGKAGFCRLFIPGFAEMAAPLYPLTKPGTLFSWGPDQQKAYQEIKQALLTAPALGLPDLTKPFELFVDEKQGYAKGVLTQKLGPWRRPVAYLSKKLDPVAAGWPPCLRMVAAIAVLTKDAGKLTMGQPLVILAPHAVEALVKQPPDRWLSNARMTHYQAMLLDTDRVQFGPVVALNPATLLPLPEEGAPHDCLEILAETHGTRPDLTDQPIPDADHTWYTDGSSFLQEGQRKAGAAVTTETEVIWAGALPAGTSAQRAELIALTQALKMAEGKRLNVYTDSRYAFATAHIHGEIYRRRGWLTSEGREIKNKSEILALLKALFLPKRLSIIHCLGHQKGDSAEARGNRLADQAAREAAIKTPPDTSTLLIAGKRTADGSEFEKRTADGSEFESPKKKAKVE

SEQ ID NO: 2162 - protein, 2091 aa, synthetic construct
MPAAKRVKLDGGDKKYSIGLDIGTNSVGWAVITDEYKVPSKKFKVLGNTDRHSIKKNLIGALLFDSGETAEATRLKRTARRRYTRRKNRICYLQEIFSNEMAKVDDSFFHRLEESFLVEEDKKHERHPIFGNIVDEVAYHEKYPTIYHLRKKLVDSTDKADLRLIYLALAHMIKFRGHFLIEGDLNPDNSDVDKLFIQLVQTYNQLFEENPINASGVDAKAILSARLSKSRRLENLIAQLPGEKKNGLFGNLIALSLGLTPNFKSNFDLAEDAKLQLSKDTYDDDLDNLLAQIGDQYADLFLAAKNLSDAILLSDILRVNTEITKAPLSASMIKRYDEHHQDLTLLKALVRQQLPEKYKEIFFDQSKNGYAGYIDGGASQEEFYKFIKPILEKMDGTEELLVKLNREDLLRKQRTFDNGSIPHQIHLGELHAILRRQEDFYPFLKDNREKIEKILTFRIPYYVGPLARGNSRFAWMTRKSEETITPWNFEEVVDKGASAQSFIERMTNFDKNLPNEKVLPKHSLLYEYFTVYNELTKVKYVTEGMRKPAFLSGEQKKAIVDLLFKTNRKVTVKQLKEDYFKKIECFDSVEISGVEDRFNASLGTYHDLLKIIKDKDFLDNEENEDILEDIVLTLTLFEDREMIEERLKTYAHLFDDKVMKQLKRRRYTGWGRLSRKLINGIRDKQSGKTILDFLKSDGFANRNFMQLIHDDSLTFKEDIQKAQVSGQGDSLHEHIANLAGSPAIKKGILQTVKVVDELVKVMGRHKPENIVIEMARENQTTQKGQKNSRERMKRIEEGIKELGSQILKEHPVENTQLQNEKLYLYYLQNGRDMYVDQELDINRLSDYDVDHIVPQSFLKDDSIDNKVLTRSDKARGKSDNVPSEEVVKKMKNYWRQLLNAKLITQRKFDNLTKAERGGLSELDKAGFIKRQLVETRQITKHVAQILDSRMNTKYDENDKLIREVKVITLKSKLVSDFRKDFQFYKVREINNYHHAHDAYLNAVVGTALIKKYPKLESEFVYGDYKVYDVRKMIAKSEQEIGKATAKYFFYSNIMNFFKTEITLANGEIRKRPLIETNGETGEIVWDKGRDFATVRKVLSMPQVNIVKKTEVQTGGFSKESILPKRNSDKLIARKKDWDPKKYGGFDSPTVAYSVLVVAKVEKGKSKKLKSVKELLGITIMERSSFEKNPIDFLEAKGYKEVKKDLIIKLPKYSLFELENGRKRMLASAGELQKGNELALPSKYVNFLYLASHYEKLKGSPEDNEQKQLFVEQHKHYLDEIIEQISEFSKRVILADANLDKVLSAYNKHRDKPIREQAENIIHLFTLTNLGAPAAFKYFDTTIDRKRYTSTKEVLDATLIHQSITGLYETRIDLSQLGGDGGPAPGGSGGLGIEDEYRLHETSTEPDVSLGSTWLSDFPQAWAETGGMGLAVRQAPLIIPLKATSTPVSIQQYPMSHEARLGIKPHIQRLLDQGILVPCQSPWNTPLLPVKKPGTNDYRPVQDLREVNKRVEDIHPTVPNPYNLLSGLPPSHQWYTVLDLKDAFFCLRLHPTSQPLFAFEWRDPGMGISGQLTWTRLPQGFKNSPTLFNEALHRDLADFRIQHPDLILLQYVDDILLAATSELDCQQGTRALLQTLGDLGYRASAKKAQICQKQVKYLGYLLREGQRWLTEARKETVMGQPVPKTPRQLREFLGKAGFCRLFIPGFAEMAAPLYPLTKPGTLFSWGPDQQKAYQEIKQALLTAPALGLPDLTKPFELFVDEKQGYAKGVLTQKLGPWRRPVAYLSKKLDPVAAGWPPCLRMVAAIAVLTKDAGKLTMGQPLVILAPHAVEALVKQPPDRWLSNARMTHYQAMLLDTDRVQFGPVVALNPATLLPLPEEGAPHDCLEILAETHGTRPDLTDQPIPDADHTWYTDGSSFLQEGQRKAGAAVTTETEVIWAGALPAGTSAQRAELIALTQALKMAEGKRLNVYTDSRYAFATAHIHGEIYRRRGWLTSEGREIKNKSEILALLKALFLPKRLSIIHCLGHQKGDSAEARGNRLADQAAREAAIKTPPDTSTLLIAGKRTADGSEFEKRTADGSEFESPKKKAKVE

SEQ ID NO: 2163 - protein, 2096 aa, synthetic construct
MPAAKRVKLDGGDKKYSIGLDIGTNSVGWAVITDEYKVPSKKFKVLGNTDRHSIKKNLIGALLFDSGETAEATRLKRTARRRYTRRKNRICYLQEIFSNEMAKVDDSFFHRLEESFLVEEDKKHERHPIFGNIVDEVAYHEKYPTIYHLRKKLVDSTDKADLRLIYLALAHMIKFRGHFLIEGDLNPDNSDVDKLFIQLVQTYNQLFEENPINASGVDAKAILSARLSKSRRLENLIAQLPGEKKNGLFGNLIALSLGLTPNFKSNFDLAEDAKLQLSKDTYDDDLDNLLAQIGDQYADLFLAAKNLSDAILLSDILRVNTEITKAPLSASMIKRYDEHHQDLTLLKALVRQQLPEKYKEIFFDQSKNGYAGYIDGGASQEEFYKFIKPILEKMDGTEELLVKLNREDLLRKQRTFDNGSIPHQIHLGELHAILRRQEDFYPFLKDNREKIEKILTFRIPYYVGPLARGNSRFAWMTRKSEETITPWNFEEVVDKGASAQSFIERMTNFDKNLPNEKVLPKHSLLYEYFTVYNELTKVKYVTEGMRKPAFLSGEQKKAIVDLLFKTNRKVTVKQLKEDYFKKIECFDSVEISGVEDRFNASLGTYHDLLKIIKDKDFLDNEENEDILEDIVLTLTLFEDREMIEERLKTYAHLFDDKVMKQLKRRRYTGWGRLSRKLINGIRDKQSGKTILDFLKSDGFANRNFMQLIHDDSLTFKEDIQKAQVSGQGDSLHEHIANLAGSPAIKKGILQTVKVVDELVKVMGRHKPENIVIEMARENQTTQKGQKNSRERMKRIEEGIKELGSQILKEHPVENTQLQNEKLYLYYLQNGRDMYVDQELDINRLSDYDVDHIVPQSFLKDDSIDNKVLTRSDKARGKSDNVPSEEVVKKMKNYWRQLLNAKLITQRKFDNLTKAERGGLSELDKAGFIKRQLVETRQITKHVAQILDSRMNTKYDENDKLIREVKVITLKSKLVSDFRKDFQFYKVREINNYHHAHDAYLNAVVGTALIKKYPKLESEFVYGDYKVYDVRKMIAKSEQEIGKATAKYFFYSNIMNFFKTEITLANGEIRKRPLIETNGETGEIVWDKGRDFATVRKVLSMPQVNIVKKTEVQTGGFSKESILPKRNSDKLIARKKDWDPKKYGGFDSPTVAYSVLVVAKVEKGKSKKLKSVKELLGITIMERSSFEKNPIDFLEAKGYKEVKKDLIIKLPKYSLFELENGRKRMLASAGELQKGNELALPSKYVNFLYLASHYEKLKGSPEDNEQKQLFVEQHKHYLDEIIEQISEFSKRVILADANLDKVLSAYNKHRDKPIREQAENIIHLFTLTNLGAPAAFKYFDTTIDRKRYTSTKEVLDATLIHQSITGLYETRIDLSQLGGDGGEAAAKPAPGSSGGLGIEDEYRLHETSTEPDVSLGSTWLSDFPQAWAETGGMGLAVRQAPLIIPLKATSTPVSIQQYPMSHEARLGIKPHIQRLLDQGILVPCQSPWNTPLLPVKKPGTNDYRPVQDLREVNKRVEDIHPTVPNPYNLLSGLPPSHQWYTVLDLKDAFFCLRLHPTSQPLFAFEWRDPGMGISGQLTWTRLPQGFKNSPTLFNEALHRDLADFRIQHPDLILLQYVDDILLAATSELDCQQGTRALLQTLGDLGYRASAKKAQICQKQVKYLGYLLREGQRWLTEARKETVMGQPVPKTPRQLREFLGKAGFCRLFIPGFAEMAAPLYPLTKPGTLFSWGPDQQKAYQEIKQALLTAPALGLPDLTKPFELFVDEKQGYAKGVLTQKLGPWRRPVAYLSKKLDPVAAGWPPCLRMVAAIAVLTKDAGKLTMGQPLVILAPHAVEALVKQPPDRWLSNARMTHYQAMLLDTDRVQFGPVVALNPATLLPLPEEGAPHDCLEILAETHGTRPDLTDQPIPDADHTWYTDGSSFLQEGQRKAGAAVTTETEVIWAGALPAGTSAQRAELIALTQALKMAEGKRLNVYTDSRYAFATAHIHGEIYRRRGWLTSEGREIKNKSEILALLKALFLPKRLSIIHCLGHQKGDSAEARGNRLADQAAREAAIKTPPDTSTLLIAGKRTADGSEFEKRTADGSEFESPKKKAKVE

SEQ ID NO: 2164 - protein, 2100 aa, synthetic construct
MPAAKRVKLDGGDKKYSIGLDIGTNSVGWAVITDEYKVPSKKFKVLGNTDRHSIKKNLIGALLFDSGETAEATRLKRTARRRYTRRKNRICYLQEIFSNEMAKVDDSFFHRLEESFLVEEDKKHERHPIFGNIVDEVAYHEKYPTIYHLRKKLVDSTDKADLRLIYLALAHMIKFRGHFLIEGDLNPDNSDVDKLFIQLVQTYNQLFEENPINASGVDAKAILSARLSKSRRLENLIAQLPGEKKNGLFGNLIALSLGLTPNFKSNFDLAEDAKLQLSKDTYDDDLDNLLAQIGDQYADLFLAAKNLSDAILLSDILRVNTEITKAPLSASMIKRYDEHHQDLTLLKALVRQQLPEKYKEIFFDQSKNGYAGYIDGGASQEEFYKFIKPILEKMDGTEELLVKLNREDLLRKQRTFDNGSIPHQIHLGELHAILRRQEDFYPFLKDNREKIEKILTFRIPYYVGPLARGNSRFAWMTRKSEETITPWNFEEVVDKGASAQSFIERMTNFDKNLPNEKVLPKHSLLYEYFTVYNELTKVKYVTEGMRKPAFLSGEQKKAIVDLLFKTNRKVTVKQLKEDYFKKIECFDSVEISGVEDRFNASLGTYHDLLKIIKDKDFLDNEENEDILEDIVLTLTLFEDREMIEERLKTYAHLFDDKVMKQLKRRRYTGWGRLSRKLINGIRDKQSGKTILDFLKSDGFANRNFMQLIHDDSLTFKEDIQKAQVSGQGDSLHEHIANLAGSPAIKKGILQTVKVVDELVKVMGRHKPENIVIEMARENQTTQKGQKNSRERMKRIEEGIKELGSQILKEHPVENTQLQNEKLYLYYLQNGRDMYVDQELDINRLSDYDVDHIVPQSFLKDDSIDNKVLTRSDKARGKSDNVPSEEVVKKMKNYWRQLLNAKLITQRKFDNLTKAERGGLSELDKAGFIKRQLVETRQITKHVAQILDSRMNTKYDENDKLIREVKVITLKSKLVSDFRKDFQFYKVREINNYHHAHDAYLNAVVGTALIKKYPKLESEFVYGDYKVYDVRKMIAKSEQEIGKATAKYFFYSNIMNFFKTEITLANGEIRKRPLIETNGETGEIVWDKGRDFATVRKVLSMPQVNIVKKTEVQTGGFSKESILPKRNSDKLIARKKDWDPKKYGGFDSPTVAYSVLVVAKVEKGKSKKLKSVKELLGITIMERSSFEKNPIDFLEAKGYKEVKKDLIIKLPKYSLFELENGRKRMLASAGELQKGNELALPSKYVNFLYLASHYEKLKGSPEDNEQKQLFVEQHKHYLDEIIEQISEFSKRVILADANLDKVLSAYNKHRDKPIREQAENIIHLFTLTNLGAPAAFKYFDTTIDRKRYTSTKEVLDATLIHQSITGLYETRIDLSQLGGDGGGSSGSSGSSGSSGSSGGLGIEDEYRLHETSTEPDVSLGSTWLSDFPQAWAETGGMGLAVRQAPLIIPLKATSTPVSIQQYPMSHEARLGIKPHIQRLLDQGILVPCQSPWNTPLLPVKKPGTNDYRPVQDLREVNKRVEDIHPTVPNPYNLLSGLPPSHQWYTVLDLKDAFFCLRLHPTSQPLFAFEWRDPGMGISGQLTWTRLPQGFKNSPTLFNEALHRDLADFRIQHPDLILLQYVDDILLAATSELDCQQGTRALLQTLGDLGYRASAKKAQICQKQVKYLGYLLREGQRWLTEARKETVMGQPVPKTPRQLREFLGKAGFCRLFIPGFAEMAAPLYPLTKPGTLFSWGPDQQKAYQEIKQALLTAPALGLPDLTKPFELFVDEKQGYAKGVLTQKLGPWRRPVAYLSKKLDPVAAGWPPCLRMVAAIAVLTKDAGKLTMGQPLVILAPHAVEALVKQPPDRWLSNARMTHYQAMLLDTDRVQFGPVVALNPATLLPLPEEGAPHDCLEILAETHGTRPDLTDQPIPDADHTWYTDGSSFLQEGQRKAGAAVTTETEVIWAGALPAGTSAQRAELIALTQALKMAEGKRLNVYTDSRYAFATAHIHGEIYRRRGWLTSEGREIKNKSEILALLKALFLPKRLSIIHCLGHQKGDSAEARGNRLADQAAREAAIKTPPDTSTLLIAGKRTADGSEFEKRTADGSEFESPKKKAKVE

SEQ ID NO: 2165 - protein, 2094 aa, synthetic construct
MPAAKRVKLDGGDKKYSIGLDIGTNSVGWAVITDEYKVPSKKFKVLGNTDRHSIKKNLIGALLFDSGETAEATRLKRTARRRYTRRKNRICYLQEIFSNEMAKVDDSFFHRLEESFLVEEDKKHERHPIFGNIVDEVAYHEKYPTIYHLRKKLVDSTDKADLRLIYLALAHMIKFRGHFLIEGDLNPDNSDVDKLFIQLVQTYNQLFEENPINASGVDAKAILSARLSKSRRLENLIAQLPGEKKNGLFGNLIALSLGLTPNFKSNFDLAEDAKLQLSKDTYDDDLDNLLAQIGDQYADLFLAAKNLSDAILLSDILRVNTEITKAPLSASMIKRYDEHHQDLTLLKALVRQQLPEKYKEIFFDQSKNGYAGYIDGGASQEEFYKFIKPILEKMDGTEELLVKLNREDLLRKQRTFDNGSIPHQIHLGELHAILRRQEDFYPFLKDNREKIEKILTFRIPYYVGPLARGNSRFAWMTRKSEETITPWNFEEVVDKGASAQSFIERMTNFDKNLPNEKVLPKHSLLYEYFTVYNELTKVKYVTEGMRKPAFLSGEQKKAIVDLLFKTNRKVTVKQLKEDYFKKIECFDSVEISGVEDRFNASLGTYHDLLKIIKDKDFLDNEENEDILEDIVLTLTLFEDREMIEERLKTYAHLFDDKVMKQLKRRRYTGWGRLSRKLINGIRDKQSGKTILDFLKSDGFANRNFMQLIHDDSLTFKEDIQKAQVSGQGDSLHEHIANLAGSPAIKKGILQTVKVVDELVKVMGRHKPENIVIEMARENQTTQKGQKNSRERMKRIEEGIKELGSQILKEHPVENTQLQNEKLYLYYLQNGRDMYVDQELDINRLSDYDVDHIVPQSFLKDDSIDNKVLTRSDKARGKSDNVPSEEVVKKMKNYWRQLLNAKLITQRKFDNLTKAERGGLSELDKAGFIKRQLVETRQITKHVAQILDSRMNTKYDENDKLIREVKVITLKSKLVSDFRKDFQFYKVREINNYHHAHDAYLNAVVGTALIKKYPKLESEFVYGDYKVYDVRKMIAKSEQEIGKATAKYFFYSNIMNFFKTEITLANGEIRKRPLIETNGETGEIVWDKGRDFATVRKVLSMPQVNIVKKTEVQTGGFSKESILPKRNSDKLIARKKDWDPKKYGGFDSPTVAYSVLVVAKVEKGKSKKLKSVKELLGITIMERSSFEKNPIDFLEAKGYKEVKKDLIIKLPKYSLFELENGRKRMLASAGELQKGNELALPSKYVNFLYLASHYEKLKGSPEDNEQKQLFVEQHKHYLDEIIEQISEFSKRVILADANLDKVLSAYNKHRDKPIREQAENIIHLFTLTNLGAPAAFKYFDTTIDRKRYTSTKEVLDATLIHQSITGLYETRIDLSQLGGDGGGSSGGSGGGGGLGIEDEYRLHETSTEPDVSLGSTWLSDFPQAWAETGGMGLAVRQAPLIIPLKATSTPVSIQQYPMSHEARLGIKPHIQRLLDQGILVPCQSPWNTPLLPVKKPGTNDYRPVQDLREVNKRVEDIHPTVPNPYNLLSGLPPSHQWYTVLDLKDAFFCLRLHPTSQPLFAFEWRDPGMGISGQLTWTRLPQGFKNSPTLFNEALHRDLADFRIQHPDLILLQYVDDILLAATSELDCQQGTRALLQTLGDLGYRASAKKAQICQKQVKYLGYLLREGQRWLTEARKETVMGQPVPKTPRQLREFLGKAGFCRLFIPGFAEMAAPLYPLTKPGTLFSWGPDQQKAYQEIKQALLTAPALGLPDLTKPFELFVDEKQGYAKGVLTQKLGPWRRPVAYLSKKLDPVAAGWPPCLRMVAAIAVLTKDAGKLTMGQPLVILAPHAVEALVKQPPDRWLSNARMTHYQAMLLDTDRVQFGPVVALNPATLLPLPEEGAPHDCLEILAETHGTRPDLTDQPIPDADHTWYTDGSSFLQEGQRKAGAAVTTETEVIWAGALPAGTSAQRAELIALTQALKMAEGKRLNVYTDSRYAFATAHIHGEIYRRRGWLTSEGREIKNKSEILALLKALFLPKRLSIIHCLGHQKGDSAEARGNRLADQAAREAAIKTPPDTSTLLIAGKRTADGSEFEKRTADGSEFESPKKKAKVE

SEQ ID NO: 2166 - protein, 2094 aa, synthetic construct; identical to SEQ ID NO: 2051

SEQ ID NO: 2167 - protein, 2092 aa, synthetic construct
MPAAKRVKLDGGDKKYSIGLDIGTNSVGWAVITDEYKVPSKKFKVLGNTDRHSIKKNLIGALLFDSGETAEATRLKRTARRRYTRRKNRICYLQEIFSNEMAKVDDSFFHRLEESFLVEEDKKHERHPIFGNIVDEVAYHEKYPTIYHLRKKLVDSTDKADLRLIYLALAHMIKFRGHFLIEGDLNPDNSDVDKLFIQLVQTYNQLFEENPINASGVDAKAILSARLSKSRRLENLIAQLPGEKKNGLFGNLIALSLGLTPNFKSNFDLAEDAKLQLSKDTYDDDLDNLLAQIGDQYADLFLAAKNLSDAILLSDILRVNTEITKAPLSASMIKRYDEHHQDLTLLKALVRQQLPEKYKEIFFDQSKNGYAGYIDGGASQEEFYKFIKPILEKMDGTEELLVKLNREDLLRKQRTFDNGSIPHQIHLGELHAILRRQEDFYPFLKDNREKIEKILTFRIPYYVGPLARGNSRFAWMTRKSEETITPWNFEEVVDKGASAQSFIERMTNFDKNLPNEKVLPKHSLLYEYFTVYNELTKVKYVTEGMRKPAFLSGEQKKAIVDLLFKTNRKVTVKQLKEDYFKKIECFDSVEISGVEDRFNASLGTYHDLLKIIKDKDFLDNEENEDILEDIVLTLTLFEDREMIEERLKTYAHLFDDKVMKQLKRRRYTGWGRLSRKLINGIRDKQSGKTILDFLKSDGFANRNFMQLIHDDSLTFKEDIQKAQVSGQGDSLHEHIANLAGSPAIKKGILQTVKVVDELVKVMGRHKPENIVIEMARENQTTQKGQKNSRERMKRIEEGIKELGSQILKEHPVENTQLQNEKLYLYYLQNGRDMYVDQELDINRLSDYDVDHIVPQSFLKDDSIDNKVLTRSDKARGKSDNVPSEEVVKKMKNYWRQLLNAKLITQRKFDNLTKAERGGLSELDKAGFIKRQLVETRQITKHVAQILDSRMNTKYDENDKLIREVKVITLKSKLVSDFRKDFQFYKVREINNYHHAHDAYLNAVVGTALIKKYPKLESEFVYGDYKVYDVRKMIAKSEQEIGKATAKYFFYSNIMNFFKTEITLANGEIRKRPLIETNGETGEIVWDKGRDFATVRKVLSMPQVNIVKKTEVQTGGFSKESILPKRNSDKLIARKKDWDPKKYGGFDSPTVAYSVLVVAKVEKGKSKKLKSVKELLGITIMERSSFEKNPIDFLEAKGYKEVKKDLIIKLPKYSLFELENGRKRMLASAGELQKGNELALPSKYVNFLYLASHYEKLKGSPEDNEQKQLFVEQHKHYLDEIIEQISEFSKRVILADANLDKVLSAYNKHRDKPIREQAENIIHLFTLTNLGAPAAFKYFDTTIDRKRYTSTKEVLDATLIHQSITGLYETRIDLSQLGGDGGPAPAPAPGGLGIEDEYRLHETSTEPDVSLGSTWLSDFPQAWAETGGMGLAVRQAPLIIPLKATSTPVSIQQYPMSHEARLGIKPHIQRLLDQGILVPCQSPWNTPLLPVKKPGTNDYRPVQDLREVNKRVEDIHPTVPNPYNLLSGLPPSHQWYTVLDLKDAFFCLRLHPTSQPLFAFEWRDPGMGISGQLTWTRLPQGFKNSPTLFNEALHRDLADFRIQHPDLILLQYVDDILLAATSELDCQQGTRALLQTLGDLGYRASAKKAQICQKQVKYLGYLLREGQRWLTEARKETVMGQPVPKTPRQLREFLGKAGFCRLFIPGFAEMAAPLYPLTKPGTLFSWGPDQQKAYQEIKQALLTAPALGLPDLTKPFELFVDEKQGYAKGVLTQKLGPWRRPVAYLSKKLDPVAAGWPPCLRMVAAIAVLTKDAGKLTMGQPLVILAPHAVEALVKQPPDRWLSNARMTHYQAMLLDTDRVQFGPVVALNPATLLPLPEEGAPHDCLEILAETHGTRPDLTDQPIPDADHTWYTDGSSFLQEGQRKAGAAVTTETEVIWAGALPAGTSAQRAELIALTQALKMAEGKRLNVYTDSRYAFATAHIHGEIYRRRGWLTSEGREIKNKSEILALLKALFLPKRLSIIHCLGHQKGDSAEARGNRLADQAAREAAIKTPPDTSTLLIAGKRTADGSEFEKRTADGSEFESPKKKAKVE

SEQ ID NO: 2168 - protein, 2096 aa, synthetic construct
MPAAKRVKLDGGDKKYSIGLDIGTNSVGWAVITDEYKVPSKKFKVLGNTDRHSIKKNLIGALLFDSGETAEATRLKRTARRRYTRRKNRICYLQEIFSNEMAKVDDSFFHRLEESFLVEEDKKHERHPIFGNIVDEVAYHEKYPTIYHLRKKLVDSTDKADLRLIYLALAHMIKFRGHFLIEGDLNPDNSDVDKLFIQLVQTYNQLFEENPINASGVDAKAILSARLSKSRRLENLIAQLPGEKKNGLFGNLIALSLGLTPNFKSNFDLAEDAKLQLSKDTYDDDLDNLLAQIGDQYADLFLAAKNLSDAILLSDILRVNTEITKAPLSASMIKRYDEHHQDLTLLKALVRQQLPEKYKEIFFDQSKNGYAGYIDGGASQEEFYKFIKPILEKMDGTEELLVKLNREDLLRKQRTFDNGSIPHQIHLGELHAILRRQEDFYPFLKDNREKIEKILTFRIPYYVGPLARGNSRFAWMTRKSEETITPWNFEEVVDKGASAQSFIERMTNFDKNLPNEKVLPKHSLLYEYFTVYNELTKVKYVTEGMRKPAFLSGEQKKAIVDLLFKTNRKVTVKQLKEDYFKKIECFDSVEISGVEDRFNASLGTYHDLLKIIKDKDFLDNEENEDILEDIVLTLTLFEDREMIEERLKTYAHLFDDKVMKQLKRRRYTGWGRLSRKLINGIRDKQSGKTILDFLKSDGFANRNFMQLIHDDSLTFKEDIQKAQVSGQGDSLHEHIANLAGSPAIKKGILQTVKVVDELVKVMGRHKPENIVIEMARENQTTQKGQKNSRERMKRIEEGIKELGSQILKEHPVENTQLQNEKLYLYYLQNGRDMYVDQELDINRLSDYDVDHIVPQSFLKDDSIDNKVLTRSDKARGKSDNVPSEEVVKKMKNYWRQLLNAKLITQRKFDNLTKAERGGLSELDKAGFIKRQLVETRQITKHVAQILDSRMNTKYDENDKLIREVKVITLKSKLVSDFRKDFQFYKVREINNYHHAHDAYLNAVVGTALIKKYPKLESEFVYGDYKVYDVRKMIAKSEQEIGKATAKYFFYSNIMNFFKTEITLANGEIRKRPLIETNGETGEIVWDKGRDFATVRKVLSMPQVNIVKKTEVQTGGFSKESILPKRNSDKLIARKKDWDPKKYGGFDSPTVAYSVLVVAKVEKGKSKKLKSVKELLGITIMERSSFEKNPIDFLEAKGYKEVKKDLIIKLPKYSLFELENGRKRMLASAGELQKGNELALPSKYVNFLYLASHYEKLKGSPEDNEQKQLFVEQHKHYLDEIIEQISEFSKRVILADANLDKVLSAYNKHRDKPIREQAENIIHLFTLTNLGAPAAFKYFDTTIDRKRYTSTKEVLDATLIHQSITGLYETRIDLSQLGGDGGGGSEAAAKGSSGGLGIEDEYRLHETSTEPDVSLGSTWLSDFPQAWAETGGMGLAVRQAPLIIPLKATSTPVSIQQYPMSHEARLGIKPHIQRLLDQGILVPCQSPWNTPLLPVKKPGTNDYRPVQDLREVNKRVEDIHPTVPNPYNLLSGLPPSHQWYTVLDLKDAFFCLRLHPTSQPLFAFEWRDPGMGISGQLTWTRLPQGFKNSPTLFNEALHRDLADFRIQHPDLILLQYVDDILLAATSELDCQQGTRALLQTLGDLGYRASAKKAQICQKQVKYLGYLLREGQRWLTEARKETVMGQPVPKTPRQLREFLGKAGFCRLFIPGFAEMAAPLYPLTKPGTLFSWGPDQQKAYQEIKQALLTAPALGLPDLTKPFELFVDEKQGYAKGVLTQKLGPWRRPVAYLSKKLDPVAAGWPPCLRMVAAIAVLTKDAGKLTMGQPLVILAPHAVEALVKQPPDRWLSNARMTHYQAMLLDTDRVQFGPVVALNPATLLPLPEEGAPHDCLEILAETHGTRPDLTDQPIPDADHTWYTDGSSFLQEGQRKAGAAVTTETEVIWAGALPAGTSAQRAELIALTQALKMAEGKRLNVYTDSRYAFATAHIHGEIYRRRGWLTSEGREIKNKSEILALLKALFLPKRLSIIHCLGHQKGDSAEARGNRLADQAAREAAIKTPPDTSTLLIAGKRTADGSEFEKRTADGSEFESPKKKAKVE

SEQ ID NO: 2169 - protein, 2090 aa, synthetic construct
MPAAKRVKLDGGDKKYSIGLDIGTNSVGWAVITDEYKVPSKKFKVLGNTDRHSIKKNLIGALLFDSGETAEATRLKRTARRRYTRRKNRICYLQEIFSNEMAKVDDSFFHRLEESFLVEEDKKHERHPIFGNIVDEVAYHEKYPTIYHLRKKLVDSTDKADLRLIYLALAHMIKFRGHFLIEGDLNPDNSDVDKLFIQLVQTYNQLFEENPINASGVDAKAILSARLSKSRRLENLIAQLPGEKKNGLFGNLIALSLGLTPNFKSNFDLAEDAKLQLSKDTYDDDLDNLLAQIGDQYADLFLAAKNLSDAILLSDILRVNTEITKAPLSASMIKRYDEHHQDLTLLKALVRQQLPEKYKEIFFDQSKNGYAGYIDGGASQEEFYKFIKPILEKMDGTEELLVKLNREDLLRKQRTFDNGSIPHQIHLGELHAILRRQEDFYPFLKDNREKIEKILTFRIPYYVGPLARGNSRFAWMTRKSEETITPWNFEEVVDKGASAQSFIERMTNFDKNLPNEKVLPKHSLLYEYFTVYNELTKVKYVTEGMRKPAFLSGEQKKAIVDLLFKTNRKVTVKQLKEDYFKKIECFDSVEISGVEDRFNASLGTYHDLLKIIKDKDFLDNEENEDILEDIVLTLTLFEDREMIEERLKTYAHLFDDKVMKQLKRRRYTGWGRLSRKLINGIRDKQSGKTILDFLKSDGFANRNFMQLIHDDSLTFKEDIQKAQVSGQGDSLHEHIANLAGSPAIKKGILQTVKVVDELVKVMGRHKPENIVIEMARENQTTQKGQKNSRERMKRIEEGIKELGSQILKEHPVENTQLQNEKLYLYYLQNGRDMYVDQELDINRLSDYDVDHIVPQSFLKDDSIDNKVLTRSDKARGKSDNVPSEEVVKKMKNYWRQLLNAKLITQRKFDNLTKAERGGLSELDKAGFIKRQLVETRQITKHVAQILDSRMNTKYDENDKLIREVKVITLKSKLVSDFRKDFQFYKVREINNYHHAHDAYLNAVVGTALIKKYPKLESEFVYGDYKVYDVRKMIAKSEQEIGKATAKYFFYSNIMNFFKTEITLANGEIRKRPLIETNGETGEIVWDKGRDFATVRKVLSMPQVNIVKKTEVQTGGFSKESILPKRNSDKLIARKKDWDPKKYGGFDSPTVAYSVLVVAKVEKGKSKKLKSVKELLGITIMERSSFEKNPIDFLEAKGYKEVKKDLIIKLPKYSLFELENGRKRMLASAGELQKGNELALPSKYVNFLYLASHYEKLKGSPEDNEQKQLFVEQHKHYLDEIIEQISEFSKRVILADANLDKVLSAYNKHRDKPIREQAENIIHLFTLTNLGAPAAFKYFDTTIDRKRYTSTKEVLDATLIHQSITGLYETRIDLSQLGGDGGGGGGGGGLGIEDEYRLHETSTEPDVSLGSTWLSDFPQAWAETGGMGLAVRQAPLIIPLKATSTPVSIQQYPMSHEARLGIKPHIQRLLDQGILVPCQSPWNTPLLPVKKPGTNDYRPVQDLREVNKRVEDIHPTVPNPYNLLSGLPPSHQWYTVLDLKDAFFCLRLHPTSQPLFAFEWRDPGMGISGQLTWTRLPQGFKNSPTLFNEALHRDLADFRIQHPDLILLQYVDDILLAATSELDCQQGTRALLQTLGDLGYRASAKKAQICQKQVKYLGYLLREGQRWLTEARKETVMGQPVPKTPRQLREFLGKAGFCRLFIPGFAEMAAPLYPLTKPGTLFSWGPDQQKAYQEIKQALLTAPALGLPDLTKPFELFVDEKQGYAKGVLTQKLGPWRRPVAYLSKKLDPVAAGWPPCLRMVAAIAVLTKDAGKLTMGQPLVILAPHAVEALVKQPPDRWLSNARMTHYQAMLLDTDRVQFGPVVALNPATLLPLPEEGAPHDCLEILAETHGTRPDLTDQPIPDADHTWYTDGSSFLQEGQRKAGAAVTTETEVIWAGALPAGTSAQRAELIALTQALKMAEGKRLNVYTDSRYAFATAHIHGEIYRRRGWLTSEGREIKNKSEILALLKALFLPKRLSIIHCLGHQKGDSAEARGNRLADQAAREAAIKTPPDTSTLLIAGKRTADGSEFEKRTADGSEFESPKKKAKVE

SEQ ID NO: 2170 - protein, 2091 aa, synthetic construct
MPAAKRVKLDGGDKKYSIGLDIGTNSVGWAVITDEYKVPSKKFKVLGNTDRHSIKKNLIGALLFDSGETAEATRLKRTARRRYTRRKNRICYLQEIFSNEMAKVDDSFFHRLEESFLVEEDKKHERHPIFGNIVDEVAYHEKYPTIYHLRKKLVDSTDKADLRLIYLALAHMIKFRGHFLIEGDLNPDNSDVDKLFIQLVQTYNQLFEENPINASGVDAKAILSARLSKSRRLENLIAQLPGEKKNGLFGNLIALSLGLTPNFKSNFDLAEDAKLQLSKDTYDDDLDNLLAQIGDQYADLFLAAKNLSDAILLSDILRVNTEITKAPLSASMIKRYDEHHQDLTLLKALVRQQLPEKYKEIFFDQSKNGYAGYIDGGASQEEFYKFIKPILEKMDGTEELLVKLNREDLLRKQRTFDNGSIPHQIHLGELHAILRRQEDFYPFLKDNREKIEKILTFRIPYYVGPLARGNSRFAWMTRKSEETITPWNFEEVVDKGASAQSFIERMTNFDKNLPNEKVLPKHSLLYEYFTVYNELTKVKYVTEGMRKPAFLSGEQKKAIVDLLFKTNRKVTVKQLKEDYFKKIECFDSVEISGVEDRFNASLGTYHDLLKIIKDKDFLDNEENEDILEDIVLTLTLFEDREMIEERLKTYAHLFDDKVMKQLKRRRYTGWGRLSRKLINGIRDKQSGKTILDFLKSDGFANRNFMQLIHDDSLTFKEDIQKAQVSGQGDSLHEHIANLAGSPAIKKGILQTVKVVDELVKVMGRHKPENIVIEMARENQTTQKGQKNSRERMKRIEEGIKELGSQILKEHPVENTQLQNEKLYLYYLQNGRDMYVDQELDINRLSDYDVDHIVPQSFLKDDSIDNKVLTRSDKARGKSDNVPSEEVVKKMKNYWRQLLNAKLITQRKFDNLTKAERGGLSELDKAGFIKRQLVETRQITKHVAQILDSRMNTKYDENDKLIREVKVITLKSKLVSDFRKDFQFYKVREINNYHHAHDAYLNAVVGTALIKKYPKLESEFVYGDYKVYDVRKMIAKSEQEIGKATAKYFFYSNIMNFFKTEITLANGEIRKRPLIETNGETGEIVWDKGRDFATVRKVLSMPQVNIVKKTEVQTGGFSKESILPKRNSDKLIARKKDWDPKKYGGFDSPTVAYSVLVVAKVEKGKSKKLKSVKELLGITIMERSSFEKNPIDFLEAKGYKEVKKDLIIKLPKYSLFELENGRKRMLASAGELQKGNELALPSKYVNFLYLASHYEKLKGSPEDNEQKQLFVEQHKHYLDEIIEQISEFSKRVILADANLDKVLSAYNKHRDKPIREQAENIIHLFTLTNLGAPAAFKYFDTTIDRKRYTSTKEVLDATLIHQSITGLYETRIDLSQLGGDGGGSSGGGGGLGIEDEYRLHETSTEPDVSLGSTWLSDFPQAWAETGGMGLAVRQAPLIIPLKATSTPVSIQQYPMSHEARLGIKPHIQRLLDQGILVPCQSPWNTPLLPVKKPGTNDYRPVQDLREVNKRVEDIHPTVPNPYNLLSGLPPSHQWYTVLDLKDAFFCLRLHPTSQPLFAFEWRDPGMGISGQLTWTRLPQGFKNSPTLFNEALHRDLADFRIQHPDLILLQYVDDILLAATSELDCQQGTRALLQTLGDLGYRASAKKAQICQKQVKYLGYLLREGQRWLTEARKETVMGQPVPKTPRQLREFLGKAGFCRLFIPGFAEMAAPLYPLTKPGTLFSWGPDQQKAYQEIKQALLTAPALGLPDLTKPFELFVDEKQGYAKGVLTQKLGPWRRPVAYLSKKLDPVAAGWPPCLRMVAAIAVLTKDAGKLTMGQPLVILAPHAVEALVKQPPDRWLSNARMTHYQAMLLDTDRVQFGPVVALNPATLLPLPEEGAPHDCLEILAETHGTRPDLTDQPIPDADHTWYTDGSSFLQEGQRKAGAAVTTETEVIWAGALPAGTSAQRAELIALTQALKMAEGKRLNVYTDSRYAFATAHIHGEIYRRRGWLTSEGREIKNKSEILALLKALFLPKRLSIIHCLGHQKGDSAEARGNRLADQAAREAAIKTPPDTSTLLIAGKRTADGSEFEKRTADGSEFESPKKKAKVE

SEQ ID NO: 2171 - protein, 2091 aa, synthetic construct
MPAAKRVKLDGGDKKYSIGLDIGTNSVGWAVITDEYKVPSKKFKVLGNTDRHSIKKNLIGALLFDSGETAEATRLKRTARRRYTRRKNRICYLQEIFSNEMAKVDDSFFHRLEESFLVEEDKKHERHPIFGNIVDEVAYHEKYPTIYHLRKKLVDSTDKADLRLIYLALAHMIKFRGHFLIEGDLNPDNSDVDKLFIQLVQTYNQLFEENPINASGVDAKAILSARLSKSRRLENLIAQLPGEKKNGLFGNLIALSLGLTPNFKSNFDLAEDAKLQLSKDTYDDDLDNLLAQIGDQYADLFLAAKNLSDAILLSDILRVNTEITKAPLSASMIKRYDEHHQDLTLLKALVRQQLPEKYKEIFFDQSKNGYAGYIDGGASQEEFYKFIKPILEKMDGTEELLVKLNREDLLRKQRTFDNGSIPHQIHLGELHAILRRQEDFYPFLKDNREKIEKILTFRIPYYVGPLARGNSRFAWMTRKSEETITPWNFEEVVDKGASAQSFIERMTNFDKNLPNEKVLPKHSLLYEYFTVYNELTKVKYVTEGMRKPAFLSGEQKKAIVDLLFKTNRKVTVKQLKEDYFKKIECFDSVEISGVEDRFNASLGTYHDLLKIIKDKDFLDNEENEDILEDIVLTLTLFEDREMIEERLKTYAHLFDDKVMKQLKRRRYTGWGRLSRKLINGIRDKQSGKTILDFLKSDGFANRNFMQLIHDDSLTFKEDIQKAQVSGQGDSLHEHIANLAGSPAIKKGILQTVKVVDELVKVMGRHKPENIVIEMARENQTTQKGQKNSRERMKRIEEGIKELGSQILKEHPVENTQLQNEKLYLYYLQNGRDMYVDQELDINRLSDYDVDHIVPQSFLKDDSIDNKVLTRSDKARGKSDNVPSEEVVKKMKNYWRQLLNAKLITQRKFDNLTKAERGGLSELDKAGFIKRQLVETRQITKHVAQILDSRMNTKYDENDKLIREVKVITLKSKLVSDFRKDFQFYKVREINNYHHAHDAYLNAVVGTALIKKYPKLESEFVYGDYKVYDVRKMIAKSEQEIGKATAKYFFYSNIMNFFKTEITLANGEIRKRPLIETNGETGEIVWDKGRDFATVRKVLSMPQVNIVKKTEVQTGGFSKESILPKRNSDKLIARKKDWDPKKYGGFDSPTVAYSVLVVAKVEKGKSKKLKSVKELLGITIMERSSFEKNPIDFLEAKGYKEVKKDLIIKLPKYSLFELENGRKRMLASAGELQKGNELALPSKYVNFLYLASHYEKLKGSPEDNEQKQLFVEQHKHYLDEIIEQISEFSKRVILADANLDKVLSAYNKHRDKPIREQAENIIHLFTLTNLGAPAAFKYFDTTIDRKRYTSTKEVLDATLIHQSITGLYETRIDLSQLGGDGGGSSGGSGGLGIEDEYRLHETSTEPDVSLGSTWLSDFPQAWAETGGMGLAVRQAPLIIPLKATSTPVSIQQYPMSHEARLGIKPHIQRLLDQGILVPCQSPWNTPLLPVKKPGTNDYRPVQDLREVNKRVEDIHPTVPNPYNLLSGLPPSHQWYTVLDLKDAFFCLRLHPTSQPLFAFEWRDPGMGISGQLTWTRLPQGFKNSPTLFNEALHRDLADFRIQHPDLILLQYVDDILLAATSELDCQQGTRALLQTLGDLGYRASAKKAQICQKQVKYLGYLLREGQRWLTEARKETVMGQPVPKTPRQLREFLGKAGFCRLFIPGFAEMAAPLYPLTKPGTLFSWGPDQQKAYQEIKQALLTAPALGLPDLTKPFELFVDEKQGYAKGVLTQKLGPWRRPVAYLSKKLDPVAAGWPPCLRMVAAIAVLTKDAGKLTMGQPLVILAPHAVEALVKQPPDRWLSNARMTHYQAMLLDTDRVQFGPVVALNPATLLPLPEEGAPHDCLEILAETHGTRPDLTDQPIPDADHTWYTDGSSFLQEGQRKAGAAVTTETEVIWAGALPAGTSAQRAELIALTQALKMAEGKRLNVYTDSRYAFATAHIHGEIYRRRGWLTSEGREIKNKSEILALLKALFLPKRLSIIHCLGHQKGDSAEARGNRLADQAAREAAIKTPPDTSTLLIAGKRTADGSEFEKRTADGSEFESPKKKAKVE

SEQ ID NO: 2172 - protein, 2094 aa, synthetic construct
MPAAKRVKLDGGDKKYSIGLDIGTNSVGWAVITDEYKVPSKKFKVLGNTDRHSIKKNLIGALLFDSGETAEATRLKRTARRRYTRRKNRICYLQEIFSNEMAKVDDSFFHRLEESFLVEEDKKHERHPIFGNIVDEVAYHEKYPTIYHLRKKLVDSTDKADLRLIYLALAHMIKFRGHFLIEGDLNPDNSDVDKLFIQLVQTYNQLFEENPINASGVDAKAILSARLSKSRRLENLIAQLPGEKKNGLFGNLIALSLGLTPNFKSNFDLAEDAKLQLSKDTYDDDLDNLLAQIGDQYADLFLAAKNLSDAILLSDILRVNTEITKAPLSASMIKRYDEHHQDLTLLKALVRQQLPEKYKEIFFDQSKNGYAGYIDGGASQEEFYKFIKPILEKMDGTEELLVKLNREDLLRKQRTFDNGSIPHQIHLGELHAILRRQEDFYPFLKDNREKIEKILTFRIPYYVGPLARGNSRFAWMTRKSEETITPWNFEEVVDKGASAQSFIERMTNFDKNLPNEKVLPKHSLLYEYFTVYNELTKVKYVTEGMRKPAFLSGEQKKAIVDLLFKTNRKVTVKQLKEDYFKKIECFDSVEISGVEDRFNASLGTYHDLLKIIKDKDFLDNEENEDILEDIVLTLTLFEDREMIEERLKTYAHLFDDKVMKQLKRRRYTGWGRLSRKLINGIRDKQSGKTILDFLKSDGFANRNFMQLIHDDSLTFKEDIQKAQVSGQGDSLHEHIANLAGSPAIKKGILQTVKVVDELVKVMGRHKPENIVIEMARENQTTQKGQKNSRERMKRIEEGIKELGSQILKEHPVENTQLQNEKLYLYYLQNGRDMYVDQELDINRLSDYDVDHIVPQSFLKDDSIDNKVLTRSDKARGKSDNVPSEEVVKKMKNYWRQLLNAKLITQRKFDNLTKAERGGLSELDKAGFIKRQLVETRQITKHVAQILDSRMNTKYDENDKLIREVKVITLKSKLVSDFRKDFQFYKVREINNYHHAHDAYLNAVVGTALIKKYPKLESEFVYGDYKVYDVRKMIAKSEQEIGKATAKYFFYSNIMNFFKTEITLANGEIRKRPLIETNGETGEIVWDKGRDFATVRKVLSMPQVNIVKKTEVQTGGFSKESILPKRNSDKLIARKKDWDPKKYGGFDSPTVAYSVLVVAKVEKGKSKKLKSVKELLGITIMERSSFEKNPIDFLEAKGYKEVKKDLIIKLPKYSLFELENGRKRMLASAGELQKGNELALPSKYVNFLYLASHYEKLKGSPEDNEQKQLFVEQHKHYLDEIIEQISEFSKRVILADANLDKVLSAYNKHRDKPIREQAENIIHLFTLTNLGAPAAFKYFDTTIDRKRYTSTKEVLDATLIHQSITGLYETRIDLSQLGGDGGGGSGGGGSSGGLGIEDEYRLHETSTEPDVSLGSTWLSDFPQAWAETGGMGLAVRQAPLIIPLKATSTPVSIQQYPMSHEARLGIKPHIQRLLDQGILVPCQSPWNTPLLPVKKPGTNDYRPVQDLREVNKRVEDIHPTVPNPYNLLSGLPPSHQWYTVLDLKDAFFCLRLHPTSQPLFAFEWRDPGMGISGQLTWTRLPQGFKNSPTLFNEALHRDLADFRIQHPDLILLQYVDDILLAATSELDCQQGTRALLQTLGDLGYRASAKKAQICQKQVKYLGYLLREGQRWLTEARKETVMGQPVPKTPRQLREFLGKAGFCRLFIPGFAEMAAPLYPLTKPGTLFSWGPDQQKAYQEIKQALLTAPALGLPDLTKPFELFVDEKQGYAKGVLTQKLGPWRRPVAYLSKKLDPVAAGWPPCLRMVAAIAVLTKDAGKLTMGQPLVILAPHAVEALVKQPPDRWLSNARMTHYQAMLLDTDRVQFGPVVALNPATLLPLPEEGAPHDCLEILAETHGTRPDLTDQPIPDADHTWYTDGSSFLQEGQRKAGAAVTTETEVIWAGALPAGTSAQRAELIALTQALKMAEGKRLNVYTDSRYAFATAHIHGEIYRRRGWLTSEGREIKNKSEILALLKALFLPKRLSIIHCLGHQKGDSAEARGNRLADQAAREAAIKTPPDTSTLLIAGKRTADGSEFEKRTADGSEFESPKKKAKVE

SEQ ID NO: 2173 - protein, 2096 aa, synthetic construct
MPAAKRVKLDGGDKKYSIGLDIGTNSVGWAVITDEYKVPSKKFKVLGNTDRHSIKKNLIGALLFDSGETAEATRLKRTARRRYTRRKNRICYLQEIFSNEMAKVDDSFFHRLEESFLVEEDKKHERHPIFGNIVDEVAYHEKYPTIYHLRKKLVDSTDKADLRLIYLALAHMIKFRGHFLIEGDLNPDNSDVDKLFIQLVQTYNQLFEENPINASGVDAKAILSARLSKSRRLENLIAQLPGEKKNGLFGNLIALSLGLTPNFKSNFDLAEDAKLQLSKDTYDDDLDNLLAQIGDQYADLFLAAKNLSDAILLSDILRVNTEITKAPLSASMIKRYDEHHQDLTLLKALVRQQLPEKYKEIFFDQSKNGYAGYIDGGASQEEFYKFIKPILEKMDGTEELLVKLNREDLLRKQRTFDNGSIPHQIHLGELHAILRRQEDFYPFLKDNREKIEKILTFRIPYYVGPLARGNSRFAWMTRKSEETITPWNFEEVVDKGASAQSFIERMTNFDKNLPNEKVLPKHSLLYEYFTVYNELTKVKYVTEGMRKPAFLSGEQKKAIVDLLFKTNRKVTVKQLKEDYFKKIECFDSVEISGVEDRFNASLGTYHDLLKIIKDKDFLDNEENEDILEDIVLTLTLFEDREMIEERLKTYAHLFDDKVMKQLKRRRYTGWGRLSRKLINGIRDKQSGKTILDFLKSDGFANRNFMQLIHDDSLTFKEDIQKAQVSGQGDSLHEHIANLAGSPAIKKGILQTVKVVDELVKVMGRHKPENIVIEMARENQTTQKGQKNSRERMKRIEEGIKELGSQILKEHPVENTQLQNEKLYLYYLQNGRDMYVDQELDINRLSDYDVDHIVPQSFLKDDSIDNKVLTRSDKARGKSDNVPSEEVVKKMKNYWRQLLNAKLITQRKFDNLTKAERGGLSELDKAGFIKRQLVETRQITKHVAQILDSRMNTKYDENDKLIREVKVITLKSKLVSDFRKDFQFYKVREINNYHHAHDAYLNAVVGTALIKKYPKLESEFVYGDYKVYDVRKMIAKSEQEIGKATAKYFFYSNIMNFFKTEITLANGEIRKRPLIETNGETGEIVWDKGRDFATVRKVLSMPQVNIVKKTEVQTGGFSKESILPKRNSDKLIARKKDWDPKKYGGFDSPTVAYSVLVVAKVEKGKSKKLKSVKELLGITIMERSSFEKNPIDFLEAKGYKEVKKDLIIKLPKYSLFELENGRKRMLASAGELQKGNELALPSKYVNFLYLASHYEKLKGSPEDNEQKQLFVEQHKHYLDEIIEQISEFSKRVILADANLDKVLSAYNKHRDKPIREQAENIIHLFTLTNLGAPAAFKYFDTTIDRKRYTSTKEVLDATLIHQSITGLYETRIDLSQLGGDGGEAAAKGGGGSSGGLGIEDEYRLHETSTEPDVSLGSTWLSDFPQAWAETGGMGLAVRQAPLIIPLKATSTPVSIQQYPMSHEARLGIKPHIQRLLDQGILVPCQSPWNTPLLPVKKPGTNDYRPVQDLREVNKRVEDIHPTVPNPYNLLSGLPPSHQWYTVLDLKDAFFCLRLHPTSQPLFAFEWRDPGMGISGQLTWTRLPQGFKNSPTLFNEALHRDLADFRIQHPDLILLQYVDDILLAATSELDCQQGTRALLQTLGDLGYRASAKKAQICQKQVKYLGYLLREGQRWLTEARKETVMGQPVPKTPRQLREFLGKAGFCRLFIPGFAEMAAPLYPLTKPGTLFSWGPDQQKAYQEIKQALLTAPALGLPDLTKPFELFVDEKQGYAKGVLTQKLGPWRRPVAYLSKKLDPVAAGWPPCLRMVAAIAVLTKDAGKLTMGQPLVILAPHAVEALVKQPPDRWLSNARMTHYQAMLLDTDRVQFGPVVALNPATLLPLPEEGAPHDCLEILAETHGTRPDLTDQPIPDADHTWYTDGSSFLQEGQRKAGAAVTTETEVIWAGALPAGTSAQRAELIALTQALKMAEGKRLNVYTDSRYAFATAHIHGEIYRRRGWLTSEGREIKNKSEILALLKALFLPKRLSIIHCLGHQKGDSAEARGNRLADQAAREAAIKTPPDTSTLLIAGKRTADGSEFEKRTADGSEFESPKKKAKVE

SEQ ID NO: 2174 - protein, 2096 aa, synthetic construct
MPAAKRVKLDGGDKKYSIGLDIGTNSVGWAVITDEYKVPSKKFKVLGNTDRHSIKKNLIGALLFDSGETAEATRLKRTARRRYTRRKNRICYLQEIFSNEMAKVDDSFFHRLEESFLVEEDKKHERHPIFGNIVDEVAYHEKYPTIYHLRKKLVDSTDKADLRLIYLALAHMIKFRGHFLIEGDLNPDNSDVDKLFIQLVQTYNQLFEENPINASGVDAKAILSARLSKSRRLENLIAQLPGEKKNGLFGNLIALSLGLTPNFKSNFDLAEDAKLQLSKDTYDDDLDNLLAQIGDQYADLFLAAKNLSDAILLSDILRVNTEITKAPLSASMIKRYDEHHQDLTLLKALVRQQLPEKYKEIFFDQSKNGYAGYIDGGASQEEFYKFIKPILEKMDGTEELLVKLNREDLLRKQRTFDNGSIPHQIHLGELHAILRRQEDFYPFLKDNREKIEKILTFRIPYYVGPLARGNSRFAWMTRKSEETITPWNFEEVVDKGASAQSFIERMTNFDKNLPNEKVLPKHSLLYEYFTVYNELTKVKYVTEGMRKPAFLSGEQKKAIVDLLFKTNRKVTVKQLKEDYFKKIECFDSVEISGVEDRFNASLGTYHDLLKIIKDKDFLDNEENEDILEDIVLTLTLFEDREMIEERLKTYAHLFDDKVMKQLKRRRYTGWGRLSRKLINGIRDKQSGKTILDFLKSDGFANRNFMQLIHDDSLTFKEDIQKAQVSGQGDSLHEHIANLAGSPAIKKGILQTVKVVDELVKVMGRHKPENIVIEMARENQTTQKGQKNSRERMKRIEEGIKELGSQILKEHPVENTQLQNEKLYLYYLQNGRDMYVDQELDINRLSDYDVDHIVPQSFLKDDSIDNKVLTRSDKARGKSDNVPSEEVVKKMKNYWRQLLNAKLITQRKFDNLTKAERGGLSELDKAGFIKRQLVETRQITKHVAQILDSRMNTKYDENDKLIREVKVITLKSKLVSDFRKDFQFYKVREINNYHHAHDAYLNAVVGTALIKKYPKLESEFVYGDYKVYDVRKMIAKSEQEIGKATAKYFFYSNIMNFFKTEITLANGEIRKRPLIETNGETGEIVWDKGRDFATVRKVLSMPQVNIVKKTEVQTGGFSKESILPKRNSDKLIARKKDWDPKKYGGFDSPTVAYSVLVVAKVEKGKSKKLKSVKELLGITIMERSSFEKNPIDFLEAKGYKEVKKDLIIKLPKYSLFELENGRKRMLASAGELQKGNELALPSKYVNFLYLASHYEKLKGSPEDNEQKQLFVEQHKHYLDEIIEQISEFSKRVILADANLDKVLSAYNKHRDKPIREQAENIIHLFTLTNLGAPAAFKYFDTTIDRKRYTSTKEVLDATLIHQSITGLYETRIDLSQLGGDGGGGGEAAAKGSSGGLGIEDEYRLHETSTEPDVSLGSTWLSDFPQAWAETGGMGLAVRQAPLIIPLKATSTPVSIQQYPMSHEARLGIKPHIQRLLDQGILVPCQSPWNTPLLPVKKPGTNDYRPVQDLREVNKRVEDIHPTVPNPYNLLSGLPPSHQWYTVLDLKDAFFCLRLHPTSQPLFAFEWRDPGMGISGQLTWTRLPQGFKNSPTLFNEALHRDLADFRIQHPDLILLQYVDDILLAATSELDCQQGTRALLQTLGDLGYRASAKKAQICQKQVKYLGYLLREGQRWLTEARKETVMGQPVPKTPRQLREFLGKAGFCRLFIPGFAEMAAPLYPLTKPGTLFSWGPDQQKAYQEIKQALLTAPALGLPDLTKPFELFVDEKQGYAKGVLTQKLGPWRRPVAYLSKKLDPVAAGWPPCLRMVAAIAVLTKDAGKLTMGQPLVILAPHAVEALVKQPPDRWLSNARMTHYQAMLLDTDRVQFGPVVALNPATLLPLPEEGAPHDCLEILAETHGTRPDLTDQPIPDADHTWYTDGSSFLQEGQRKAGAAVTTETEVIWAGALPAGTSAQRAELIALTQALKMAEGKRLNVYTDSRYAFATAHIHGEIYRRRGWLTSEGREIKNKSEILALLKALFLPKRLSIIHCLGHQKGDSAEARGNRLADQAAREAAIKTPPDTSTLLIAGKRTADGSEFEKRTADGSEFESPKKKAKVE

SEQ ID NO: 2175 - protein, 2096 aa, synthetic construct
MPAAKRVKLDGGDKKYSIGLDIGTNSVGWAVITDEYKVPSKKFKVLGNTDRHSIKKNLIGALLFDSGETAEATRLKRTARRRYTRRKNRICYLQEIFSNEMAKVDDSFFHRLEESFLVEEDKKHERHPIFGNIVDEVAYHEKYPTIYHLRKKLVDSTDKADLRLIYLALAHMIKFRGHFLIEGDLNPDNSDVDKLFIQLVQTYNQLFEENPINASGVDAKAILSARLSKSRRLENLIAQLPGEKKNGLFGNLIALSLGLTPNFKSNFDLAEDAKLQLSKDTYDDDLDNLLAQIGDQYADLFLAAKNLSDAILLSDILRVNTEITKAPLSASMIKRYDEHHQDLTLLKALVRQQLPEKYKEIFFDQSKNGYAGYIDGGASQEEFYKFIKPILEKMDGTEELLVKLNREDLLRKQRTFDNGSIPHQIHLGELHAILRRQEDFYPFLKDNREKIEKILTFRIPYYVGPLARGNSRFAWMTRKSEETITPWNFEEVVDKGASAQSFIERMTNFDKNLPNEKVLPKHSLLYEYFTVYNELTKVKYVTEGMRKPAFLSGEQKKAIVDLLFKTNRKVTVKQLKEDYFKKIECFDSVEISGVEDRFNASLGTYHDLLKIIKDKDFLDNEENEDILEDIVLTLTLFEDREMIEERLKTYAHLFDDKVMKQLKRRRYTGWGRLSRKLINGIRDKQSGKTILDFLKSDGFANRNFMQLIHDDSLTFKEDIQKAQVSGQGDSLHEHIANLAGSPAIKKGILQTVKVVDELVKVMGRHKPENIVIEMARENQTTQKGQKNSRERMKRIEEGIKELGSQILKEHPVENTQLQNEKLYLYYLQNGRDMYVDQELDINRLSDYDVDHIVPQSFLKDDSIDNKVLTRSDKARGKSDNVPSEEVVKKMKNYWRQLLNAKLITQRKFDNLTKAERGGLSELDKAGFIKRQLVETRQITKHVAQILDSRMNTKYDENDKLIREVKVITLKSKLVSDFRKDFQFYKVREINNYHHAHDAYLNAVVGTALIKKYPKLESEFVYGDYKVYDVRKMIAKSEQEIGKATAKYFFYSNIMNFFKTEITLANGEIRKRPLIETNGETGEIVWDKGRDFATVRKVLSMPQVNIVKKTEVQTGGFSKESILPKRNSDKLIARKKDWDPKKYGGFDSPTVAYSVLVVAKVEKGKSKKLKSVKELLGITIMERSSFEKNPIDFLEAKGYKEVKKDLIIKLPKYSLFELENGRKRMLASAGELQKGNELALPSKYVNFLYLASHYEKLKGSPEDNEQKQLFVEQHKHYLDEIIEQISEFSKRVILADANLDKVLSAYNKHRDKPIREQAENIIHLFTLTNLGAPAAFKYFDTTIDRKRYTSTKEVLDATLIHQSITGLYETRIDLSQLGGDGGGGSGGGEAAAKGGLGIEDEYRLHETSTEPDVSLGSTWLSDFPQAWAETGGMGLAVRQAPLIIPLKATSTPVSIQQYPMSHEARLGIKPHIQRLLDQGILVPCQSPWNTPLLPVKKPGTNDYRPVQDLREVNKRVEDIHPTVPNPYNLLSGLPPSHQWYTVLDLKDAFFCLRLHPTSQPLFAFEWRDPGMGISGQLTWTRLPQGFKNSPTLFNEALHRDLADFRIQHPDLILLQYVDDILLAATSELDCQQGTRALLQTLGDLGYRASAKKAQICQKQVKYLGYLLREGQRWLTEARKETVMGQPVPKTPRQLREFLGKAGFCRLFIPGFAEMAAPLYPLTKPGTLFSWGPDQQKAYQEIKQALLTAPALGLPDLTKPFELFVDEKQGYAKGVLTQKLGPWRRPVAYLSKKLDPVAAGWPPCLRMVAAIAVLTKDAGKLTMGQPLVILAPHAVEALVKQPPDRWLSNARMTHYQAMLLDTDRVQFGPVVALNPATLLPLPEEGAPHDCLEILAETHGTRPDLTDQPIPDADHTWYTDGSSFLQEGQRKAGAAVTTETEVIWAGALPAGTSAQRAELIALTQALKMAEGKRLNVYTDSRYAFATAHIHGEIYRRRGWLTSEGREIKNKSEILALLKALFLPKRLSIIHCLGHQKGDSAEARGNRLADQAAREAAIKTPPDTSTLLIAGKRTADGSEFEKRTADGSEFESPKKKAKVE

SEQ ID NO: 2176 - protein, 2091 aa, synthetic construct
MPAAKRVKLDGGDKKYSIGLDIGTNSVGWAVITDEYKVPSKKFKVLGNTDRHSIKKNLIGALLFDSGETAEATRLKRTARRRYTRRKNRICYLQEIFSNEMAKVDDSFFHRLEESFLVEEDKKHERHPIFGNIVDEVAYHEKYPTIYHLRKKLVDSTDKADLRLIYLALAHMIKFRGHFLIEGDLNPDNSDVDKLFIQLVQTYNQLFEENPINASGVDAKAILSARLSKSRRLENLIAQLPGEKKNGLFGNLIALSLGLTPNFKSNFDLAEDAKLQLSKDTYDDDLDNLLAQIGDQYADLFLAAKNLSDAILLSDILRVNTEITKAPLSASMIKRYDEHHQDLTLLKALVRQQLPEKYKEIFFDQSKNGYAGYIDGGASQEEFYKFIKPILEKMDGTEELLVKLNREDLLRKQRTFDNGSIPHQIHLGELHAILRRQEDFYPFLKDNREKIEKILTFRIPYYVGPLARGNSRFAWMTRKSEETITPWNFEEVVDKGASAQSFIERMTNFDKNLPNEKVLPKHSLLYEYFTVYNELTKVKYVTEGMRKPAFLSGEQKKAIVDLLFKTNRKVTVKQLKEDYFKKIECFDSVEISGVEDRFNASLGTYHDLLKIIKDKDFLDNEENEDILEDIVLTLTLFEDREMIEERLKTYAHLFDDKVMKQLKRRRYTGWGRLSRKLINGIRDKQSGKTILDFLKSDGFANRNFMQLIHDDSLTFKEDIQKAQVSGQGDSLHEHIANLAGSPAIKKGILQTVKVVDELVKVMGRHKPENIVIEMARENQTTQKGQKNSRERMKRIEEGIKELGSQILKEHPVENTQLQNEKLYLYYLQNGRDMYVDQELDINRLSDYDVDHIVPQSFLKDDSIDNKVLTRSDKARGKSDNVPSEEVVKKMKNYWRQLLNAKLITQRKFDNLTKAERGGLSELDKAGFIKRQLVETRQITKHVAQILDSRMNTKYDENDKLIREVKVITLKSKLVSDFRKDFQFYKVREINNYHHAHDAYLNAVVGTALIKKYPKLESEFVYGDYKVYDVRKMIAKSEQEIGKATAKYFFYSNIMNFFKTEITLANGEIRKRPLIETNGETGEIVWDKGRDFATVRKVLSMPQVNIVKKTEVQTGGFSKESILPKRNSDKLIARKKDWDPKKYGGFDSPTVAYSVLVVAKVEKGKSKKLKSVKELLGITIMERSSFEKNPIDFLEAKGYKEVKKDLIIKLPKYSLFELENGRKRMLASAGELQKGNELALPSKYVNFLYLASHYEKLKGSPEDNEQKQLFVEQHKHYLDEIIEQISEFSKRVILADANLDKVLSAYNKHRDKPIREQAENIIHLFTLTNLGAPAAFKYFDTTIDRKRYTSTKEVLDATLIHQSITGLYETRIDLSQLGGDGGGSSGSSGGLGIEDEYRLHETSTEPDVSLGSTWLSDFPQAWAETGGMGLAVRQAPLIIPLKATSTPVSIQQYPMSHEARLGIKPHIQRLLDQGILVPCQSPWNTPLLPVKKPGTNDYRPVQDLREVNKRVEDIHPTVPNPYNLLSGLPPSHQWYTVLDLKDAFFCLRLHPTSQPLFAFEWRDPGMGISGQLTWTRLPQGFKNSPTLFNEALHRDLADFRIQHPDLILLQYVDDILLAATSELDCQQGTRALLQTLGDLGYRASAKKAQICQKQVKYLGYLLREGQRWLTEARKETVMGQPVPKTPRQLREFLGKAGFCRLFIPGFAEMAAPLYPLTKPGTLFSWGPDQQKAYQEIKQALLTAPALGLPDLTKPFELFVDEKQGYAKGVLTQKLGPWRRPVAYLSKKLDPVAAGWPPCLRMVAAIAVLTKDAGKLTMGQPLVILAPHAVEALVKQPPDRWLSNARMTHYQAMLLDTDRVQFGPVVALNPATLLPLPEEGAPHDCLEILAETHGTRPDLTDQPIPDADHTWYTDGSSFLQEGQRKAGAAVTTETEVIWAGALPAGTSAQRAELIALTQALKMAEGKRLNVYTDSRYAFATAHIHGEIYRRRGWLTSEGREIKNKSEILALLKALFLPKRLSIIHCLGHQKGDSAEARGNRLADQAAREAAIKTPPDTSTLLIAGKRTADGSEFEKRTADGSEFESPKKKAKVE

SEQ ID NO: 2177 - protein, 2096 aa, synthetic construct
MPAAKRVKLDGGDKKYSIGLDIGTNSVGWAVITDEYKVPSKKFKVLGNTDRHSIKKNLIGALLFDSGETAEATRLKRTARRRYTRRKNRICYLQEIFSNEMAKVDDSFFHRLEESFLVEEDKKHERHPIFGNIVDEVAYHEKYPTIYHLRKKLVDSTDKADLRLIYLALAHMIKFRGHFLIEGDLNPDNSDVDKLFIQLVQTYNQLFEENPINASGVDAKAILSARLSKSRRLENLIAQLPGEKKNGLFGNLIALSLGLTPNFKSNFDLAEDAKLQLSKDTYDDDLDNLLAQIGDQYADLFLAAKNLSDAILLSDILRVNTEITKAPLSASMIKRYDEHHQDLTLLKALVRQQLPEKYKEIFFDQSKNGYAGYIDGGASQEEFYKFIKPILEKMDGTEELLVKLNREDLLRKQRTFDNGSIPHQIHLGELHAILRRQEDFYPFLKDNREKIEKILTFRIPYYVGPLARGNSRFAWMTRKSEETITPWNFEEVVDKGASAQSFIERMTNFDKNLPNEKVLPKHSLLYEYFTVYNELTKVKYVTEGMRKPAFLSGEQKKAIVDLLFKTNRKVTVKQLKEDYFKKIECFDSVEISGVEDRFNASLGTYHDLLKIIKDKDFLDNEENEDILEDIVLTLTLFEDREMIEERLKTYAHLFDDKVMKQLKRRRYTGWGRLSRKLINGIRDKQSGKTILDFLKSDGFANRNFMQLIHDDSLTFKEDIQKAQVSGQGDSLHEHIANLAGSPAIKKGILQTVKVVDELVKVMGRHKPENIVIEMARENQTTQKGQKNSRERMKRIEEGIKELGSQILKEHPVENTQLQNEKLYLYYLQNGRDMYVDQELDINRLSDYDVDHIVPQSFLKDDSIDNKVLTRSDKARGKSDNVPSEEVVKKMKNYWRQLLNAKLITQRKFDNLTKAERGGLSELDKAGFIKRQLVETRQITKHVAQILDSRMNTKYDENDKLIREVKVITLKSKLVSDFRKDFQFYKVREINNYHHAHDAYLNAVVGTALIKKYPKLESEFVYGDYKVYDVRKMIAKSEQEIGKATAKYFFYSNIMNFFKTEITLANGEIRKRPLIETNGETGEIVWDKGRDFATVRKVLSMPQVNIVKKTEVQTGGFSKESILPKRNSDKLIARKKDWDPKKYGGFDSPTVAYSVLVVAKVEKGKSKKLKSVKELLGITIMERSSFEKNPIDFLEAKGYKEVKKDLIIKLPKYSLFELENGRKRMLASAGELQKGNELALPSKYVNFLYLASHYEKLKGSPEDNEQKQLFVEQHKHYLDEIIEQISEFSKRVILADANLDKVLSAYNKHRDKPIREQAENIIHLFTLTNLGAPAAFKYFDTTIDRKRYTSTKEVLDATLIHQSITGLYETRIDLSQLGGDGGGSSEAAAKGGSGGLGIEDEYRLHETSTEPDVSLGSTWLSDFPQAWAETGGMGLAVRQAPLIIPLKATSTPVSIQQYPMSHEARLGIKPHIQRLLDQGILVPCQSPWNTPLLPVKKPGTNDYRPVQDLREVNKRVEDIHPTVPNPYNLLSGLPPSHQWYTVLDLKDAFFCLRLHPTSQPLFAFEWRDPGMGISGQLTWTRLPQGFKNSPTLFNEALHRDLADFRIQHPDLILLQYVDDILLAATSELDCQQGTRALLQTLGDLGYRASAKKAQICQKQVKYLGYLLREGQRWLTEARKETVMGQPVPKTPRQLREFLGKAGFCRLFIPGFAEMAAPLYPLTKPGTLFSWGPDQQKAYQEIKQALLTAPALGLPDLTKPFELFVDEKQGYAKGVLTQKLGPWRRPVAYLSKKLDPVAAGWPPCLRMVAAIAVLTKDAGKLTMGQPLVILAPHAVEALVKQPPDRWLSNARMTHYQAMLLDTDRVQFGPVVALNPATLLPLPEEGAPHDCLEILAETHGTRPDLTDQPIPDADHTWYTDGSSFLQEGQRKAGAAVTTETEVIWAGALPAGTSAQRAELIALTQALKMAEGKRLNVYTDSRYAFATAHIHGEIYRRRGWLTSEGREIKNKSEILALLKALFLPKRLSIIHCLGHQKGDSAEARGNRLADQAAREAAIKTPPDTSTLLIAGKRTADGSEFEKRTADGSEFESPKKKAKVE

SEQ ID NO: 2178 - protein, 2096 aa, synthetic construct
MPAAKRVKLDGGDKKYSIGLDIGTNSVGWAVITDEYKVPSKKFKVLGNTDRHSIKKNLIGALLFDSGETAEATRLKRTARRRYTRRKNRICYLQEIFSNEMAKVDDSFFHRLEESFLVEEDKKHERHPIFGNIVDEVAYHEKYPTIYHLRKKLVDSTDKADLRLIYLALAHMIKFRGHFLIEGDLNPDNSDVDKLFIQLVQTYNQLFEENPINASGVDAKAILSARLSKSRRLENLIAQLPGEKKNGLFGNLIALSLGLTPNFKSNFDLAEDAKLQLSKDTYDDDLDNLLAQIGDQYADLFLAAKNLSDAILLSDILRVNTEITKAPLSASMIKRYDEHHQDLTLLKALVRQQLPEKYKEIFFDQSKNGYAGYIDGGASQEEFYKFIKPILEKMDGTEELLVKLNREDLLRKQRTFDNGSIPHQIHLGELHAILRRQEDFYPFLKDNREKIEKILTFRIPYYVGPLARGNSRFAWMTRKSEETITPWNFEEVVDKGASAQSFIERMTNFDKNLPNEKVLPKHSLLYEYFTVYNELTKVKYVTEGMRKPAFLSGEQKKAIVDLLFKTNRKVTVKQLKEDYFKKIECFDSVEISGVEDRFNASLGTYHDLLKIIKDKDFLDNEENEDILEDIVLTLTLFEDREMIEERLKTYAHLFDDKVMKQLKRRRYTGWGRLSRKLINGIRDKQSGKTILDFLKSDGFANRNFMQLIHDDSLTFKEDIQKAQVSGQGDSLHEHIANLAGSPAIKKGILQTVKVVDELVKVMGRHKPENIVIEMARENQTTQKGQKNSRERMKRIEEGIKELGSQILKEHPVENTQLQNEKLYLYYLQNGRDMYVDQELDINRLSDYDVDHIVPQSFLKDDSIDNKVLTRSDKARGKSDNVPSEEVVKKMKNYWRQLLNAKLITQRKFDNLTKAERGGLSELDKAGFIKRQLVETRQITKHVAQILDSRMNTKYDENDKLIREVKVITLKSKLVSDFRKDFQFYKVREINNYHHAHDAYLNAVVGTALIKKYPKLESEFVYGDYKVYDVRKMIAKSEQEIGKATAKYFFYSNIMNFFKTEITLANGEIRKRPLIETNGETGEIVWDKGRDFATVRKVLSMPQVNIVKKTEVQTGGFSKESILPKRNSDKLIARKKDWDPKKYGGFDSPTVAYSVLVVAKVEKGKSKKLKSVKELLGITIMERSSFEKNPIDFLEAKGYKEVKKDLIIKLPKYSLFELENGRKRMLASAGELQKGNELALPSKYVNFLYLASHYEKLKGSPEDNEQKQLFVEQHKHYLDEIIEQISEFSKRVILADANLDKVLSAYNKHRDKPIREQAENIIHLFTLTNLGAPAAFKYFDTTIDRKRYTSTKEVLDATLIHQSITGLYETRIDLSQLGGDGGPAPGGGEAAAKGGLGIEDEYRLHETSTEPDVSLGSTWLSDFPQAWAETGGMGLAVRQAPLIIPLKATSTPVSIQQYPMSHEARLGIKPHIQRLLDQGILVPCQSPWNTPLLPVKKPGTNDYRPVQDLREVNKRVEDIHPTVPNPYNLLSGLPPSHQWYTVLDLKDAFFCLRLHPTSQPLFAFEWRDPGMGISGQLTWTRLPQGFKNSPTLFNEALHRDLADFRIQHPDLILLQYVDDILLAATSELDCQQGTRALLQTLGDLGYRASAKKAQICQKQVKYLGYLLREGQRWLTEARKETVMGQPVPKTPRQLREFLGKAGFCRLFIPGFAEMAAPLYPLTKPGTLFSWGPDQQKAYQEIKQALLTAPALGLPDLTKPFELFVDEKQGYAKGVLTQKLGPWRRPVAYLSKKLDPVAAGWPPCLRMVAAIAVLTKDAGKLTMGQPLVILAPHAVEALVKQPPDRWLSNARMTHYQAMLLDTDRVQFGPVVALNPATLLPLPEEGAPHDCLEILAETHGTRPDLTDQPIPDADHTWYTDGSSFLQEGQRKAGAAVTTETEVIWAGALPAGTSAQRAELIALTQALKMAEGKRLNVYTDSRYAFATAHIHGEIYRRRGWLTSEGREIKNKSEILALLKALFLPKRLSIIHCLGHQKGDSAEARGNRLADQAAREAAIKTPPDTSTLLIAGKRTADGSEFEKRTADGSEFESPKKKAKVE

SEQ ID NO: 2179 - protein, 2091 aa, synthetic construct
MPAAKRVKLDGGDKKYSIGLDIGTNSVGWAVITDEYKVPSKKFKVLGNTDRHSIKKNLIGALLFDSGETAEATRLKRTARRRYTRRKNRICYLQEIFSNEMAKVDDSFFHRLEESFLVEEDKKHERHPIFGNIVDEVAYHEKYPTIYHLRKKLVDSTDKADLRLIYLALAHMIKFRGHFLIEGDLNPDNSDVDKLFIQLVQTYNQLFEENPINASGVDAKAILSARLSKSRRLENLIAQLPGEKKNGLFGNLIALSLGLTPNFKSNFDLAEDAKLQLSKDTYDDDLDNLLAQIGDQYADLFLAAKNLSDAILLSDILRVNTEITKAPLSASMIKRYDEHHQDLTLLKALVRQQLPEKYKEIFFDQSKNGYAGYIDGGASQEEFYKFIKPILEKMDGTEELLVKLNREDLLRKQRTFDNGSIPHQIHLGELHAILRRQEDFYPFLKDNREKIEKILTFRIPYYVGPLARGNSRFAWMTRKSEETITPWNFEEVVDKGASAQSFIERMTNFDKNLPNEKVLPKHSLLYEYFTVYNELTKVKYVTEGMRKPAFLSGEQKKAIVDLLFKTNRKVTVKQLKEDYFKKIECFDSVEISGVEDRFNASLGTYHDLLKIIKDKDFLDNEENEDILEDIVLTLTLFEDREMIEERLKTYAHLFDDKVMKQLKRRRYTGWGRLSRKLINGIRDKQSGKTILDFLKSDGFANRNFMQLIHDDSLTFKEDIQKAQVSGQGDSLHEHIANLAGSPAIKKGILQTVKVVDELVKVMGRHKPENIVIEMARENQTTQKGQKNSRERMKRIEEGIKELGSQILKEHPVENTQLQNEKLYLYYLQNGRDMYVDQELDINRLSDYDVDHIVPQSFLKDDSIDNKVLTRSDKARGKSDNVPSEEVVKKMKNYWRQLLNAKLITQRKFDNLTKAERGGLSELDKAGFIKRQLVETRQITKHVAQILDSRMNTKYDENDKLIREVKVITLKSKLVSDFRKDFQFYKVREINNYHHAHDAYLNAVVGTALIKKYPKLESEFVYGDYKVYDVRKMIAKSEQEIGKATAKYFFYSNIMNFFKTEITLANGEIRKRPLIETNGETGEIVWDKGRDFATVRKVLSMPQVNIVKKTEVQTGGFSKESILPKRNSDKLIARKKDWDPKKYGGFDSPTVAYSVLVVAKVEKGKSKKLKSVKELLGITIMERSSFEKNPIDFLEAKGYKEVKKDLIIKLPKYSLFELENGRKRMLASAGELQKGNELALPSKYVNFLYLASHYEKLKGSPEDNEQKQLFVEQHKHYLDEIIEQISEFSKRVILADANLDKVLSAYNKHRDKPIREQAENIIHLFTLTNLGAPAAFKYFDTTIDRKRYTSTKEVLDATLIHQSITGLYETRIDLSQLGGDGGGGGGSSGGLGIEDEYRLHETSTEPDVSLGSTWLSDFPQAWAETGGMGLAVRQAPLIIPLKATSTPVSIQQYPMSHEARLGIKPHIQRLLDQGILVPCQSPWNTPLLPVKKPGTNDYRPVQDLREVNKRVEDIHPTVPNPYNLLSGLPPSHQWYTVLDLKDAFFCLRLHPTSQPLFAFEWRDPGMGISGQLTWTRLPQGFKNSPTLFNEALHRDLADFRIQHPDLILLQYVDDILLAATSELDCQQGTRALLQTLGDLGYRASAKKAQICQKQVKYLGYLLREGQRWLTEARKETVMGQPVPKTPRQLREFLGKAGFCRLFIPGFAEMAAPLYPLTKPGTLFSWGPDQQKAYQEIKQALLTAPALGLPDLTKPFELFVDEKQGYAKGVLTQKLGPWRRPVAYLSKKLDPVAAGWPPCLRMVAAIAVLTKDAGKLTMGQPLVILAPHAVEALVKQPPDRWLSNARMTHYQAMLLDTDRVQFGPVVALNPATLLPLPEEGAPHDCLEILAETHGTRPDLTDQPIPDADHTWYTDGSSFLQEGQRKAGAAVTTETEVIWAGALPAGTSAQRAELIALTQALKMAEGKRLNVYTDSRYAFATAHIHGEIYRRRGWLTSEGREIKNKSEILALLKALFLPKRLSIIHCLGHQKGDSAEARGNRLADQAAREAAIKTPPDTSTLLIAGKRTADGSEFEKRTADGSEFESPKKKAKVE

SEQ ID NO: 2180 - protein, 2094 aa, synthetic construct
MPAAKRVKLDGGDKKYSIGLDIGTNSVGWAVITDEYKVPSKKFKVLGNTDRHSIKKNLIGALLFDSGETAEATRLKRTARRRYTRRKNRICYLQEIFSNEMAKVDDSFFHRLEESFLVEEDKKHERHPIFGNIVDEVAYHEKYPTIYHLRKKLVDSTDKADLRLIYLALAHMIKFRGHFLIEGDLNPDNSDVDKLFIQLVQTYNQLFEENPINASGVDAKAILSARLSKSRRLENLIAQLPGEKKNGLFGNLIALSLGLTPNFKSNFDLAEDAKLQLSKDTYDDDLDNLLAQIGDQYADLFLAAKNLSDAILLSDILRVNTEITKAPLSASMIKRYDEHHQDLTLLKALVRQQLPEKYKEIFFDQSKNGYAGYIDGGASQEEFYKFIKPILEKMDGTEELLVKLNREDLLRKQRTFDNGSIPHQIHLGELHAILRRQEDFYPFLKDNREKIEKILTFRIPYYVGPLARGNSRFAWMTRKSEETITPWNFEEVVDKGASAQSFIERMTNFDKNLPNEKVLPKHSLLYEYFTVYNELTKVKYVTEGMRKPAFLSGEQKKAIVDLLFKTNRKVTVKQLKEDYFKKIECFDSVEISGVEDRFNASLGTYHDLLKIIKDKDFLDNEENEDILEDIVLTLTLFEDREMIEERLKTYAHLFDDKVMKQLKRRRYTGWGRLSRKLINGIRDKQSGKTILDFLKSDGFANRNFMQLIHDDSLTFKEDIQKAQVSGQGDSLHEHIANLAGSPAIKKGILQTVKVVDELVKVMGRHKPENIVIEMARENQTTQKGQKNSRERMKRIEEGIKELGSQILKEHPVENTQLQNEKLYLYYLQNGRDMYVDQELDINRLSDYDVDHIVPQSFLKDDSIDNKVLTRSDKARGKSDNVPSEEVVKKMKNYWRQLLNAKLITQRKFDNLTKAERGGLSELDKAGFIKRQLVETRQITKHVAQILDSRMNTKYDENDKLIREVKVITLKSKLVSDFRKDFQFYKVREINNYHHAHDAYLNAVVGTALIKKYPKLESEFVYGDYKVYDVRKMIAKSEQEIGKATAKYFFYSNIMNFFKTEITLANGEIRKRPLIETNGETGEIVWDKGRDFATVRKVLSMPQVNIVKKTEVQTGGFSKESILPKRNSDKLIARKKDWDPKKYGGFDSPTVAYSVLVVAKVEKGKSKKLKSVKELLGITIMERSSFEKNPIDFLEAKGYKEVKKDLIIKLPKYSLFELENGRKRMLASAGELQKGNELALPSKYVNFLYLASHYEKLKGSPEDNEQKQLFVEQHKHYLDEIIEQISEFSKRVILADANLDKVLSAYNKHRDKPIREQAENIIHLFTLTNLGAPAAFKYFDTTIDRKRYTSTKEVLDATLIHQSITGLYETRIDLSQLGGDGGGGGPAPGSSGGLGIEDEYRLHETSTEPDVSLGSTWLSDFPQAWAETGGMGLAVRQAPLIIPLKATSTPVSIQQYPMSHEARLGIKPHIQRLLDQGILVPCQSPWNTPLLPVKKPGTNDYRPVQDLREVNKRVEDIHPTVPNPYNLLSGLPPSHQWYTVLDLKDAFFCLRLHPTSQPLFAFEWRDPGMGISGQLTWTRLPQGFKNSPTLFNEALHRDLADFRIQHPDLILLQYVDDILLAATSELDCQQGTRALLQTLGDLGYRASAKKAQICQKQVKYLGYLLREGQRWLTEARKETVMGQPVPKTPRQLREFLGKAGFCRLFIPGFAEMAAPLYPLTKPGTLFSWGPDQQKAYQEIKQALLTAPALGLPDLTKPFELFVDEKQGYAKGVLTQKLGPWRRPVAYLSKKLDPVAAGWPPCLRMVAAIAVLTKDAGKLTMGQPLVILAPHAVEALVKQPPDRWLSNARMTHYQAMLLDTDRVQFGPVVALNPATLLPLPEEGAPHDCLEILAETHGTRPDLTDQPIPDADHTWYTDGSSFLQEGQRKAGAAVTTETEVIWAGALPAGTSAQRAELIALTQALKMAEGKRLNVYTDSRYAFATAHIHGEIYRRRGWLTSEGREIKNKSEILALLKALFLPKRLSIIHCLGHQKGDSAEARGNRLADQAAREAAIKTPPDTSTLLIAGKRTADGSEFEKRTADGSEFESPKKKAKVE

SEQ ID NO: 2181 - protein, 2118 aa, synthetic construct
MPAAKRVKLDGGDKKYSIGLDIGTNSVGWAVITDEYKVPSKKFKVLGNTDRHSIKKNLIGALLFDSGETAEATRLKRTARRRYTRRKNRICYLQEIFSNEMAKVDDSFFHRLEESFLVEEDKKHERHPIFGNIVDEVAYHEKYPTIYHLRKKLVDSTDKADLRLIYLALAHMIKFRGHFLIEGDLNPDNSDVDKLFIQLVQTYNQLFEENPINASGVDAKAILSARLSKSRRLENLIAQLPGEKKNGLFGNLIALSLGLTPNFKSNFDLAEDAKLQLSKDTYDDDLDNLLAQIGDQYADLFLAAKNLSDAILLSDILRVNTEITKAPLSASMIKRYDEHHQDLTLLKALVRQQLPEKYKEIFFDQSKNGYAGYIDGGASQEEFYKFIKPILEKMDGTEELLVKLNREDLLRKQRTFDNGSIPHQIHLGELHAILRRQEDFYPFLKDNREKIEKILTFRIPYYVGPLARGNSRFAWMTRKSEETITPWNFEEVVDKGASAQSFIERMTNFDKNLPNEKVLPKHSLLYEYFTVYNELTKVKYVTEGMRKPAFLSGEQKKAIVDLLFKTNRKVTVKQLKEDYFKKIECFDSVEISGVEDRFNASLGTYHDLLKIIKDKDFLDNEENEDILEDIVLTLTLFEDREMIEERLKTYAHLFDDKVMKQLKRRRYTGWGRLSRKLINGIRDKQSGKTILDFLKSDGFANRNFMQLIHDDSLTFKEDIQKAQVSGQGDSLHEHIANLAGSPAIKKGILQTVKVVDELVKVMGRHKPENIVIEMARENQTTQKGQKNSRERMKRIEEGIKELGSQILKEHPVENTQLQNEKLYLYYLQNGRDMYVDQELDINRLSDYDVDHIVPQSFLKDDSIDNKVLTRSDKARGKSDNVPSEEVVKKMKNYWRQLLNAKLITQRKFDNLTKAERGGLSELDKAGFIKRQLVETRQITKHVAQILDSRMNTKYDENDKLIREVKVITLKSKLVSDFRKDFQFYKVREINNYHHAHDAYLNAVVGTALIKKYPKLESEFVYGDYKVYDVRKMIAKSEQEIGKATAKYFFYSNIMNFFKTEITLANGEIRKRPLIETNGETGEIVWDKGRDFATVRKVLSMPQVNIVKKTEVQTGGFSKESILPKRNSDKLIARKKDWDPKKYGGFDSPTVAYSVLVVAKVEKGKSKKLKSVKELLGITIMERSSFEKNPIDFLEAKGYKEVKKDLIIKLPKYSLFELENGRKRMLASAGELQKGNELALPSKYVNFLYLASHYEKLKGSPEDNEQKQLFVEQHKHYLDEIIEQISEFSKRVILADANLDKVLSAYNKHRDKPIREQAENIIHLFTLTNLGAPAAFKYFDTTIDRKRYTSTKEVLDATLIHQSITGLYETRIDLSQLGGDGGSGGSSGGSSGSETPGTSESATPESSGGSSGGSSGGLGIEDEYRLHETSTEPDVSLGSTWLSDFPQAWAETGGMGLAVRQAPLIIPLKATSTPVSIQQYPMSHEARLGIKPHIQRLLDQGILVPCQSPWNTPLLPVKKPGTNDYRPVQDLREVNKRVEDIHPTVPNPYNLLSGLPPSHQWYTVLDLKDAFFCLRLHPTSQPLFAFEWRDPGMGISGQLTWTRLPQGFKNSPTLFNEALHRDLADFRIQHPDLILLQYVDDILLAATSELDCQQGTRALLQTLGDLGYRASAKKAQICQKQVKYLGYLLREGQRWLTEARKETVMGQPVPKTPRQLREFLGKAGFCRLFIPGFAEMAAPLYPLTKPGTLFSWGPDQQKAYQEIKQALLTAPALGLPDLTKPFELFVDEKQGYAKGVLTQKLGPWRRPVAYLSKKLDPVAAGWPPCLRMVAAIAVLTKDAGKLTMGQPLVILAPHAVEALVKQPPDRWLSNARMTHYQAMLLDTDRVQFGPVVALNPATLLPLPEEGAPHDCLEILAETHGTRPDLTDQPIPDADHTWYTDGSSFLQEGQRKAGAAVTTETEVIWAGALPAGTSAQRAELIALTQALKMAEGKRLNVYTDSRYAFATAHIHGEIYRRRGWLTSEGREIKNKSEILALLKALFLPKRLSIIHCLGHQKGDSAEARGNRLADQAAREAAIKTPPDTSTLLIAGKRTADGSEFEKRTADGSEFESPKKKAKVE

SEQ ID NO: 2182 - protein, 2096 aa, synthetic construct
MPAAKRVKLDGGDKKYSIGLDIGTNSVGWAVITDEYKVPSKKFKVLGNTDRHSIKKNLIGALLFDSGETAEATRLKRTARRRYTRRKNRICYLQEIFSNEMAKVDDSFFHRLEESFLVEEDKKHERHPIFGNIVDEVAYHEKYPTIYHLRKKLVDSTDKADLRLIYLALAHMIKFRGHFLIEGDLNPDNSDVDKLFIQLVQTYNQLFEENPINASGVDAKAILSARLSKSRRLENLIAQLPGEKKNGLFGNLIALSLGLTPNFKSNFDLAEDAKLQLSKDTYDDDLDNLLAQIGDQYADLFLAAKNLSDAILLSDILRVNTEITKAPLSASMIKRYDEHHQDLTLLKALVRQQLPEKYKEIFFDQSKNGYAGYIDGGASQEEFYKFIKPILEKMDGTEELLVKLNREDLLRKQRTFDNGSIPHQIHLGELHAILRRQEDFYPFLKDNREKIEKILTFRIPYYVGPLARGNSRFAWMTRKSEETITPWNFEEVVDKGASAQSFIERMTNFDKNLPNEKVLPKHSLLYEYFTVYNELTKVKYVTEGMRKPAFLSGEQKKAIVDLLFKTNRKVTVKQLKEDYFKKIECFDSVEISGVEDRFNASLGTYHDLLKIIKDKDFLDNEENEDILEDIVLTLTLFEDREMIEERLKTYAHLFDDKVMKQLKRRRYTGWGRLSRKLINGIRDKQSGKTILDFLKSDGFANRNFMQLIHDDSLTFKEDIQKAQVSGQGDSLHEHIANLAGSPAIKKGILQTVKVVDELVKVMGRHKPENIVIEMARENQTTQKGQKNSRERMKRIEEGIKELGSQILKEHPVENTQLQNEKLYLYYLQNGRDMYVDQELDINRLSDYDVDHIVPQSFLKDDSIDNKVLTRSDKARGKSDNVPSEEVVKKMKNYWRQLLNAKLITQRKFDNLTKAERGGLSELDKAGFIKRQLVETRQITKHVAQILDSRMNTKYDENDKLIREVKVITLKSKLVSDFRKDFQFYKVREINNYHHAHDAYLNAVVGTALIKKYPKLESEFVYGDYKVYDVRKMIAKSEQEIGKATAKYFFYSNIMNFFKTEITLANGEIRKRPLIETNGETGEIVWDKGRDFATVRKVLSMPQVNIVKKTEVQTGGFSKESILPKRNSDKLIARKKDWDPKKYGGFDSPTVAYSVLVVAKVEKGKSKKLKSVKELLGITIMERSSFEKNPIDFLEAKGYKEVKKDLIIKLPKYSLFELENGRKRMLASAGELQKGNELALPSKYVNFLYLASHYEKLKGSPEDNEQKQLFVEQHKHYLDEIIEQISEFSKRVILADANLDKVLSAYNKHRDKPIREQAENIIHLFTLTNLGAPAAFKYFDTTIDRKRYTSTKEVLDATLIHQSITGLYETRIDLSQLGGDGGGSSGGGEAAAKGGTLGIEDEYRLHETSTEPDVSLGSTWLSDFPQAWAETGGMGLAVRQAPLIIPLKATSTPVSIQQYPMSHEARLGIKPHIQRLLDQGILVPCQSPWNTPLLPVKKPGTNDYRPVQDLREVNKRVEDIHPTVPNPYNLLSGLPPSHQWYTVLDLKDAFFCLRLHPTSQPLFAFEWRDPGMGISGQLTWTRLPQGFKNSPTLFDEALHRDLADFRIQHPDLILLQYVDDILLAATSELDCQQGTRALLQTLGDLGYRASAKKAQICQKQVKYLGYLLREGQRWLTEARKETVMGQPVPKTPRQLREFLGTAGFCRLWIPGFAEMAAPLYPLTKTGTLFSWGPDQQKAYQEIKQALLTAPALGLPDLTKPFELFVDEKQGYAKGVLTQKLGPWRRPVAYLSKKLDPVAAGWPPCLRMVAAIAVLTKDAGKLTMGQPLVILAPHAVEALVKQPPDRWLSNARMTHYQAMLLDTDRVQFGPVVALNPATLLPLPEEGAPHDCLEILAETHGTRPDLTDQPIPDADHTWYTDGSSFLQEGQRKAGAAVTTETEVIWAGALPAGTSAQRAELIALTQALKMAEGKRLNVYTDSRYAFATAHIHGEIYRRRGLLTSEGREIKNKSEILALLKALFLPKRLSIIHCLGHQKGDSAEARGNRLADQAAREAAIKTPPDTSTLLAGKRTADGSEFEKRTADGSEFESPKKKAKVE

SEQ ID NO: 2183 - protein, 2091 aa, synthetic construct
MPAAKRVKLDGGDKKYSIGLDIGTNSVGWAVITDEYKVPSKKFKVLGNTDRHSIKKNLIGALLFDSGETAEATRLKRTARRRYTRRKNRICYLQEIFSNEMAKVDDSFFHRLEESFLVEEDKKHERHPIFGNIVDEVAYHEKYPTIYHLRKKLVDSTDKADLRLIYLALAHMIKFRGHFLIEGDLNPDNSDVDKLFIQLVQTYNQLFEENPINASGVDAKAILSARLSKSRRLENLIAQLPGEKKNGLFGNLIALSLGLTPNFKSNFDLAEDAKLQLSKDTYDDDLDNLLAQIGDQYADLFLAAKNLSDAILLSDILRVNTEITKAPLSASMIKRYDEHHQDLTLLKALVRQQLPEKYKEIFFDQSKNGYAGYIDGGASQEEFYKFIKPILEKMDGTEELLVKLNREDLLRKQRTFDNGSIPHQIHLGELHAILRRQEDFYPFLKDNREKIEKILTFRIPYYVGPLARGNSRFAWMTRKSEETITPWNFEEVVDKGASAQSFIERMTNFDKNLPNEKVLPKHSLLYEYFTVYNELTKVKYVTEGMRKPAFLSGEQKKAIVDLLFKTNRKVTVKQLKEDYFKKIECFDSVEISGVEDRFNASLGTYHDLLKIIKDKDFLDNEENEDILEDIVLTLTLFEDREMIEERLKTYAHLFDDKVMKQLKRRRYTGWGRLSRKLINGIRDKQSGKTILDFLKSDGFANRNFMQLIHDDSLTFKEDIQKAQVSGQGDSLHEHIANLAGSPAIKKGILQTVKVVDELVKVMGRHKPENIVIEMARENQTTQKGQKNSRERMKRIEEGIKELGSQILKEHPVENTQLQNEKLYLYYLQNGRDMYVDQELDINRLSDYDVDHIVPQSFLKDDSIDNKVLTRSDKARGKSDNVPSEEVVKKMKNYWRQLLNAKLITQRKFDNLTKAERGGLSELDKAGFIKRQLVETRQITKHVAQILDSRMNTKYDENDKLIREVKVITLKSKLVSDFRKDFQFYKVREINNYHHAHDAYLNAVVGTALIKKYPKLESEFVYGDYKVYDVRKMIAKSEQEIGKATAKYFFYSNIMNFFKTEITLANGEIRKRPLIETNGETGEIVWDKGRDFATVRKVLSMPQVNIVKKTEVQTGGFSKESILPKRNSDKLIARKKDWDPKKYGGFDSPTVAYSVLVVAKVEKGKSKKLKSVKELLGITIMERSSFEKNPIDFLEAKGYKEVKKDLIIKLPKYSLFELENGRKRMLASAGELQKGNELALPSKYVNFLYLASHYEKLKGSPEDNEQKQLFVEQHKHYLDEIIEQISEFSKRVILADANLDKVLSAYNKHRDKPIREQAENIIHLFTLTNLGAPAAFKYFDTTIDRKRYTSTKEVLDATLIHQSITGLYETRIDLSQLGGDGGGSSPAPGGTLGIEDEYRLHETSTEPDVSLGSTWLSDFPQAWAETGGMGLAVRQAPLIIPLKATSTPVSIQQYPMSHEARLGIKPHIQRLLDQGILVPCQSPWNTPLLPVKKPGTNDYRPVQDLREVNKRVEDIHPTVPNPYNLLSGLPPSHQWYTVLDLKDAFFCLRLHPTSQPLFAFEWRDPGMGISGQLTWTRLPQGFKNSPTLFDEALHRDLADFRIQHPDLILLQYVDDILLAATSELDCQQGTRALLQTLGDLGYRASAKKAQICQKQVKYLGYLLREGQRWLTEARKETVMGQPVPKTPRQLREFLGTAGFCRLWIPGFAEMAAPLYPLTKTGTLFSWGPDQQKAYQEIKQALLTAPALGLPDLTKPFELFVDEKQGYAKGVLTQKLGPWRRPVAYLSKKLDPVAAGWPPCLRMVAAIAVLTKDAGKLTMGQPLVILAPHAVEALVKQPPDRWLSNARMTHYQAMLLDTDRVQFGPVVALNPATLLPLPEEGAPHDCLEILAETHGTRPDLTDQPIPDADHTWYTDGSSFLQEGQRKAGAAVTTETEVIWAGALPAGTSAQRAELIALTQALKMAEGKRLNVYTDSRYAFATAHIHGEIYRRRGLLTSEGREIKNKSEILALLKALFLPKRLSIIHCLGHQKGDSAEARGNRLADQAAREAAIKTPPDTSTLLAGKRTADGSEFEKRTADGSEFESPKKKAKVE

SEQ ID NO: 2184 - protein, 2096 aa, synthetic construct
MPAAKRVKLDGGDKKYSIGLDIGTNSVGWAVITDEYKVPSKKFKVLGNTDRHSIKKNLIGALLFDSGETAEATRLKRTARRRYTRRKNRICYLQEIFSNEMAKVDDSFFHRLEESFLVEEDKKHERHPIFGNIVDEVAYHEKYPTIYHLRKKLVDSTDKADLRLIYLALAHMIKFRGHFLIEGDLNPDNSDVDKLFIQLVQTYNQLFEENPINASGVDAKAILSARLSKSRRLENLIAQLPGEKKNGLFGNLIALSLGLTPNFKSNFDLAEDAKLQLSKDTYDDDLDNLLAQIGDQYADLFLAAKNLSDAILLSDILRVNTEITKAPLSASMIKRYDEHHQDLTLLKALVRQQLPEKYKEIFFDQSKNGYAGYIDGGASQEEFYKFIKPILEKMDGTEELLVKLNREDLLRKQRTFDNGSIPHQIHLGELHAILRRQEDFYPFLKDNREKIEKILTFRIPYYVGPLARGNSRFAWMTRKSEETITPWNFEEVVDKGASAQSFIERMTNFDKNLPNEKVLPKHSLLYEYFTVYNELTKVKYVTEGMRKPAFLSGEQKKAIVDLLFKTNRKVTVKQLKEDYFKKIECFDSVEISGVEDRFNASLGTYHDLLKIIKDKDFLDNEENEDILEDIVLTLTLFEDREMIEERLKTYAHLFDDKVMKQLKRRRYTGWGRLSRKLINGIRDKQSGKTILDFLKSDGFANRNFMQLIHDDSLTFKEDIQKAQVSGQGDSLHEHIANLAGSPAIKKGILQTVKVVDELVKVMGRHKPENIVIEMARENQTTQKGQKNSRERMKRIEEGIKELGSQILKEHPVENTQLQNEKLYLYYLQNGRDMYVDQELDINRLSDYDVDHIVPQSFLKDDSIDNKVLTRSDKARGKSDNVPSEEVVKKMKNYWRQLLNAKLITQRKFDNLTKAERGGLSELDKAGFIKRQLVETRQITKHVAQILDSRMNTKYDENDKLIREVKVITLKSKLVSDFRKDFQFYKVREINNYHHAHDAYLNAVVGTALIKKYPKLESEFVYGDYKVYDVRKMIAKSEQEIGKATAKYFFYSNIMNFFKTEITLANGEIRKRPLIETNGETGEIVWDKGRDFATVRKVLSMPQVNIVKKTEVQTGGFSKESILPKRNSDKLIARKKDWDPKKYGGFDSPTVAYSVLVVAKVEKGKSKKLKSVKELLGITIMERSSFEKNPIDFLEAKGYKEVKKDLIIKLPKYSLFELENGRKRMLASAGELQKGNELALPSKYVNFLYLASHYEKLKGSPEDNEQKQLFVEQHKHYLDEIIEQISEFSKRVILADANLDKVLSAYNKHRDKPIREQAENIIHLFTLTNLGAPAAFKYFDTTIDRKRYTSTKEVLDATLIHQSITGLYETRIDLSQLGGDGGGGGEAAAKGGSGGTLGIEDEYRLHETSTEPDVSLGSTWLSDFPQAWAETGGMGLAVRQAPLIIPLKATSTPVSIQQYPMSHEARLGIKPHIQRLLDQGILVPCQSPWNTPLLPVKKPGTNDYRPVQDLREVNKRVEDIHPTVPNPYNLLSGLPPSHQWYTVLDLKDAFFCLRLHPTSQPLFAFEWRDPGMGISGQLTWTRLPQGFKNSPTLFDEALHRDLADFRIQHPDLILLQYVDDILLAATSELDCQQGTRALLQTLGDLGYRASAKKAQICQKQVKYLGYLLREGQRWLTEARKETVMGQPVPKTPRQLREFLGTAGFCRLWIPGFAEMAAPLYPLTKTGTLFSWGPDQQKAYQEIKQALLTAPALGLPDLTKPFELFVDEKQGYAKGVLTQKLGPWRRPVAYLSKKLDPVAAGWPPCLRMVAAIAVLTKDAGKLTMGQPLVILAPHAVEALVKQPPDRWLSNARMTHYQAMLLDTDRVQFGPVVALNPATLLPLPEEGAPHDCLEILAETHGTRPDLTDQPIPDADHTWYTDGSSFLQEGQRKAGAAVTTETEVIWAGALPAGTSAQRAELIALTQALKMAEGKRLNVYTDSRYAFATAHIHGEIYRRRGLLTSEGREIKNKSEILALLKALFLPKRLSIIHCLGHQKGDSAEARGNRLADQAAREAAIKTPPDTSTLLAGKRTADGSEFEKRTADGSEFESPKKKAKVE

SEQ ID NO: 2185 - protein, 2096 aa, synthetic construct
MPAAKRVKLDGGDKKYSIGLDIGTNSVGWAVITDEYKVPSKKFKVLGNTDRHSIKKNLIGALLFDSGETAEATRLKRTARRRYTRRKNRICYLQEIFSNEMAKVDDSFFHRLEESFLVEEDKKHERHPIFGNIVDEVAYHEKYPTIYHLRKKLVDSTDKADLRLIYLALAHMIKFRGHFLIEGDLNPDNSDVDKLFIQLVQTYNQLFEENPINASGVDAKAILSARLSKSRRLENLIAQLPGEKKNGLFGNLIALSLGLTPNFKSNFDLAEDAKLQLSKDTYDDDLDNLLAQIGDQYADLFLAAKNLSDAILLSDILRVNTEITKAPLSASMIKRYDEHHQDLTLLKALVRQQLPEKYKEIFFDQSKNGYAGYIDGGASQEEFYKFIKPILEKMDGTEELLVKLNREDLLRKQRTFDNGSIPHQIHLGELHAILRRQEDFYPFLKDNREKIEKILTFRIPYYVGPLARGNSRFAWMTRKSEETITPWNFEEVVDKGASAQSFIERMTNFDKNLPNEKVLPKHSLLYEYFTVYNELTKVKYVTEGMRKPAFLSGEQKKAIVDLLFKTNRKVTVKQLKEDYFKKIECFDSVEISGVEDRFNASLGTYHDLLKIIKDKDFLDNEENEDILEDIVLTLTLFEDREMIEERLKTYAHLFDDKVMKQLKRRRYTGWGRLSRKLINGIRDKQSGKTILDFLKSDGFANRNFMQLIHDDSLTFKEDIQKAQVSGQGDSLHEHIANLAGSPAIKKGILQTVKVVDELVKVMGRHKPENIVIEMARENQTTQKGQKNSRERMKRIEEGIKELGSQILKEHPVENTQLQNEKLYLYYLQNGRDMYVDQELDINRLSDYDVDHIVPQSFLKDDSIDNKVLTRSDKARGKSDNVPSEEVVKKMKNYWRQLLNAKLITQRKFDNLTKAERGGLSELDKAGFIKRQLVETRQITKHVAQILDSRMNTKYDENDKLIREVKVITLKSKLVSDFRKDFQFYKVREINNYHHAHDAYLNAVVGTALIKKYPKLESEFVYGDYKVYDVRKMIAKSEQEIGKATAKYFFYSNIMNFFKTEITLANGEIRKRPLIETNGETGEIVWDKGRDFATVRKVLSMPQVNIVKKTEVQTGGFSKESILPKRNSDKLIARKKDWDPKKYGGFDSPTVAYSVLVVAKVEKGKSKKLKSVKELLGITIMERSSFEKNPIDFLEAKGYKEVKKDLIIKLPKYSLFELENGRKRMLASAGELQKGNELALPSKYVNFLYLASHYEKLKGSPEDNEQKQLFVEQHKHYLDEIIEQISEFSKRVILADANLDKVLSAYNKHRDKPIREQAENIIHLFTLTNLGAPAAFKYFDTTIDRKRYTSTKEVLDATLIHQSITGLYETRIDLSQLGGDGGEAAAKPAPGSSGGTLGIEDEYRLHETSTEPDVSLGSTWLSDFPQAWAETGGMGLAVRQAPLIIPLKATSTPVSIQQYPMSHEARLGIKPHIQRLLDQGILVPCQSPWNTPLLPVKKPGTNDYRPVQDLREVNKRVEDIHPTVPNPYNLLSGLPPSHQWYTVLDLKDAFFCLRLHPTSQPLFAFEWRDPGMGISGQLTWTRLPQGFKNSPTLFDEALHRDLADFRIQHPDLILLQYVDDILLAATSELDCQQGTRALLQTLGDLGYRASAKKAQICQKQVKYLGYLLREGQRWLTEARKETVMGQPVPKTPRQLREFLGTAGFCRLWIPGFAEMAAPLYPLTKTGTLFSWGPDQQKAYQEIKQALLTAPALGLPDLTKPFELFVDEKQGYAKGVLTQKLGPWRRPVAYLSKKLDPVAAGWPPCLRMVAAIAVLTKDAGKLTMGQPLVILAPHAVEALVKQPPDRWLSNARMTHYQAMLLDTDRVQFGPVVALNPATLLPLPEEGAPHDCLEILAETHGTRPDLTDQPIPDADHTWYTDGSSFLQEGQRKAGAAVTTETEVIWAGALPAGTSAQRAELIALTQALKMAEGKRLNVYTDSRYAFATAHIHGEIYRRRGLLTSEGREIKNKSEILALLKALFLPKRLSIIHCLGHQKGDSAEARGNRLADQAAREAAIKTPPDTSTLLAGKRTADGSEFEKRTADGSEFESPKKKAKVE

SEQ ID NO: 2186 - protein, 2096 aa, synthetic construct; identical to SEQ ID NO: 2069

SEQ ID NO: 2187 - protein, 2096 aa, synthetic construct
MPAAKRVKLDGGDKKYSIGLDIGTNSVGWAVITDEYKVPSKKFKVLGNTDRHSIKKNLIGALLFDSGETAEATRLKRTARRRYTRRKNRICYLQEIFSNEMAKVDDSFFHRLEESFLVEEDKKHERHPIFGNIVDEVAYHEKYPTIYHLRKKLVDSTDKADLRLIYLALAHMIKFRGHFLIEGDLNPDNSDVDKLFIQLVQTYNQLFEENPINASGVDAKAILSARLSKSRRLENLIAQLPGEKKNGLFGNLIALSLGLTPNFKSNFDLAEDAKLQLSKDTYDDDLDNLLAQIGDQYADLFLAAKNLSDAILLSDILRVNTEITKAPLSASMIKRYDEHHQDLTLLKALVRQQLPEKYKEIFFDQSKNGYAGYIDGGASQEEFYKFIKPILEKMDGTEELLVKLNREDLLRKQRTFDNGSIPHQIHLGELHAILRRQEDFYPFLKDNREKIEKILTFRIPYYVGPLARGNSRFAWMTRKSEETITPWNFEEVVDKGASAQSFIERMTNFDKNLPNEKVLPKHSLLYEYFTVYNELTKVKYVTEGMRKPAFLSGEQKKAIVDLLFKTNRKVTVKQLKEDYFKKIECFDSVEISGVEDRFNASLGTYHDLLKIIKDKDFLDNEENEDILEDIVLTLTLFEDREMIEERLKTYAHLFDDKVMKQLKRRRYTGWGRLSRKLINGIRDKQSGKTILDFLKSDGFANRNFMQLIHDDSLTFKEDIQKAQVSGQGDSLHEHIANLAGSPAIKKGILQTVKVVDELVKVMGRHKPENIVIEMARENQTTQKGQKNSRERMKRIEEGIKELGSQILKEHPVENTQLQNEKLYLYYLQNGRDMYVDQELDINRLSDYDVDHIVPQSFLKDDSIDNKVLTRSDKARGKSDNVPSEEVVKKMKNYWRQLLNAKLITQRKFDNLTKAERGGLSELDKAGFIKRQLVETRQITKHVAQILDSRMNTKYDENDKLIREVKVITLKSKLVSDFRKDFQFYKVREINNYHHAHDAYLNAVVGTALIKKYPKLESEFVYGDYKVYDVRKMIAKSEQEIGKATAKYFFYSNIMNFFKTEITLANGEIRKRPLIETNGETGEIVWDKGRDFATVRKVLSMPQVNIVKKTEVQTGGFSKESILPKRNSDKLIARKKDWDPKKYGGFDSPTVAYSVLVVAKVEKGKSKKLKSVKELLGITIMERSSFEKNPIDFLEAKGYKEVKKDLIIKLPKYSLFELENGRKRMLASAGELQKGNELALPSKYVNFLYLASHYEKLKGSPEDNEQKQLFVEQHKHYLDEIIEQISEFSKRVILADANLDKVLSAYNKHRDKPIREQAENIIHLFTLTNLGAPAAFKYFDTTIDRKRYTSTKEVLDATLIHQSITGLYETRIDLSQLGGDGGPAPAPAPAPAPGGTLGIEDEYRLHETSTEPDVSLGSTWLSDFPQAWAETGGMGLAVRQAPLIIPLKATSTPVSIQQYPMSHEARLGIKPHIQRLLDQGILVPCQSPWNTPLLPVKKPGTNDYRPVQDLREVNKRVEDIHPTVPNPYNLLSGLPPSHQWYTVLDLKDAFFCLRLHPTSQPLFAFEWRDPGMGISGQLTWTRLPQGFKNSPTLFNEALHRDLADFRIQHPDLILLQYVDDILLAATSELDCQQGTRALLQTLGDLGYRASAKKAQICQKQVKYLGYLLREGQRWLTEARKETVMGQPVPKTPRQLREFLGTAGFCRLWIPGFAEMAAPLYPLTKPGTLFSWGPDQQKAYQEIKQALLTAPALGLPDLTKPFELFVDEKQGYAKGVLTQKLGPWRRPVAYLSKKLDPVAAGWPPCLRMVAAIAVLTKDAGKLTMGQPLVILAPHAVEALVKQPPDRWLSNARMTHYQAMLLDTDRVQFGPVVALNPATLLPLPEEGAPHDCLEILAETHGTRPDLTDQPIPDADHTWYTDGSSFLQEGQRKAGAAVTTETEVIWAGALPAGTSAQRAELIALTQALKMAEGKRLNVYTDSRYAFATAHIHGEIYRRRGWLTSEGREIKNKSEILALLKALFLPKRLSIIHCLGHQKGDSAEARGNRLADQAAREAAIKTPPDTSTLLAGKRTADGSEFEKRTADGSEFESPKKKAKVE

SEQ ID NO: 2188 - protein, 2110 aa, synthetic construct
MPAAKRVKLDGGDKKYSIGLDIGTNSVGWAVITDEYKVPSKKFKVLGNTDRHSIKKNLIGALLFDSGETAEATRLKRTARRRYTRRKNRICYLQEIFSNEMAKVDDSFFHRLEESFLVEEDKKHERHPIFGNIVDEVAYHEKYPTIYHLRKKLVDSTDKADLRLIYLALAHMIKFRGHFLIEGDLNPDNSDVDKLFIQLVQTYNQLFEENPINASGVDAKAILSARLSKSRRLENLIAQLPGEKKNGLFGNLIALSLGLTPNFKSNFDLAEDAKLQLSKDTYDDDLDNLLAQIGDQYADLFLAAKNLSDAILLSDILRVNTEITKAPLSASMIKRYDEHHQDLTLLKALVRQQLPEKYKEIFFDQSKNGYAGYIDGGASQEEFYKFIKPILEKMDGTEELLVKLNREDLLRKQRTFDNGSIPHQIHLGELHAILRRQEDFYPFLKDNREKIEKILTFRIPYYVGPLARGNSRFAWMTRKSEETITPWNFEEVVDKGASAQSFIERMTNFDKNLPNEKVLPKHSLLYEYFTVYNELTKVKYVTEGMRKPAFLSGEQKKAIVDLLFKTNRKVTVKQLKEDYFKKIECFDSVEISGVEDRFNASLGTYHDLLKIIKDKDFLDNEENEDILEDIVLTLTLFEDREMIEERLKTYAHLFDDKVMKQLKRRRYTGWGRLSRKLINGIRDKQSGKTILDFLKSDGFANRNFMQLIHDDSLTFKEDIQKAQVSGQGDSLHEHIANLAGSPAIKKGILQTVKVVDELVKVMGRHKPENIVIEMARENQTTQKGQKNSRERMKRIEEGIKELGSQILKEHPVENTQLQNEKLYLYYLQNGRDMYVDQELDINRLSDYDVDHIVPQSFLKDDSIDNKVLTRSDKARGKSDNVPSEEVVKKMKNYWRQLLNAKLITQRKFDNLTKAERGGLSELDKAGFIKRQLVETRQITKHVAQILDSRMNTKYDENDKLIREVKVITLKSKLVSDFRKDFQFYKVREINNYHHAHDAYLNAVVGTALIKKYPKLESEFVYGDYKVYDVRKMIAKSEQEIGKATAKYFFYSNIMNFFKTEITLANGEIRKRPLIETNGETGEIVWDKGRDFATVRKVLSMPQVNIVKKTEVQTGGFSKESILPKRNSDKLIARKKDWDPKKYGGFDSPTVAYSVLVVAKVEKGKSKKLKSVKELLGITIMERSSFEKNPIDFLEAKGYKEVKKDLIIKLPKYSLFELENGRKRMLASAGELQKGNELALPSKYVNFLYLASHYEKLKGSPEDNEQKQLFVEQHKHYLDEIIEQISEFSKRVILADANLDKVLSAYNKHRDKPIREQAENIIHLFTLTNLGAPAAFKYFDTTIDRKRYTSTKEVLDATLIHQSITGLYETRIDLSQLGGDGGEAAAKEAAAKEAAAKEAAAKEAAAKGGTLGIEDEYRLHETSTEPDVSLGSTWLSDFPQAWAETGGMGLAVRQAPLIIPLKATSTPVSIQQYPMSHEARLGIKPHIQRLLDQGILVPCQSPWNTPLLPVKKPGTNDYRPVQDLREVNKRVEDIHPTVPNPYNLLSGLPPSHQWYTVLDLKDAFFCLRLHPTSQPLFAFEWRDPGMGISGQLTWTRLPQGFKNSPTLFNEALHRDLADFRIQHPDLILLQYVDDILLAATSELDCQQGTRALLQTLGDLGYRASAKKAQICQKQVKYLGYLLREGQRWLTEARKETVMGQPVPKTPRQLREFLGTAGFCRLWIPGFAEMAAPLYPLTKPGTLFSWGPDQQKAYQEIKQALLTAPALGLPDLTKPFELFVDEKQGYAKGVLTQKLGPWRRPVAYLSKKLDPVAAGWPPCLRMVAAIAVLTKDAGKLTMGQPLVILAPHAVEALVKQPPDRWLSNARMTHYQAMLLDTDRVQFGPVVALNPATLLPLPEEGAPHDCLEILAETHGTRPDLTDQPIPDADHTWYTDGSSFLQEGQRKAGAAVTTETEVIWAGALPAGTSAQRAELIALTQALKMAEGKRLNVYTDSRYAFATAHIHGEIYRRRGWLTSEGREIKNKSEILALLKALFLPKRLSIIHCLGHQKGDSAEARGNRLADQAAREAAIKTPPDTSTLLAGKRTADGSEFEKRTADGSEFESPKKKAKVE

SEQ ID NO: 2189 - protein, 2115 aa, synthetic construct
MPAAKRVKLDGGDKKYSIGLDIGTNSVGWAVITDEYKVPSKKFKVLGNTDRHSIKKNLIGALLFDSGETAEATRLKRTARRRYTRRKNRICYLQEIFSNEMAKVDDSFFHRLEESFLVEEDKKHERHPIFGNIVDEVAYHEKYPTIYHLRKKLVDSTDKADLRLIYLALAHMIKFRGHFLIEGDLNPDNSDVDKLFIQLVQTYNQLFEENPINASGVDAKAILSARLSKSRRLENLIAQLPGEKKNGLFGNLIALSLGLTPNFKSNFDLAEDAKLQLSKDTYDDDLDNLLAQIGDQYADLFLAAKNLSDAILLSDILRVNTEITKAPLSASMIKRYDEHHQDLTLLKALVRQQLPEKYKEIFFDQSKNGYAGYIDGGASQEEFYKFIKPILEKMDGTEELLVKLNREDLLRKQRTFDNGSIPHQIHLGELHAILRRQEDFYPFLKDNREKIEKILTFRIPYYVGPLARGNSRFAWMTRKSEETITPWNFEEVVDKGASAQSFIERMTNFDKNLPNEKVLPKHSLLYEYFTVYNELTKVKYVTEGMRKPAFLSGEQKKAIVDLLFKTNRKVTVKQLKEDYFKKIECFDSVEISGVEDRFNASLGTYHDLLKIIKDKDFLDNEENEDILEDIVLTLTLFEDREMIEERLKTYAHLFDDKVMKQLKRRRYTGWGRLSRKLINGIRDKQSGKTILDFLKSDGFANRNFMQLIHDDSLTFKEDIQKAQVSGQGDSLHEHIANLAGSPAIKKGILQTVKVVDELVKVMGRHKPENIVIEMARENQTTQKGQKNSRERMKRIEEGIKELGSQILKEHPVENTQLQNEKLYLYYLQNGRDMYVDQELDINRLSDYDVDHIVPQSFLKDDSIDNKVLTRSDKARGKSDNVPSEEVVKKMKNYWRQLLNAKLITQRKFDNLTKAERGGLSELDKAGFIKRQLVETRQITKHVAQILDSRMNTKYDENDKLIREVKVITLKSKLVSDFRKDFQFYKVREINNYHHAHDAYLNAVVGTALIKKYPKLESEFVYGDYKVYDVRKMIAKSEQEIGKATAKYFFYSNIMNFFKTEITLANGEIRKRPLIETNGETGEIVWDKGRDFATVRKVLSMPQVNIVKKTEVQTGGFSKESILPKRNSDKLIARKKDWDPKKYGGFDSPTVAYSVLVVAKVEKGKSKKLKSVKELLGITIMERSSFEKNPIDFLEAKGYKEVKKDLIIKLPKYSLFELENGRKRMLASAGELQKGNELALPSKYVNFLYLASHYEKLKGSPEDNEQKQLFVEQHKHYLDEIIEQISEFSKRVILADANLDKVLSAYNKHRDKPIREQAENIIHLFTLTNLGAPAAFKYFDTTIDRKRYTSTKEVLDATLIHQSITGLYETRIDLSQLGGDGGEAAAKEAAAKEAAAKEAAAKEAAAKEAAAKGGTLGIEDEYRLHETSTEPDVSLGSTWLSDFPQAWAETGGMGLAVRQAPLIIPLKATSTPVSIQQYPMSHEARLGIKPHIQRLLDQGILVPCQSPWNTPLLPVKKPGTNDYRPVQDLREVNKRVEDIHPTVPNPYNLLSGLPPSHQWYTVLDLKDAFFCLRLHPTSQPLFAFEWRDPGMGISGQLTWTRLPQGFKNSPTLFNEALHRDLADFRIQHPDLILLQYVDDILLAATSELDCQQGTRALLQTLGDLGYRASAKKAQICQKQVKYLGYLLREGQRWLTEARKETVMGQPVPKTPRQLREFLGTAGFCRLWIPGFAEMAAPLYPLTKPGTLFSWGPDQQKAYQEIKQALLTAPALGLPDLTKPFELFVDEKQGYAKGVLTQKLGPWRRPVAYLSKKLDPVAAGWPPCLRMVAAIAVLTKDAGKLTMGQPLVILAPHAVEALVKQPPDRWLSNARMTHYQAMLLDTDRVQFGPVVALNPATLLPLPEEGAPHDCLEILAETHGTRPDLTDQPIPDADHTWYTDGSSFLQEGQRKAGAAVTTETEVIWAGALPAGTSAQRAELIALTQALKMAEGKRLNVYTDSRYAFATAHIHGEIYRRRGWLTSEGREIKNKSEILALLKALFLPKRLSIIHCLGHQKGDSAEARGNRLADQAAREAAIKTPPDTSTLLAGKRTADGSEFEKRTADGSEFESPKKKAKVE

SEQ ID NO: 2190 - protein, 2096 aa, synthetic construct
MPAAKRVKLDGGDKKYSIGLDIGTNSVGWAVITDEYKVPSKKFKVLGNTDRHSIKKNLIGALLFDSGETAEATRLKRTARRRYTRRKNRICYLQEIFSNEMAKVDDSFFHRLEESFLVEEDKKHERHPIFGNIVDEVAYHEKYPTIYHLRKKLVDSTDKADLRLIYLALAHMIKFRGHFLIEGDLNPDNSDVDKLFIQLVQTYNQLFEENPINASGVDAKAILSARLSKSRRLENLIAQLPGEKKNGLFGNLIALSLGLTPNFKSNFDLAEDAKLQLSKDTYDDDLDNLLAQIGDQYADLFLAAKNLSDAILLSDILRVNTEITKAPLSASMIKRYDEHHQDLTLLKALVRQQLPEKYKEIFFDQSKNGYAGYIDGGASQEEFYKFIKPILEKMDGTEELLVKLNREDLLRKQRTFDNGSIPHQIHLGELHAILRRQEDFYPFLKDNREKIEKILTFRIPYYVGPLARGNSRFAWMTRKSEETITPWNFEEVVDKGASAQSFIERMTNFDKNLPNEKVLPKHSLLYEYFTVYNELTKVKYVTEGMRKPAFLSGEQKKAIVDLLFKTNRKVTVKQLKEDYFKKIECFDSVEISGVEDRFNASLGTYHDLLKIIKDKDFLDNEENEDILEDIVLTLTLFEDREMIEERLKTYAHLFDDKVMKQLKRRRYTGWGRLSRKLINGIRDKQSGKTILDFLKSDGFANRNFMQLIHDDSLTFKEDIQKAQVSGQGDSLHEHIANLAGSPAIKKGILQTVKVVDELVKVMGRHKPENIVIEMARENQTTQKGQKNSRERMKRIEEGIKELGSQILKEHPVENTQLQNEKLYLYYLQNGRDMYVDQELDINRLSDYDVDHIVPQSFLKDDSIDNKVLTRSDKARGKSDNVPSEEVVKKMKNYWRQLLNAKLITQRKFDNLTKAERGGLSELDKAGFIKRQLVETRQITKHVAQILDSRMNTKYDENDKLIREVKVITLKSKLVSDFRKDFQFYKVREINNYHHAHDAYLNAVVGTALIKKYPKLESEFVYGDYKVYDVRKMIAKSEQEIGKATAKYFFYSNIMNFFKTEITLANGEIRKRPLIETNGETGEIVWDKGRDFATVRKVLSMPQVNIVKKTEVQTGGFSKESILPKRNSDKLIARKKDWDPKKYGGFDSPTVAYSVLVVAKVEKGKSKKLKSVKELLGITIMERSSFEKNPIDFLEAKGYKEVKKDLIIKLPKYSLFELENGRKRMLASAGELQKGNELALPSKYVNFLYLASHYEKLKGSPEDNEQKQLFVEQHKHYLDEIIEQISEFSKRVILADANLDKVLSAYNKHRDKPIREQAENIIHLFTLTNLGAPAAFKYFDTTIDRKRYTSTKEVLDATLIHQSITGLYETRIDLSQLGGDGGEAAAKGSSGGSGGTLGIEDEYRLHETSTEPDVSLGSTWLSDFPQAWAETGGMGLAVRQAPLIIPLKATSTPVSIQQYPMSHEARLGIKPHIQRLLDQGILVPCQSPWNTPLLPVKKPGTNDYRPVQDLREVNKRVEDIHPTVPNPYNLLSGLPPSHQWYTVLDLKDAFFCLRLHPTSQPLFAFEWRDPGMGISGQLTWTRLPQGFKNSPTLFNEALHRDLADFRIQHPDLILLQYVDDILLAATSELDCQQGTRALLQTLGDLGYRASAKKAQICQKQVKYLGYLLREGQRWLTEARKETVMGQPVPKTPRQLREFLGTAGFCRLWIPGFAEMAAPLYPLTKPGTLFSWGPDQQKAYQEIKQALLTAPALGLPDLTKPFELFVDEKQGYAKGVLTQKLGPWRRPVAYLSKKLDPVAAGWPPCLRMVAAIAVLTKDAGKLTMGQPLVILAPHAVEALVKQPPDRWLSNARMTHYQAMLLDTDRVQFGPVVALNPATLLPLPEEGAPHDCLEILAETHGTRPDLTDQPIPDADHTWYTDGSSFLQEGQRKAGAAVTTETEVIWAGALPAGTSAQRAELIALTQALKMAEGKRLNVYTDSRYAFATAHIHGEIYRRRGWLTSEGREIKNKSEILALLKALFLPKRLSIIHCLGHQKGDSAEARGNRLADQAAREAAIKTPPDTSTLLAGKRTADGSEFEKRTADGSEFESPKKKAKVE

SEQ ID NO: 2191 - protein, 2105 aa, synthetic construct; identical to SEQ ID NO: 2070

SEQ ID NO: 2192 - protein, 2096 aa, synthetic construct
MPAAKRVKLDGGDKKYSIGLDIGTNSVGWAVITDEYKVPSKKFKVLGNTDRHSIKKNLIGALLFDSGETAEATRLKRTARRRYTRRKNRICYLQEIFSNEMAKVDDSFFHRLEESFLVEEDKKHERHPIFGNIVDEVAYHEKYPTIYHLRKKLVDSTDKADLRLIYLALAHMIKFRGHFLIEGDLNPDNSDVDKLFIQLVQTYNQLFEENPINASGVDAKAILSARLSKSRRLENLIAQLPGEKKNGLFGNLIALSLGLTPNFKSNFDLAEDAKLQLSKDTYDDDLDNLLAQIGDQYADLFLAAKNLSDAILLSDILRVNTEITKAPLSASMIKRYDEHHQDLTLLKALVRQQLPEKYKEIFFDQSKNGYAGYIDGGASQEEFYKFIKPILEKMDGTEELLVKLNREDLLRKQRTFDNGSIPHQIHLGELHAILRRQEDFYPFLKDNREKIEKILTFRIPYYVGPLARGNSRFAWMTRKSEETITPWNFEEVVDKGASAQSFIERMTNFDKNLPNEKVLPKHSLLYEYFTVYNELTKVKYVTEGMRKPAFLSGEQKKAIVDLLFKTNRKVTVKQLKEDYFKKIECFDSVEISGVEDRFNASLGTYHDLLKIIKDKDFLDNEENEDILEDIVLTLTLFEDREMIEERLKTYAHLFDDKVMKQLKRRRYTGWGRLSRKLINGIRDKQSGKTILDFLKSDGFANRNFMQLIHDDSLTFKEDIQKAQVSGQGDSLHEHIANLAGSPAIKKGILQTVKVVDELVKVMGRHKPENIVIEMARENQTTQKGQKNSRERMKRIEEGIKELGSQILKEHPVENTQLQNEKLYLYYLQNGRDMYVDQELDINRLSDYDVDHIVPQSFLKDDSIDNKVLTRSDKARGKSDNVPSEEVVKKMKNYWRQLLNAKLITQRKFDNLTKAERGGLSELDKAGFIKRQLVETRQITKHVAQILDSRMNTKYDENDKLIREVKVITLKSKLVSDFRKDFQFYKVREINNYHHAHDAYLNAVVGTALIKKYPKLESEFVYGDYKVYDVRKMIAKSEQEIGKATAKYFFYSNIMNFFKTEITLANGEIRKRPLIETNGETGEIVWDKGRDFATVRKVLSMPQVNIVKKTEVQTGGFSKESILPKRNSDKLIARKKDWDPKKYGGFDSPTVAYSVLVVAKVEKGKSKKLKSVKELLGITIMERSSFEKNPIDFLEAKGYKEVKKDLIIKLPKYSLFELENGRKRMLASAGELQKGNELALPSKYVNFLYLASHYEKLKGSPEDNEQKQLFVEQHKHYLDEIIEQISEFSKRVILADANLDKVLSAYNKHRDKPIREQAENIIHLFTLTNLGAPAAFKYFDTTIDRKRYTSTKEVLDATLIHQSITGLYETRIDLSQLGGDGGGGSPAPEAAAKGGTLGIEDEYRLHETSTEPDVSLGSTWLSDFPQAWAETGGMGLAVRQAPLIIPLKATSTPVSIQQYPMSHEARLGIKPHIQRLLDQGILVPCQSPWNTPLLPVKKPGTNDYRPVQDLREVNKRVEDIHPTVPNPYNLLSGLPPSHQWYTVLDLKDAFFCLRLHPTSQPLFAFEWRDPGMGISGQLTWTRLPQGFKNSPTLFNEALHRDLADFRIQHPDLILLQYVDDILLAATSELDCQQGTRALLQTLGDLGYRASAKKAQICQKQVKYLGYLLREGQRWLTEARKETVMGQPVPKTPRQLREFLGTAGFCRLWIPGFAEMAAPLYPLTKPGTLFSWGPDQQKAYQEIKQALLTAPALGLPDLTKPFELFVDEKQGYAKGVLTQKLGPWRRPVAYLSKKLDPVAAGWPPCLRMVAAIAVLTKDAGKLTMGQPLVILAPHAVEALVKQPPDRWLSNARMTHYQAMLLDTDRVQFGPVVALNPATLLPLPEEGAPHDCLEILAETHGTRPDLTDQPIPDADHTWYTDGSSFLQEGQRKAGAAVTTETEVIWAGALPAGTSAQRAELIALTQALKMAEGKRLNVYTDSRYAFATAHIHGEIYRRRGWLTSEGREIKNKSEILALLKALFLPKRLSIIHCLGHQKGDSAEARGNRLADQAAREAAIKTPPDTSTLLAGKRTADGSEFEKRTADGSEFESPKKKAKVE

SEQ ID NO: 2193 - protein, 2115 aa, synthetic construct
MPAAKRVKLDGGDKKYSIGLDIGTNSVGWAVITDEYKVPSKKFKVLGNTDRHSIKKNLIGALLFDSGETAEATRLKRTARRRYTRRKNRICYLQEIFSNEMAKVDDSFFHRLEESFLVEEDKKHERHPIFGNIVDEVAYHEKYPTIYHLRKKLVDSTDKADLRLIYLALAHMIKFRGHFLIEGDLNPDNSDVDKLFIQLVQTYNQLFEENPINASGVDAKAILSARLSKSRRLENLIAQLPGEKKNGLFGNLIALSLGLTPNFKSNFDLAEDAKLQLSKDTYDDDLDNLLAQIGDQYADLFLAAKNLSDAILLSDILRVNTEITKAPLSASMIKRYDEHHQDLTLLKALVRQQLPEKYKEIFFDQSKNGYAGYIDGGASQEEFYKFIKPILEKMDGTEELLVKLNREDLLRKQRTFDNGSIPHQIHLGELHAILRRQEDFYPFLKDNREKIEKILTFRIPYYVGPLARGNSRFAWMTRKSEETITPWNFEEVVDKGASAQSFIERMTNFDKNLPNEKVLPKHSLLYEYFTVYNELTKVKYVTEGMRKPAFLSGEQKKAIVDLLFKTNRKVTVKQLKEDYFKKIECFDSVEISGVEDRFNASLGTYHDLLKIIKDKDFLDNEENEDILEDIVLTLTLFEDREMIEERLKTYAHLFDDKVMKQLKRRRYTGWGRLSRKLINGIRDKQSGKTILDFLKSDGFANRNFMQLIHDDSLTFKEDIQKAQVSGQGDSLHEHIANLAGSPAIKKGILQTVKVVDELVKVMGRHKPENIVIEMARENQTTQKGQKNSRERMKRIEEGIKELGSQILKEHPVENTQLQNEKLYLYYLQNGRDMYVDQELDINRLSDYDVDHIVPQSFLKDDSIDNKVLTRSDKARGKSDNVPSEEVVKKMKNYWRQLLNAKLITQRKFDNLTKAERGGLSELDKAGFIKRQLVETRQITKHVAQILDSRMNTKYDENDKLIREVKVITLKSKLVSDFRKDFQFYKVREINNYHHAHDAYLNAVVGTALIKKYPKLESEFVYGDYKVYDVRKMIAKSEQEIGKATAKYFFYSNIMNFFKTEITLANGEIRKRPLIETNGETGEIVWDKGRDFATVRKVLSMPQVNIVKKTEVQTGGFSKESILPKRNSDKLIARKKDWDPKKYGGFDSPTVAYSVLVVAKVEKGKSKKLKSVKELLGITIMERSSFEKNPIDFLEAKGYKEVKKDLIIKLPKYSLFELENGRKRMLASAGELQKGNELALPSKYVNFLYLASHYEKLKGSPEDNEQKQLFVEQHKHYLDEIIEQISEFSKRVILADANLDKVLSAYNKHRDKPIREQAENIIHLFTLTNLGAPAAFKYFDTTIDRKRYTSTKEVLDATLIHQSITGLYETRIDLSQLGGDGGGGGGSGGGGSGGGGSGGGGSGGGGSGGGGSGGTLGIEDEYRLHETSTEPDVSLGSTWLSDFPQAWAETGGMGLAVRQAPLIIPLKATSTPVSIQQYPMSHEARLGIKPHIQRLLDQGILVPCQSPWNTPLLPVKKPGTNDYRPVQDLREVNKRVEDIHPTVPNPYNLLSGLPPSHQWYTVLDLKDAFFCLRLHPTSQPLFAFEWRDPGMGISGQLTWTRLPQGFKNSPTLFNEALHRDLADFRIQHPDLILLQYVDDILLAATSELDCQQGTRALLQTLGDLGYRASAKKAQICQKQVKYLGYLLREGQRWLTEARKETVMGQPVPKTPRQLREFLGTAGFCRLWIPGFAEMAAPLYPLTKPGTLFSWGPDQQKAYQEIKQALLTAPALGLPDLTKPFELFVDEKQGYAKGVLTQKLGPWRRPVAYLSKKLDPVAAGWPPCLRMVAAIAVLTKDAGKLTMGQPLVILAPHAVEALVKQPPDRWLSNARMTHYQAMLLDTDRVQFGPVVALNPATLLPLPEEGAPHDCLEILAETHGTRPDLTDQPIPDADHTWYTDGSSFLQEGQRKAGAAVTTETEVIWAGALPAGTSAQRAELIALTQALKMAEGKRLNVYTDSRYAFATAHIHGEIYRRRGWLTSEGREIKNKSEILALLKALFLPKRLSIIHCLGHQKGDSAEARGNRLADQAAREAAIKTPPDTSTLLAGKRTADGSEFEKRTADGSEFESPKKKAKVE

SEQ ID NO: 2194 - protein, 2131 aa, synthetic construct
MPAAKRVKLDGGDKKYSIGLDIGTNSVGWAVITDEYKVPSKKFKVLGNTDRHSIKKNLIGALLFDSGETAEATRLKRTARRRYTRRKNRICYLQEIFSNEMAKVDDSFFHRLEESFLVEEDKKHERHPIFGNIVDEVAYHEKYPTIYHLRKKLVDSTDKADLRLIYLALAHMIKFRGHFLIEGDLNPDNSDVDKLFIQLVQTYNQLFEENPINASGVDAKAILSARLSKSRRLENLIAQLPGEKKNGLFGNLIALSLGLTPNFKSNFDLAEDAKLQLSKDTYDDDLDNLLAQIGDQYADLFLAAKNLSDAILLSDILRVNTEITKAPLSASMIKRYDEHHQDLTLLKALVRQQLPEKYKEIFFDQSKNGYAGYIDGGASQEEFYKFIKPILEKMDGTEELLVKLNREDLLRKQRTFDNGSIPHQIHLGELHAILRRQEDFYPFLKDNREKIEKILTFRIPYYVGPLARGNSRFAWMTRKSEETITPWNFEEVVDKGASAQSFIERMTNFDKNLPNEKVLPKHSLLYEYFTVYNELTKVKYVTEGMRKPAFLSGEQKKAIVDLLFKTNRKVTVKQLKEDYFKKIECFDSVEISGVEDRFNASLGTYHDLLKIIKDKDFLDNEENEDILEDIVLTLTLFEDREMIEERLKTYAHLFDDKVMKQLKRRRYTGWGRLSRKLINGIRDKQSGKTILDFLKSDGFANRNFMQLIHDDSLTFKEDIQKAQVSGQGDSLHEHIANLAGSPAIKKGILQTVKVVDELVKVMGRHKPENIVIEMARENQTTQKGQKNSRERMKRIEEGIKELGSQILKEHPVENTQLQNEKLYLYYLQNGRDMYVDQELDINRLSDYDVDHIVPQSFLKDDSIDNKVLTRSDKARGKSDNVPSEEVVKKMKNYWRQLLNAKLITQRKFDNLTKAERGGLSELDKAGFIKRQLVETRQITKHVAQILDSRMNTKYDENDKLIREVKVITLKSKLVSDFRKDFQFYKVREINNYHHAHDAYLNAVVGTALIKKYPKLESEFVYGDYKVYDVRKMIAKSEQEIGKATAKYFFYSNIMNFFKTEITLANGEIRKRPLIETNGETGEIVWDKGRDFATVRKVLSMPQVNIVKKTEVQTGGFSKESILPKRNSDKLIARKKDWDPKKYGGFDSPTVAYSVLVVAKVEKGKSKKLKSVKELLGITIMERSSFEKNPIDFLEAKGYKEVKKDLIIKLPKYSLFELENGRKRMLASAGELQKGNELALPSKYVNFLYLASHYEKLKGSPEDNEQKQLFVEQHKHYLDEIIEQISEFSKRVILADANLDKVLSAYNKHRDKPIREQAENIIHLFTLTNLGAPAAFKYFDTTIDRKRYTSTKEVLDATLIHQSITGLYETRIDLSQLGGDGGAEAAAKEAAAKEAAAKEAAAKALEAEAAAKEAAAKEAAAKEAAAKAGGTLGIEDEYRLHETSTEPDVSLGSTWLSDFPQAWAETGGMGLAVRQAPLIIPLKATSTPVSIQQYPMSHEARLGIKPHIQRLLDQGILVPCQSPWNTPLLPVKKPGTNDYRPVQDLREVNKRVEDIHPTVPNPYNLLSGLPPSHQWYTVLDLKDAFFCLRLHPTSQPLFAFEWRDPGMGISGQLTWTRLPQGFKNSPTLFNEALHRDLADFRIQHPDLILLQYVDDILLAATSELDCQQGTRALLQTLGDLGYRASAKKAQICQKQVKYLGYLLREGQRWLTEARKETVMGQPVPKTPRQLREFLGTAGFCRLWIPGFAEMAAPLYPLTKPGTLFSWGPDQQKAYQEIKQALLTAPALGLPDLTKPFELFVDEKQGYAKGVLTQKLGPWRRPVAYLSKKLDPVAAGWPPCLRMVAAIAVLTKDAGKLTMGQPLVILAPHAVEALVKQPPDRWLSNARMTHYQAMLLDTDRVQFGPVVALNPATLLPLPEEGAPHDCLEILAETHGTRPDLTDQPIPDADHTWYTDGSSFLQEGQRKAGAAVTTETEVIWAGALPAGTSAQRAELIALTQALKMAEGKRLNVYTDSRYAFATAHIHGEIYRRRGWLTSEGREIKNKSEILALLKALFLPKRLSIIHCLGHQKGDSAEARGNRLADQAAREAAIKTPPDTSTLLAGKRTADGSEFEKRTADGSEFESPKKKAKVE

SEQ ID NO: 2195 - protein, 2096 aa, synthetic construct; identical to SEQ ID NO: 2076

SEQ ID NO: 2196 - protein, 2096 aa, synthetic construct
MPAAKRVKLDGGDKKYSIGLDIGTNSVGWAVITDEYKVPSKKFKVLGNTDRHSIKKNLIGALLFDSGETAEATRLKRTARRRYTRRKNRICYLQEIFSNEMAKVDDSFFHRLEESFLVEEDKKHERHPIFGNIVDEVAYHEKYPTIYHLRKKLVDSTDKADLRLIYLALAHMIKFRGHFLIEGDLNPDNSDVDKLFIQLVQTYNQLFEENPINASGVDAKAILSARLSKSRRLENLIAQLPGEKKNGLFGNLIALSLGLTPNFKSNFDLAEDAKLQLSKDTYDDDLDNLLAQIGDQYADLFLAAKNLSDAILLSDILRVNTEITKAPLSASMIKRYDEHHQDLTLLKALVRQQLPEKYKEIFFDQSKNGYAGYIDGGASQEEFYKFIKPILEKMDGTEELLVKLNREDLLRKQRTFDNGSIPHQIHLGELHAILRRQEDFYPFLKDNREKIEKILTFRIPYYVGPLARGNSRFAWMTRKSEETITPWNFEEVVDKGASAQSFIERMTNFDKNLPNEKVLPKHSLLYEYFTVYNELTKVKYVTEGMRKPAFLSGEQKKAIVDLLFKTNRKVTVKQLKEDYFKKIECFDSVEISGVEDRFNASLGTYHDLLKIIKDKDFLDNEENEDILEDIVLTLTLFEDREMIEERLKTYAHLFDDKVMKQLKRRRYTGWGRLSRKLINGIRDKQSGKTILDFLKSDGFANRNFMQLIHDDSLTFKEDIQKAQVSGQGDSLHEHIANLAGSPAIKKGILQTVKVVDELVKVMGRHKPENIVIEMARENQTTQKGQKNSRERMKRIEEGIKELGSQILKEHPVENTQLQNEKLYLYYLQNGRDMYVDQELDINRLSDYDVDHIVPQSFLKDDSIDNKVLTRSDKARGKSDNVPSEEVVKKMKNYWRQLLNAKLITQRKFDNLTKAERGGLSELDKAGFIKRQLVETRQITKHVAQILDSRMNTKYDENDKLIREVKVITLKSKLVSDFRKDFQFYKVREINNYHHAHDAYLNAVVGTALIKKYPKLESEFVYGDYKVYDVRKMIAKSEQEIGKATAKYFFYSNIMNFFKTEITLANGEIRKRPLIETNGETGEIVWDKGRDFATVRKVLSMPQVNIVKKTEVQTGGFSKESILPKRNSDKLIARKKDWDPKKYGGFDSPTVAYSVLVVAKVEKGKSKKLKSVKELLGITIMERSSFEKNPIDFLEAKGYKEVKKDLIIKLPKYSLFELENGRKRMLASAGELQKGNELALPSKYVNFLYLASHYEKLKGSPEDNEQKQLFVEQHKHYLDEIIEQISEFSKRVILADANLDKVLSAYNKHRDKPIREQAENIIHLFTLTNLGAPAAFKYFDTTIDRKRYTSTKEVLDATLIHQSITGLYETRIDLSQLGGDGGGGGGSSEAAAKGGTLGIEDEYRLHETSTEPDVSLGSTWLSDFPQAWAETGGMGLAVRQAPLIIPLKATSTPVSIQQYPMSHEARLGIKPHIQRLLDQGILVPCQSPWNTPLLPVKKPGTNDYRPVQDLREVNKRVEDIHPTVPNPYNLLSGLPPSHQWYTVLDLKDAFFCLRLHPTSQPLFAFEWRDPGMGISGQLTWTRLPQGFKNSPTLFNEALHRDLADFRIQHPDLILLQYVDDILLAATSELDCQQGTRALLQTLGDLGYRASAKKAQICQKQVKYLGYLLREGQRWLTEARKETVMGQPVPKTPRQLREFLGTAGFCRLWIPGFAEMAAPLYPLTKPGTLFSWGPDQQKAYQEIKQALLTAPALGLPDLTKPFELFVDEKQGYAKGVLTQKLGPWRRPVAYLSKKLDPVAAGWPPCLRMVAAIAVLTKDAGKLTMGQPLVILAPHAVEALVKQPPDRWLSNARMTHYQAMLLDTDRVQFGPVVALNPATLLPLPEEGAPHDCLEILAETHGTRPDLTDQPIPDADHTWYTDGSSFLQEGQRKAGAAVTTETEVIWAGALPAGTSAQRAELIALTQALKMAEGKRLNVYTDSRYAFATAHIHGEIYRRRGWLTSEGREIKNKSEILALLKALFLPKRLSIIHCLGHQKGDSAEARGNRLADQAAREAAIKTPPDTSTLLAGKRTADGSEFEKRTADGSEFESPKKKAKVE

SEQ ID NO: 2197 - protein, 2096 aa, synthetic construct
MPAAKRVKLDGGDKKYSIGLDIGTNSVGWAVITDEYKVPSKKFKVLGNTDRHSIKKNLIGALLFDSGETAEATRLKRTARRRYTRRKNRICYLQEIFSNEMAKVDDSFFHRLEESFLVEEDKKHERHPIFGNIVDEVAYHEKYPTIYHLRKKLVDSTDKADLRLIYLALAHMIKFRGHFLIEGDLNPDNSDVDKLFIQLVQTYNQLFEENPINASGVDAKAILSARLSKSRRLENLIAQLPGEKKNGLFGNLIALSLGLTPNFKSNFDLAEDAKLQLSKDTYDDDLDNLLAQIGDQYADLFLAAKNLSDAILLSDILRVNTEITKAPLSASMIKRYDEHHQDLTLLKALVRQQLPEKYKEIFFDQSKNGYAGYIDGGASQEEFYKFIKPILEKMDGTEELLVKLNREDLLRKQRTFDNGSIPHQIHLGELHAILRRQEDFYPFLKDNREKIEKILTFRIPYYVGPLARGNSRFAWMTRKSEETITPWNFEEVVDKGASAQSFIERMTNFDKNLPNEKVLPKHSLLYEYFTVYNELTKVKYVTEGMRKPAFLSGEQKKAIVDLLFKTNRKVTVKQLKEDYFKKIECFDSVEISGVEDRFNASLGTYHDLLKIIKDKDFLDNEENEDILEDIVLTLTLFEDREMIEERLKTYAHLFDDKVMKQLKRRRYTGWGRLSRKLINGIRDKQSGKTILDFLKSDGFANRNFMQLIHDDSLTFKEDIQKAQVSGQGDSLHEHIANLAGSPAIKKGILQTVKVVDELVKVMGRHKPENIVIEMARENQTTQKGQKNSRERMKRIEEGIKELGSQILKEHPVENTQLQNEKLYLYYLQNGRDMYVDQELDINRLSDYDVDHIVPQSFLKDDSIDNKVLTRSDKARGKSDNVPSEEVVKKMKNYWRQLLNAKLITQRKFDNLTKAERGGLSELDKAGFIKRQLVETRQITKHVAQILDSRMNTKYDENDKLIREVKVITLKSKLVSDFRKDFQFYKVREINNYHHAHDAYLNAVVGTALIKKYPKLESEFVYGDYKVYDVRKMIAKSEQEIGKATAKYFFYSNIMNFFKTEITLANGEIRKRPLIETNGETGEIVWDKGRDFATVRKVLSMPQVNIVKKTEVQTGGFSKESILPKRNSDKLIARKKDWDPKKYGGFDSPTVAYSVLVVAKVEKGKSKKLKSVKELLGITIMERSSFEKNPIDFLEAKGYKEVKKDLIIKLPKYSLFELENGRKRMLASAGELQKGNELALPSKYVNFLYLASHYEKLKGSPEDNEQKQLFVEQHKHYLDEIIEQISEFSKRVILADANLDKVLSAYNKHRDKPIREQAENIIHLFTLTNLGAPAAFKYFDTTIDRKRYTSTKEVLDATLIHQSITGLYETRIDLSQLGGDGGPAPEAAAKGGGGGTLGIEDEYRLHETSTEPDVSLGSTWLSDFPQAWAETGGMGLAVRQAPLIIPLKATSTPVSIQQYPMSHEARLGIKPHIQRLLDQGILVPCQSPWNTPLLPVKKPGTNDYRPVQDLREVNKRVEDIHPTVPNPYNLLSGLPPSHQWYTVLDLKDAFFCLRLHPTSQPLFAFEWRDPGMGISGQLTWTRLPQGFKNSPTLFNEALHRDLADFRIQHPDLILLQYVDDILLAATSELDCQQGTRALLQTLGDLGYRASAKKAQICQKQVKYLGYLLREGQRWLTEARKETVMGQPVPKTPRQLREFLGTAGFCRLWIPGFAEMAAPLYPLTKPGTLFSWGPDQQKAYQEIKQALLTAPALGLPDLTKPFELFVDEKQGYAKGVLTQKLGPWRRPVAYLSKKLDPVAAGWPPCLRMVAAIAVLTKDAGKLTMGQPLVILAPHAVEALVKQPPDRWLSNARMTHYQAMLLDTDRVQFGPVVALNPATLLPLPEEGAPHDCLEILAETHGTRPDLTDQPIPDADHTWYTDGSSFLQEGQRKAGAAVTTETEVIWAGALPAGTSAQRAELIALTQALKMAEGKRLNVYTDSRYAFATAHIHGEIYRRRGWLTSEGREIKNKSEILALLKALFLPKRLSIIHCLGHQKGDSAEARGNRLADQAAREAAIKTPPDTSTLLAGKRTADGSEFEKRTADGSEFESPKKKAKVE

SEQ ID NO: 2198 - protein, 2090 aa, synthetic construct
MPAAKRVKLDGGDKKYSIGLDIGTNSVGWAVITDEYKVPSKKFKVLGNTDRHSIKKNLIGALLFDSGETAEATRLKRTARRRYTRRKNRICYLQEIFSNEMAKVDDSFFHRLEESFLVEEDKKHERHPIFGNIVDEVAYHEKYPTIYHLRKKLVDSTDKADLRLIYLALAHMIKFRGHFLIEGDLNPDNSDVDKLFIQLVQTYNQLFEENPINASGVDAKAILSARLSKSRRLENLIAQLPGEKKNGLFGNLIALSLGLTPNFKSNFDLAEDAKLQLSKDTYDDDLDNLLAQIGDQYADLFLAAKNLSDAILLSDILRVNTEITKAPLSASMIKRYDEHHQDLTLLKALVRQQLPEKYKEIFFDQSKNGYAGYIDGGASQEEFYKFIKPILEKMDGTEELLVKLNREDLLRKQRTFDNGSIPHQIHLGELHAILRRQEDFYPFLKDNREKIEKILTFRIPYYVGPLARGNSRFAWMTRKSEETITPWNFEEVVDKGASAQSFIERMTNFDKNLPNEKVLPKHSLLYEYFTVYNELTKVKYVTEGMRKPAFLSGEQKKAIVDLLFKTNRKVTVKQLKEDYFKKIECFDSVEISGVEDRFNASLGTYHDLLKIIKDKDFLDNEENEDILEDIVLTLTLFEDREMIEERLKTYAHLFDDKVMKQLKRRRYTGWGRLSRKLINGIRDKQSGKTILDFLKSDGFANRNFMQLIHDDSLTFKEDIQKAQVSGQGDSLHEHIANLAGSPAIKKGILQTVKVVDELVKVMGRHKPENIVIEMARENQTTQKGQKNSRERMKRIEEGIKELGSQILKEHPVENTQLQNEKLYLYYLQNGRDMYVDQELDINRLSDYDVDHIVPQSFLKDDSIDNKVLTRSDKARGKSDNVPSEEVVKKMKNYWRQLLNAKLITQRKFDNLTKAERGGLSELDKAGFIKRQLVETRQITKHVAQILDSRMNTKYDENDKLIREVKVITLKSKLVSDFRKDFQFYKVREINNYHHAHDAYLNAVVGTALIKKYPKLESEFVYGDYKVYDVRKMIAKSEQEIGKATAKYFFYSNIMNFFKTEITLANGEIRKRPLIETNGETGEIVWDKGRDFATVRKVLSMPQVNIVKKTEVQTGGFSKESILPKRNSDKLIARKKDWDPKKYGGFDSPTVAYSVLVVAKVEKGKSKKLKSVKELLGITIMERSSFEKNPIDFLEAKGYKEVKKDLIIKLPKYSLFELENGRKRMLASAGELQKGNELALPSKYVNFLYLASHYEKLKGSPEDNEQKQLFVEQHKHYLDEIIEQISEFSKRVILADANLDKVLSAYNKHRDKPIREQAENIIHLFTLTNLGAPAAFKYFDTTIDRKRYTSTKEVLDATLIHQSITGLYETRIDLSQLGGDGGEAAAKGGTLGIEDEYRLHETSTEPDVSLGSTWLSDFPQAWAETGGMGLAVRQAPLIIPLKATSTPVSIQQYPMSHEARLGIKPHIQRLLDQGILVPCQSPWNTPLLPVKKPGTNDYRPVQDLREVNKRVEDIHPTVPNPYNLLSGLPPSHQWYTVLDLKDAFFCLRLHPTSQPLFAFEWRDPGMGISGQLTWTRLPQGFKNSPTLFNEALHRDLADFRIQHPDLILLQYVDDILLAATSELDCQQGTRALLQTLGDLGYRASAKKAQICQKQVKYLGYLLREGQRWLTEARKETVMGQPVPKTPRQLREFLGTAGFCRLWIPGFAEMAAPLYPLTKPGTLFSWGPDQQKAYQEIKQALLTAPALGLPDLTKPFELFVDEKQGYAKGVLTQKLGPWRRPVAYLSKKLDPVAAGWPPCLRMVAAIAVLTKDAGKLTMGQPLVILAPHAVEALVKQPPDRWLSNARMTHYQAMLLDTDRVQFGPVVALNPATLLPLPEEGAPHDCLEILAETHGTRPDLTDQPIPDADHTWYTDGSSFLQEGQRKAGAAVTTETEVIWAGALPAGTSAQRAELIALTQALKMAEGKRLNVYTDSRYAFATAHIHGEIYRRRGWLTSEGREIKNKSEILALLKALFLPKRLSIIHCLGHQKGDSAEARGNRLADQAAREAAIKTPPDTSTLLAGKRTADGSEFEKRTADGSEFESPKKKAKVE

SEQ ID NO: 2199 - protein, 2096 aa, synthetic construct
MPAAKRVKLDGGDKKYSIGLDIGTNSVGWAVITDEYKVPSKKFKVLGNTDRHSIKKNLIGALLFDSGETAEATRLKRTARRRYTRRKNRICYLQEIFSNEMAKVDDSFFHRLEESFLVEEDKKHERHPIFGNIVDEVAYHEKYPTIYHLRKKLVDSTDKADLRLIYLALAHMIKFRGHFLIEGDLNPDNSDVDKLFIQLVQTYNQLFEENPINASGVDAKAILSARLSKSRRLENLIAQLPGEKKNGLFGNLIALSLGLTPNFKSNFDLAEDAKLQLSKDTYDDDLDNLLAQIGDQYADLFLAAKNLSDAILLSDILRVNTEITKAPLSASMIKRYDEHHQDLTLLKALVRQQLPEKYKEIFFDQSKNGYAGYIDGGASQEEFYKFIKPILEKMDGTEELLVKLNREDLLRKQRTFDNGSIPHQIHLGELHAILRRQEDFYPFLKDNREKIEKILTFRIPYYVGPLARGNSRFAWMTRKSEETITPWNFEEVVDKGASAQSFIERMTNFDKNLPNEKVLPKHSLLYEYFTVYNELTKVKYVTEGMRKPAFLSGEQKKAIVDLLFKTNRKVTVKQLKEDYFKKIECFDSVEISGVEDRFNASLGTYHDLLKIIKDKDFLDNEENEDILEDIVLTLTLFEDREMIEERLKTYAHLFDDKVMKQLKRRRYTGWGRLSRKLINGIRDKQSGKTILDFLKSDGFANRNFMQLIHDDSLTFKEDIQKAQVSGQGDSLHEHIANLAGSPAIKKGILQTVKVVDELVKVMGRHKPENIVIEMARENQTTQKGQKNSRERMKRIEEGIKELGSQILKEHPVENTQLQNEKLYLYYLQNGRDMYVDQELDINRLSDYDVDHIVPQSFLKDDSIDNKVLTRSDKARGKSDNVPSEEVVKKMKNYWRQLLNAKLITQRKFDNLTKAERGGLSELDKAGFIKRQLVETRQITKHVAQILDSRMNTKYDENDKLIREVKVITLKSKLVSDFRKDFQFYKVREINNYHHAHDAYLNAVVGTALIKKYPKLESEFVYGDYKVYDVRKMIAKSEQEIGKATAKYFFYSNIMNFFKTEITLANGEIRKRPLIETNGETGEIVWDKGRDFATVRKVLSMPQVNIVKKTEVQTGGFSKESILPKRNSDKLIARKKDWDPKKYGGFDSPTVAYSVLVVAKVEKGKSKKLKSVKELLGITIMERSSFEKNPIDFLEAKGYKEVKKDLIIKLPKYSLFELENGRKRMLASAGELQKGNELALPSKYVNFLYLASHYEKLKGSPEDNEQKQLFVEQHKHYLDEIIEQISEFSKRVILADANLDKVLSAYNKHRDKPIREQAENIIHLFTLTNLGAPAAFKYFDTTIDRKRYTSTKEVLDATLIHQSITGLYETRIDLSQLGGDGGGGSEAAAKGSSGGTLGIEDEYRLHETSTEPDVSLGSTWLSDFPQAWAETGGMGLAVRQAPLIIPLKATSTPVSIQQYPMSHEARLGIKPHIQRLLDQGILVPCQSPWNTPLLPVKKPGTNDYRPVQDLREVNKRVEDIHPTVPNPYNLLSGLPPSHQWYTVLDLKDAFFCLRLHPTSQPLFAFEWRDPGMGISGQLTWTRLPQGFKNSPTLFNEALHRDLADFRIQHPDLILLQYVDDILLAATSELDCQQGTRALLQTLGDLGYRASAKKAQICQKQVKYLGYLLREGQRWLTEARKETVMGQPVPKTPRQLREFLGTAGFCRLWIPGFAEMAAPLYPLTKPGTLFSWGPDQQKAYQEIKQALLTAPALGLPDLTKPFELFVDEKQGYAKGVLTQKLGPWRRPVAYLSKKLDPVAAGWPPCLRMVAAIAVLTKDAGKLTMGQPLVILAPHAVEALVKQPPDRWLSNARMTHYQAMLLDTDRVQFGPVVALNPATLLPLPEEGAPHDCLEILAETHGTRPDLTDQPIPDADHTWYTDGSSFLQEGQRKAGAAVTTETEVIWAGALPAGTSAQRAELIALTQALKMAEGKRLNVYTDSRYAFATAHIHGEIYRRRGWLTSEGREIKNKSEILALLKALFLPKRLSIIHCLGHQKGDSAEARGNRLADQAAREAAIKTPPDTSTLLAGKRTADGSEFEKRTADGSEFESPKKKAKVE

SEQ ID NO: 2200 - protein, 2096 aa, synthetic construct
MPAAKRVKLDGGDKKYSIGLDIGTNSVGWAVITDEYKVPSKKFKVLGNTDRHSIKKNLIGALLFDSGETAEATRLKRTARRRYTRRKNRICYLQEIFSNEMAKVDDSFFHRLEESFLVEEDKKHERHPIFGNIVDEVAYHEKYPTIYHLRKKLVDSTDKADLRLIYLALAHMIKFRGHFLIEGDLNPDNSDVDKLFIQLVQTYNQLFEENPINASGVDAKAILSARLSKSRRLENLIAQLPGEKKNGLFGNLIALSLGLTPNFKSNFDLAEDAKLQLSKDTYDDDLDNLLAQIGDQYADLFLAAKNLSDAILLSDILRVNTEITKAPLSASMIKRYDEHHQDLTLLKALVRQQLPEKYKEIFFDQSKNGYAGYIDGGASQEEFYKFIKPILEKMDGTEELLVKLNREDLLRKQRTFDNGSIPHQIHLGELHAILRRQEDFYPFLKDNREKIEKILTFRIPYYVGPLARGNSRFAWMTRKSEETITPWNFEEVVDKGASAQSFIERMTNFDKNLPNEKVLPKHSLLYEYFTVYNELTKVKYVTEGMRKPAFLSGEQKKAIVDLLFKTNRKVTVKQLKEDYFKKIECFDSVEISGVEDRFNASLGTYHDLLKIIKDKDFLDNEENEDILEDIVLTLTLFEDREMIEERLKTYAHLFDDKVMKQLKRRRYTGWGRLSRKLINGIRDKQSGKTILDFLKSDGFANRNFMQLIHDDSLTFKEDIQKAQVSGQGDSLHEHIANLAGSPAIKKGILQTVKVVDELVKVMGRHKPENIVIEMARENQTTQKGQKNSRERMKRIEEGIKELGSQILKEHPVENTQLQNEKLYLYYLQNGRDMYVDQELDINRLSDYDVDHIVPQSFLKDDSIDNKVLTRSDKARGKSDNVPSEEVVKKMKNYWRQLLNAKLITQRKFDNLTKAERGGLSELDKAGFIKRQLVETRQITKHVAQILDSRMNTKYDENDKLIREVKVITLKSKLVSDFRKDFQFYKVREINNYHHAHDAYLNAVVGTALIKKYPKLESEFVYGDYKVYDVRKMIAKSEQEIGKATAKYFFYSNIMNFFKTEITLANGEIRKRPLIETNGETGEIVWDKGRDFATVRKVLSMPQVNIVKKTEVQTGGFSKESILPKRNSDKLIARKKDWDPKKYGGFDSPTVAYSVLVVAKVEKGKSKKLKSVKELLGITIMERSSFEKNPIDFLEAKGYKEVKKDLIIKLPKYSLFELENGRKRMLASAGELQKGNELALPSKYVNFLYLASHYEKLKGSPEDNEQKQLFVEQHKHYLDEIIEQISEFSKRVILADANLDKVLSAYNKHRDKPIREQAENIIHLFTLTNLGAPAAFKYFDTTIDRKRYTSTKEVLDATLIHQSITGLYETRIDLSQLGGDGGEAAAKGGSGSSGGTLGIEDEYRLHETSTEPDVSLGSTWLSDFPQAWAETGGMGLAVRQAPLIIPLKATSTPVSIQQYPMSHEARLGIKPHIQRLLDQGILVPCQSPWNTPLLPVKKPGTNDYRPVQDLREVNKRVEDIHPTVPNPYNLLSGLPPSHQWYTVLDLKDAFFCLRLHPTSQPLFAFEWRDPGMGISGQLTWTRLPQGFKNSPTLFNEALHRDLADFRIQHPDLILLQYVDDILLAATSELDCQQGTRALLQTLGDLGYRASAKKAQICQKQVKYLGYLLREGQRWLTEARKETVMGQPVPKTPRQLREFLGTAGFCRLWIPGFAEMAAPLYPLTKPGTLFSWGPDQQKAYQEIKQALLTAPALGLPDLTKPFELFVDEKQGYAKGVLTQKLGPWRRPVAYLSKKLDPVAAGWPPCLRMVAAIAVLTKDAGKLTMGQPLVILAPHAVEALVKQPPDRWLSNARMTHYQAMLLDTDRVQFGPVVALNPATLLPLPEEGAPHDCLEILAETHGTRPDLTDQPIPDADHTWYTDGSSFLQEGQRKAGAAVTTETEVIWAGALPAGTSAQRAELIALTQALKMAEGKRLNVYTDSRYAFATAHIHGEIYRRRGWLTSEGREIKNKSEILALLKALFLPKRLSIIHCLGHQKGDSAEARGNRLADQAAREAAIKTPPDTSTLLAGKRTADGSEFEKRTADGSEFESPKKKAKVE

SEQ ID NO: 2201 - protein, 2096 aa, synthetic construct; identical to SEQ ID NO: 2071

SEQ ID NO: 2202 - protein, 2096 aa, synthetic construct; identical to SEQ ID NO: 2075

SEQ ID NO: 2203 - protein, 2091 aa, synthetic construct
MPAAKRVKLDGGDKKYSIGLDIGTNSVGWAVITDEYKVPSKKFKVLGNTDRHSIKKNLIGALLFDSGETAEATRLKRTARRRYTRRKNRICYLQEIFSNEMAKVDDSFFHRLEESFLVEEDKKHERHPIFGNIVDEVAYHEKYPTIYHLRKKLVDSTDKADLRLIYLALAHMIKFRGHFLIEGDLNPDNSDVDKLFIQLVQTYNQLFEENPINASGVDAKAILSARLSKSRRLENLIAQLPGEKKNGLFGNLIALSLGLTPNFKSNFDLAEDAKLQLSKDTYDDDLDNLLAQIGDQYADLFLAAKNLSDAILLSDILRVNTEITKAPLSASMIKRYDEHHQDLTLLKALVRQQLPEKYKEIFFDQSKNGYAGYIDGGASQEEFYKFIKPILEKMDGTEELLVKLNREDLLRKQRTFDNGSIPHQIHLGELHAILRRQEDFYPFLKDNREKIEKILTFRIPYYVGPLARGNSRFAWMTRKSEETITPWNFEEVVDKGASAQSFIERMTNFDKNLPNEKVLPKHSLLYEYFTVYNELTKVKYVTEGMRKPAFLSGEQKKAIVDLLFKTNRKVTVKQLKEDYFKKIECFDSVEISGVEDRFNASLGTYHDLLKIIKDKDFLDNEENEDILEDIVLTLTLFEDREMIEERLKTYAHLFDDKVMKQLKRRRYTGWGRLSRKLINGIRDKQSGKTILDFLKSDGFANRNFMQLIHDDSLTFKEDIQKAQVSGQGDSLHEHIANLAGSPAIKKGILQTVKVVDELVKVMGRHKPENIVIEMARENQTTQKGQKNSRERMKRIEEGIKELGSQILKEHPVENTQLQNEKLYLYYLQNGRDMYVDQELDINRLSDYDVDHIVPQSFLKDDSIDNKVLTRSDKARGKSDNVPSEEVVKKMKNYWRQLLNAKLITQRKFDNLTKAERGGLSELDKAGFIKRQLVETRQITKHVAQILDSRMNTKYDENDKLIREVKVITLKSKLVSDFRKDFQFYKVREINNYHHAHDAYLNAVVGTALIKKYPKLESEFVYGDYKVYDVRKMIAKSEQEIGKATAKYFFYSNIMNFFKTEITLANGEIRKRPLIETNGETGEIVWDKGRDFATVRKVLSMPQVNIVKKTEVQTGGFSKESILPKRNSDKLIARKKDWDPKKYGGFDSPTVAYSVLVVAKVEKGKSKKLKSVKELLGITIMERSSFEKNPIDFLEAKGYKEVKKDLIIKLPKYSLFELENGRKRMLASAGELQKGNELALPSKYVNFLYLASHYEKLKGSPEDNEQKQLFVEQHKHYLDEIIEQISEFSKRVILADANLDKVLSAYNKHRDKPIREQAENIIHLFTLTNLGAPAAFKYFDTTIDRKRYTSTKEVLDATLIHQSITGLYETRIDLSQLGGDGGGSSGGGGGTLGIEDEYRLHETSTEPDVSLGSTWLSDFPQAWAETGGMGLAVRQAPLIIPLKATSTPVSIQQYPMSHEARLGIKPHIQRLLDQGILVPCQSPWNTPLLPVKKPGTNDYRPVQDLREVNKRVEDIHPTVPNPYNLLSGLPPSHQWYTVLDLKDAFFCLRLHPTSQPLFAFEWRDPGMGISGQLTWTRLPQGFKNSPTLFNEALHRDLADFRIQHPDLILLQYVDDILLAATSELDCQQGTRALLQTLGDLGYRASAKKAQICQKQVKYLGYLLREGQRWLTEARKETVMGQPVPKTPRQLREFLGTAGFCRLWIPGFAEMAAPLYPLTKPGTLFSWGPDQQKAYQEIKQALLTAPALGLPDLTKPFELFVDEKQGYAKGVLTQKLGPWRRPVAYLSKKLDPVAAGWPPCLRMVAAIAVLTKDAGKLTMGQPLVILAPHAVEALVKQPPDRWLSNARMTHYQAMLLDTDRVQFGPVVALNPATLLPLPEEGAPHDCLEILAETHGTRPDLTDQPIPDADHTWYTDGSSFLQEGQRKAGAAVTTETEVIWAGALPAGTSAQRAELIALTQALKMAEGKRLNVYTDSRYAFATAHIHGEIYRRRGWLTSEGREIKNKSEILALLKALFLPKRLSIIHCLGHQKGDSAEARGNRLADQAAREAAIKTPPDTSTLLAGKRTADGSEFEKRTADGSEFESPKKKAKVE

SEQ ID NO: 2204 - protein, 2098 aa, synthetic construct
MPAAKRVKLDGGDKKYSIGLDIGTNSVGWAVITDEYKVPSKKFKVLGNTDRHSIKKNLIGALLFDSGETAEATRLKRTARRRYTRRKNRICYLQEIFSNEMAKVDDSFFHRLEESFLVEEDKKHERHPIFGNIVDEVAYHEKYPTIYHLRKKLVDSTDKADLRLIYLALAHMIKFRGHFLIEGDLNPDNSDVDKLFIQLVQTYNQLFEENPINASGVDAKAILSARLSKSRRLENLIAQLPGEKKNGLFGNLIALSLGLTPNFKSNFDLAEDAKLQLSKDTYDDDLDNLLAQIGDQYADLFLAAKNLSDAILLSDILRVNTEITKAPLSASMIKRYDEHHQDLTLLKALVRQQLPEKYKEIFFDQSKNGYAGYIDGGASQEEFYKFIKPILEKMDGTEELLVKLNREDLLRKQRTFDNGSIPHQIHLGELHAILRRQEDFYPFLKDNREKIEKILTFRIPYYVGPLARGNSRFAWMTRKSEETITPWNFEEVVDKGASAQSFIERMTNFDKNLPNEKVLPKHSLLYEYFTVYNELTKVKYVTEGMRKPAFLSGEQKKAIVDLLFKTNRKVTVKQLKEDYFKKIECFDSVEISGVEDRFNASLGTYHDLLKIIKDKDFLDNEENEDILEDIVLTLTLFEDREMIEERLKTYAHLFDDKVMKQLKRRRYTGWGRLSRKLINGIRDKQSGKTILDFLKSDGFANRNFMQLIHDDSLTFKEDIQKAQVSGQGDSLHEHIANLAGSPAIKKGILQTVKVVDELVKVMGRHKPENIVIEMARENQTTQKGQKNSRERMKRIEEGIKELGSQILKEHPVENTQLQNEKLYLYYLQNGRDMYVDQELDINRLSDYDVDHIVPQSFLKDDSIDNKVLTRSDKARGKSDNVPSEEVVKKMKNYWRQLLNAKLITQRKFDNLTKAERGGLSELDKAGFIKRQLVETRQITKHVAQILDSRMNTKYDENDKLIREVKVITLKSKLVSDFRKDFQFYKVREINNYHHAHDAYLNAVVGTALIKKYPKLESEFVYGDYKVYDVRKMIAKSEQEIGKATAKYFFYSNIMNFFKTEITLANGEIRKRPLIETNGETGEIVWDKGRDFATVRKVLSMPQVNIVKKTEVQTGGFSKESILPKRNSDKLIARKKDWDPKKYGGFDSPTVAYSVLVVAKVEKGKSKKLKSVKELLGITIMERSSFEKNPIDFLEAKGYKEVKKDLIIKLPKYSLFELENGRKRMLASAGELQKGNELALPSKYVNFLYLASHYEKLKGSPEDNEQKQLFVEQHKHYLDEIIEQISEFSKRVILADANLDKVLSAYNKHRDKPIREQAENIIHLFTLTNLGAPAAFKYFDTTIDRKRYTSTKEVLDATLIHQSITGLYETRIDLSQLGGDGGPAPAPAPAPAPAPGGTLGIEDEYRLHETSTEPDVSLGSTWLSDFPQAWAETGGMGLAVRQAPLIIPLKATSTPVSIQQYPMSHEARLGIKPHIQRLLDQGILVPCQSPWNTPLLPVKKPGTNDYRPVQDLREVNKRVEDIHPTVPNPYNLLSGLPPSHQWYTVLDLKDAFFCLRLHPTSQPLFAFEWRDPGMGISGQLTWTRLPQGFKNSPTLFNEALHRDLADFRIQHPDLILLQYVDDILLAATSELDCQQGTRALLQTLGDLGYRASAKKAQICQKQVKYLGYLLREGQRWLTEARKETVMGQPVPKTPRQLREFLGTAGFCRLWIPGFAEMAAPLYPLTKPGTLFSWGPDQQKAYQEIKQALLTAPALGLPDLTKPFELFVDEKQGYAKGVLTQKLGPWRRPVAYLSKKLDPVAAGWPPCLRMVAAIAVLTKDAGKLTMGQPLVILAPHAVEALVKQPPDRWLSNARMTHYQAMLLDTDRVQFGPVVALNPATLLPLPEEGAPHDCLEILAETHGTRPDLTDQPIPDADHTWYTDGSSFLQEGQRKAGAAVTTETEVIWAGALPAGTSAQRAELIALTQALKMAEGKRLNVYTDSRYAFATAHIHGEIYRRRGWLTSEGREIKNKSEILALLKALFLPKRLSIIHCLGHQKGDSAEARGNRLADQAAREAAIKTPPDTSTLLAGKRTADGSEFEKRTADGSEFESPKKKAKVE

SEQ ID NO: 2205 - protein, 2094 aa, synthetic construct
MPAAKRVKLDGGDKKYSIGLDIGTNSVGWAVITDEYKVPSKKFKVLGNTDRHSIKKNLIGALLFDSGETAEATRLKRTARRRYTRRKNRICYLQEIFSNEMAKVDDSFFHRLEESFLVEEDKKHERHPIFGNIVDEVAYHEKYPTIYHLRKKLVDSTDKADLRLIYLALAHMIKFRGHFLIEGDLNPDNSDVDKLFIQLVQTYNQLFEENPINASGVDAKAILSARLSKSRRLENLIAQLPGEKKNGLFGNLIALSLGLTPNFKSNFDLAEDAKLQLSKDTYDDDLDNLLAQIGDQYADLFLAAKNLSDAILLSDILRVNTEITKAPLSASMIKRYDEHHQDLTLLKALVRQQLPEKYKEIFFDQSKNGYAGYIDGGASQEEFYKFIKPILEKMDGTEELLVKLNREDLLRKQRTFDNGSIPHQIHLGELHAILRRQEDFYPFLKDNREKIEKILTFRIPYYVGPLARGNSRFAWMTRKSEETITPWNFEEVVDKGASAQSFIERMTNFDKNLPNEKVLPKHSLLYEYFTVYNELTKVKYVTEGMRKPAFLSGEQKKAIVDLLFKTNRKVTVKQLKEDYFKKIECFDSVEISGVEDRFNASLGTYHDLLKIIKDKDFLDNEENEDILEDIVLTLTLFEDREMIEERLKTYAHLFDDKVMKQLKRRRYTGWGRLSRKLINGIRDKQSGKTILDFLKSDGFANRNFMQLIHDDSLTFKEDIQKAQVSGQGDSLHEHIANLAGSPAIKKGILQTVKVVDELVKVMGRHKPENIVIEMARENQTTQKGQKNSRERMKRIEEGIKELGSQILKEHPVENTQLQNEKLYLYYLQNGRDMYVDQELDINRLSDYDVDHIVPQSFLKDDSIDNKVLTRSDKARGKSDNVPSEEVVKKMKNYWRQLLNAKLITQRKFDNLTKAERGGLSELDKAGFIKRQLVETRQITKHVAQILDSRMNTKYDENDKLIREVKVITLKSKLVSDFRKDFQFYKVREINNYHHAHDAYLNAVVGTALIKKYPKLESEFVYGDYKVYDVRKMIAKSEQEIGKATAKYFFYSNIMNFFKTEITLANGEIRKRPLIETNGETGEIVWDKGRDFATVRKVLSMPQVNIVKKTEVQTGGFSKESILPKRNSDKLIARKKDWDPKKYGGFDSPTVAYSVLVVAKVEKGKSKKLKSVKELLGITIMERSSFEKNPIDFLEAKGYKEVKKDLIIKLPKYSLFELENGRKRMLASAGELQKGNELALPSKYVNFLYLASHYEKLKGSPEDNEQKQLFVEQHKHYLDEIIEQISEFSKRVILADANLDKVLSAYNKHRDKPIREQAENIIHLFTLTNLGAPAAFKYFDTTIDRKRYTSTKEVLDATLIHQSITGLYETRIDLSQLGGDGGGGSGSSGGGGGTLGIEDEYRLHETSTEPDVSLGSTWLSDFPQAWAETGGMGLAVRQAPLIIPLKATSTPVSIQQYPMSHEARLGIKPHIQRLLDQGILVPCQSPWNTPLLPVKKPGTNDYRPVQDLREVNKRVEDIHPTVPNPYNLLSGLPPSHQWYTVLDLKDAFFCLRLHPTSQPLFAFEWRDPGMGISGQLTWTRLPQGFKNSPTLFNEALHRDLADFRIQHPDLILLQYVDDILLAATSELDCQQGTRALLQTLGDLGYRASAKKAQICQKQVKYLGYLLREGQRWLTEARKETVMGQPVPKTPRQLREFLGTAGFCRLWIPGFAEMAAPLYPLTKPGTLFSWGPDQQKAYQEIKQALLTAPALGLPDLTKPFELFVDEKQGYAKGVLTQKLGPWRRPVAYLSKKLDPVAAGWPPCLRMVAAIAVLTKDAGKLTMGQPLVILAPHAVEALVKQPPDRWLSNARMTHYQAMLLDTDRVQFGPVVALNPATLLPLPEEGAPHDCLEILAETHGTRPDLTDQPIPDADHTWYTDGSSFLQEGQRKAGAAVTTETEVIWAGALPAGTSAQRAELIALTQALKMAEGKRLNVYTDSRYAFATAHIHGEIYRRRGWLTSEGREIKNKSEILALLKALFLPKRLSIIHCLGHQKGDSAEARGNRLADQAAREAAIKTPPDTSTLLAGKRTADGSEFEKRTADGSEFESPKKKAKVE

SEQ ID NO: 2206 - protein, 2093 aa, synthetic construct
MPAAKRVKLDGGDKKYSIGLDIGTNSVGWAVITDEYKVPSKKFKVLGNTDRHSIKKNLIGALLFDSGETAEATRLKRTARRRYTRRKNRICYLQEIFSNEMAKVDDSFFHRLEESFLVEEDKKHERHPIFGNIVDEVAYHEKYPTIYHLRKKLVDSTDKADLRLIYLALAHMIKFRGHFLIEGDLNPDNSDVDKLFIQLVQTYNQLFEENPINASGVDAKAILSARLSKSRRLENLIAQLPGEKKNGLFGNLIALSLGLTPNFKSNFDLAEDAKLQLSKDTYDDDLDNLLAQIGDQYADLFLAAKNLSDAILLSDILRVNTEITKAPLSASMIKRYDEHHQDLTLLKALVRQQLPEKYKEIFFDQSKNGYAGYIDGGASQEEFYKFIKPILEKMDGTEELLVKLNREDLLRKQRTFDNGSIPHQIHLGELHAILRRQEDFYPFLKDNREKIEKILTFRIPYYVGPLARGNSRFAWMTRKSEETITPWNFEEVVDKGASAQSFIERMTNFDKNLPNEKVLPKHSLLYEYFTVYNELTKVKYVTEGMRKPAFLSGEQKKAIVDLLFKTNRKVTVKQLKEDYFKKIECFDSVEISGVEDRFNASLGTYHDLLKIIKDKDFLDNEENEDILEDIVLTLTLFEDREMIEERLKTYAHLFDDKVMKQLKRRRYTGWGRLSRKLINGIRDKQSGKTILDFLKSDGFANRNFMQLIHDDSLTFKEDIQKAQVSGQGDSLHEHIANLAGSPAIKKGILQTVKVVDELVKVMGRHKPENIVIEMARENQTTQKGQKNSRERMKRIEEGIKELGSQILKEHPVENTQLQNEKLYLYYLQNGRDMYVDQELDINRLSDYDVDHIVPQSFLKDDSIDNKVLTRSDKARGKSDNVPSEEVVKKMKNYWRQLLNAKLITQRKFDNLTKAERGGLSELDKAGFIKRQLVETRQITKHVAQILDSRMNTKYDENDKLIREVKVITLKSKLVSDFRKDFQFYKVREINNYHHAHDAYLNAVVGTALIKKYPKLESEFVYGDYKVYDVRKMIAKSEQEIGKATAKYFFYSNIMNFFKTEITLANGEIRKRPLIETNGETGEIVWDKGRDFATVRKVLSMPQVNIVKKTEVQTGGFSKESILPKRNSDKLIARKKDWDPKKYGGFDSPTVAYSVLVVAKVEKGKSKKLKSVKELLGITIMERSSFEKNPIDFLEAKGYKEVKKDLIIKLPKYSLFELENGRKRMLASAGELQKGNELALPSKYVNFLYLASHYEKLKGSPEDNEQKQLFVEQHKHYLDEIIEQISEFSKRVILADANLDKVLSAYNKHRDKPIREQAENIIHLFTLTNLGAPAAFKYFDTTIDRKRYTSTKEVLDATLIHQSITGLYETRIDLSQLGGDGGPAPEAAAKGGTLGIEDEYRLHETSTEPDVSLGSTWLSDFPQAWAETGGMGLAVRQAPLIIPLKATSTPVSIQQYPMSHEARLGIKPHIQRLLDQGILVPCQSPWNTPLLPVKKPGTNDYRPVQDLREVNKRVEDIHPTVPNPYNLLSGLPPSHQWYTVLDLKDAFFCLRLHPTSQPLFAFEWRDPGMGISGQLTWTRLPQGFKNSPTLFNEALHRDLADFRIQHPDLILLQYVDDILLAATSELDCQQGTRALLQTLGDLGYRASAKKAQICQKQVKYLGYLLREGQRWLTEARKETVMGQPVPKTPRQLREFLGTAGFCRLWIPGFAEMAAPLYPLTKPGTLFSWGPDQQKAYQEIKQALLTAPALGLPDLTKPFELFVDEKQGYAKGVLTQKLGPWRRPVAYLSKKLDPVAAGWPPCLRMVAAIAVLTKDAGKLTMGQPLVILAPHAVEALVKQPPDRWLSNARMTHYQAMLLDTDRVQFGPVVALNPATLLPLPEEGAPHDCLEILAETHGTRPDLTDQPIPDADHTWYTDGSSFLQEGQRKAGAAVTTETEVIWAGALPAGTSAQRAELIALTQALKMAEGKRLNVYTDSRYAFATAHIHGEIYRRRGWLTSEGREIKNKSEILALLKALFLPKRLSIIHCLGHQKGDSAEARGNRLADQAAREAAIKTPPDTSTLLAGKRTADGSEFEKRTADGSEFESPKKKAKVE

SEQ ID NO: 2207 - protein, 2096 aa, synthetic construct; identical to SEQ ID NO: 2074

SEQ ID NO: 2208 - protein, 2093 aa, synthetic construct
MPAAKRVKLDGGDKKYSIGLDIGTNSVGWAVITDEYKVPSKKFKVLGNTDRHSIKKNLIGALLFDSGETAEATRLKRTARRRYTRRKNRICYLQEIFSNEMAKVDDSFFHRLEESFLVEEDKKHERHPIFGNIVDEVAYHEKYPTIYHLRKKLVDSTDKADLRLIYLALAHMIKFRGHFLIEGDLNPDNSDVDKLFIQLVQTYNQLFEENPINASGVDAKAILSARLSKSRRLENLIAQLPGEKKNGLFGNLIALSLGLTPNFKSNFDLAEDAKLQLSKDTYDDDLDNLLAQIGDQYADLFLAAKNLSDAILLSDILRVNTEITKAPLSASMIKRYDEHHQDLTLLKALVRQQLPEKYKEIFFDQSKNGYAGYIDGGASQEEFYKFIKPILEKMDGTEELLVKLNREDLLRKQRTFDNGSIPHQIHLGELHAILRRQEDFYPFLKDNREKIEKILTFRIPYYVGPLARGNSRFAWMTRKSEETITPWNFEEVVDKGASAQSFIERMTNFDKNLPNEKVLPKHSLLYEYFTVYNELTKVKYVTEGMRKPAFLSGEQKKAIVDLLFKTNRKVTVKQLKEDYFKKIECFDSVEISGVEDRFNASLGTYHDLLKIIKDKDFLDNEENEDILEDIVLTLTLFEDREMIEERLKTYAHLFDDKVMKQLKRRRYTGWGRLSRKLINGIRDKQSGKTILDFLKSDGFANRNFMQLIHDDSLTFKEDIQKAQVSGQGDSLHEHIANLAGSPAIKKGILQTVKVVDELVKVMGRHKPENIVIEMARENQTTQKGQKNSRERMKRIEEGIKELGSQILKEHPVENTQLQNEKLYLYYLQNGRDMYVDQELDINRLSDYDVDHIVPQSFLKDDSIDNKVLTRSDKARGKSDNVPSEEVVKKMKNYWRQLLNAKLITQRKFDNLTKAERGGLSELDKAGFIKRQLVETRQITKHVAQILDSRMNTKYDENDKLIREVKVITLKSKLVSDFRKDFQFYKVREINNYHHAHDAYLNAVVGTALIKKYPKLESEFVYGDYKVYDVRKMIAKSEQEIGKATAKYFFYSNIMNFFKTEITLANGEIRKRPLIETNGETGEIVWDKGRDFATVRKVLSMPQVNIVKKTEVQTGGFSKESILPKRNSDKLIARKKDWDPKKYGGFDSPTVAYSVLVVAKVEKGKSKKLKSVKELLGITIMERSSFEKNPIDFLEAKGYKEVKKDLIIKLPKYSLFELENGRKRMLASAGELQKGNELALPSKYVNFLYLASHYEKLKGSPEDNEQKQLFVEQHKHYLDEIIEQISEFSKRVILADANLDKVLSAYNKHRDKPIREQAENIIHLFTLTNLGAPAAFKYFDTTIDRKRYTSTKEVLDATLIHQSITGLYETRIDLSQLGGDGGGGGEAAAKGGTLGIEDEYRLHETSTEPDVSLGSTWLSDFPQAWAETGGMGLAVRQAPLIIPLKATSTPVSIQQYPMSHEARLGIKPHIQRLLDQGILVPCQSPWNTPLLPVKKPGTNDYRPVQDLREVNKRVEDIHPTVPNPYNLLSGLPPSHQWYTVLDLKDAFFCLRLHPTSQPLFAFEWRDPGMGISGQLTWTRLPQGFKNSPTLFNEALHRDLADFRIQHPDLILLQYVDDILLAATSELDCQQGTRALLQTLGDLGYRASAKKAQICQKQVKYLGYLLREGQRWLTEARKETVMGQPVPKTPRQLREFLGTAGFCRLWIPGFAEMAAPLYPLTKPGTLFSWGPDQQKAYQEIKQALLTAPALGLPDLTKPFELFVDEKQGYAKGVLTQKLGPWRRPVAYLSKKLDPVAAGWPPCLRMVAAIAVLTKDAGKLTMGQPLVILAPHAVEALVKQPPDRWLSNARMTHYQAMLLDTDRVQFGPVVALNPATLLPLPEEGAPHDCLEILAETHGTRPDLTDQPIPDADHTWYTDGSSFLQEGQRKAGAAVTTETEVIWAGALPAGTSAQRAELIALTQALKMAEGKRLNVYTDSRYAFATAHIHGEIYRRRGWLTSEGREIKNKSEILALLKALFLPKRLSIIHCLGHQKGDSAEARGNRLADQAAREAAIKTPPDTSTLLAGKRTADGSEFEKRTADGSEFESPKKKAKVE

SEQ ID NO: 2209 - protein, 2096 aa, synthetic construct
MPAAKRVKLDGGDKKYSIGLDIGTNSVGWAVITDEYKVPSKKFKVLGNTDRHSIKKNLIGALLFDSGETAEATRLKRTARRRYTRRKNRICYLQEIFSNEMAKVDDSFFHRLEESFLVEEDKKHERHPIFGNIVDEVAYHEKYPTIYHLRKKLVDSTDKADLRLIYLALAHMIKFRGHFLIEGDLNPDNSDVDKLFIQLVQTYNQLFEENPINASGVDAKAILSARLSKSRRLENLIAQLPGEKKNGLFGNLIALSLGLTPNFKSNFDLAEDAKLQLSKDTYDDDLDNLLAQIGDQYADLFLAAKNLSDAILLSDILRVNTEITKAPLSASMIKRYDEHHQDLTLLKALVRQQLPEKYKEIFFDQSKNGYAGYIDGGASQEEFYKFIKPILEKMDGTEELLVKLNREDLLRKQRTFDNGSIPHQIHLGELHAILRRQEDFYPFLKDNREKIEKILTFRIPYYVGPLARGNSRFAWMTRKSEETITPWNFEEVVDKGASAQSFIERMTNFDKNLPNEKVLPKHSLLYEYFTVYNELTKVKYVTEGMRKPAFLSGEQKKAIVDLLFKTNRKVTVKQLKEDYFKKIECFDSVEISGVEDRFNASLGTYHDLLKIIKDKDFLDNEENEDILEDIVLTLTLFEDREMIEERLKTYAHLFDDKVMKQLKRRRYTGWGRLSRKLINGIRDKQSGKTILDFLKSDGFANRNFMQLIHDDSLTFKEDIQKAQVSGQGDSLHEHIANLAGSPAIKKGILQTVKVVDELVKVMGRHKPENIVIEMARENQTTQKGQKNSRERMKRIEEGIKELGSQILKEHPVENTQLQNEKLYLYYLQNGRDMYVDQELDINRLSDYDVDHIVPQSFLKDDSIDNKVLTRSDKARGKSDNVPSEEVVKKMKNYWRQLLNAKLITQRKFDNLTKAERGGLSELDKAGFIKRQLVETRQITKHVAQILDSRMNTKYDENDKLIREVKVITLKSKLVSDFRKDFQFYKVREINNYHHAHDAYLNAVVGTALIKKYPKLESEFVYGDYKVYDVRKMIAKSEQEIGKATAKYFFYSNIMNFFKTEITLANGEIRKRPLIETNGETGEIVWDKGRDFATVRKVLSMPQVNIVKKTEVQTGGFSKESILPKRNSDKLIARKKDWDPKKYGGFDSPTVAYSVLVVAKVEKGKSKKLKSVKELLGITIMERSSFEKNPIDFLEAKGYKEVKKDLIIKLPKYSLFELENGRKRMLASAGELQKGNELALPSKYVNFLYLASHYEKLKGSPEDNEQKQLFVEQHKHYLDEIIEQISEFSKRVILADANLDKVLSAYNKHRDKPIREQAENIIHLFTLTNLGAPAAFKYFDTTIDRKRYTSTKEVLDATLIHQSITGLYETRIDLSQLGGDGGEAAAKGGGGGSGGTLGIEDEYRLHETSTEPDVSLGSTWLSDFPQAWAETGGMGLAVRQAPLIIPLKATSTPVSIQQYPMSHEARLGIKPHIQRLLDQGILVPCQSPWNTPLLPVKKPGTNDYRPVQDLREVNKRVEDIHPTVPNPYNLLSGLPPSHQWYTVLDLKDAFFCLRLHPTSQPLFAFEWRDPGMGISGQLTWTRLPQGFKNSPTLFNEALHRDLADFRIQHPDLILLQYVDDILLAATSELDCQQGTRALLQTLGDLGYRASAKKAQICQKQVKYLGYLLREGQRWLTEARKETVMGQPVPKTPRQLREFLGTAGFCRLWIPGFAEMAAPLYPLTKPGTLFSWGPDQQKAYQEIKQALLTAPALGLPDLTKPFELFVDEKQGYAKGVLTQKLGPWRRPVAYLSKKLDPVAAGWPPCLRMVAAIAVLTKDAGKLTMGQPLVILAPHAVEALVKQPPDRWLSNARMTHYQAMLLDTDRVQFGPVVALNPATLLPLPEEGAPHDCLEILAETHGTRPDLTDQPIPDADHTWYTDGSSFLQEGQRKAGAAVTTETEVIWAGALPAGTSAQRAELIALTQALKMAEGKRLNVYTDSRYAFATAHIHGEIYRRRGWLTSEGREIKNKSEILALLKALFLPKRLSIIHCLGHQKGDSAEARGNRLADQAAREAAIKTPPDTSTLLAGKRTADGSEFEKRTADGSEFESPKKKAKVE

SEQ ID NO: 2210 - protein, 2110 aa, synthetic construct
MPAAKRVKLDGGDKKYSIGLDIGTNSVGWAVITDEYKVPSKKFKVLGNTDRHSIKKNLIGALLFDSGETAEATRLKRTARRRYTRRKNRICYLQEIFSNEMAKVDDSFFHRLEESFLVEEDKKHERHPIFGNIVDEVAYHEKYPTIYHLRKKLVDSTDKADLRLIYLALAHMIKFRGHFLIEGDLNPDNSDVDKLFIQLVQTYNQLFEENPINASGVDAKAILSARLSKSRRLENLIAQLPGEKKNGLFGNLIALSLGLTPNFKSNFDLAEDAKLQLSKDTYDDDLDNLLAQIGDQYADLFLAAKNLSDAILLSDILRVNTEITKAPLSASMIKRYDEHHQDLTLLKALVRQQLPEKYKEIFFDQSKNGYAGYIDGGASQEEFYKFIKPILEKMDGTEELLVKLNREDLLRKQRTFDNGSIPHQIHLGELHAILRRQEDFYPFLKDNREKIEKILTFRIPYYVGPLARGNSRFAWMTRKSEETITPWNFEEVVDKGASAQSFIERMTNFDKNLPNEKVLPKHSLLYEYFTVYNELTKVKYVTEGMRKPAFLSGEQKKAIVDLLFKTNRKVTVKQLKEDYFKKIECFDSVEISGVEDRFNASLGTYHDLLKIIKDKDFLDNEENEDILEDIVLTLTLFEDREMIEERLKTYAHLFDDKVMKQLKRRRYTGWGRLSRKLINGIRDKQSGKTILDFLKSDGFANRNFMQLIHDDSLTFKEDIQKAQVSGQGDSLHEHIANLAGSPAIKKGILQTVKVVDELVKVMGRHKPENIVIEMARENQTTQKGQKNSRERMKRIEEGIKELGSQILKEHPVENTQLQNEKLYLYYLQNGRDMYVDQELDINRLSDYDVDHIVPQSFLKDDSIDNKVLTRSDKARGKSDNVPSEEVVKKMKNYWRQLLNAKLITQRKFDNLTKAERGGLSELDKAGFIKRQLVETRQITKHVAQILDSRMNTKYDENDKLIREVKVITLKSKLVSDFRKDFQFYKVREINNYHHAHDAYLNAVVGTALIKKYPKLESEFVYGDYKVYDVRKMIAKSEQEIGKATAKYFFYSNIMNFFKTEITLANGEIRKRPLIETNGETGEIVWDKGRDFATVRKVLSMPQVNIVKKTEVQTGGFSKESILPKRNSDKLIARKKDWDPKKYGGFDSPTVAYSVLVVAKVEKGKSKKLKSVKELLGITIMERSSFEKNPIDFLEAKGYKEVKKDLIIKLPKYSLFELENGRKRMLASAGELQKGNELALPSKYVNFLYLASHYEKLKGSPEDNEQKQLFVEQHKHYLDEIIEQISEFSKRVILADANLDKVLSAYNKHRDKPIREQAENIIHLFTLTNLGAPAAFKYFDTTIDRKRYTSTKEVLDATLIHQSITGLYETRIDLSQLGGDGGGGGGSGGGGSGGGGSGGGGSGGGGSGGTLGIEDEYRLHETSTEPDVSLGSTWLSDFPQAWAETGGMGLAVRQAPLIIPLKATSTPVSIQQYPMSHEARLGIKPHIQRLLDQGILVPCQSPWNTPLLPVKKPGTNDYRPVQDLREVNKRVEDIHPTVPNPYNLLSGLPPSHQWYTVLDLKDAFFCLRLHPTSQPLFAFEWRDPGMGISGQLTWTRLPQGFKNSPTLFNEALHRDLADFRIQHPDLILLQYVDDILLAATSELDCQQGTRALLQTLGDLGYRASAKKAQICQKQVKYLGYLLREGQRWLTEARKETVMGQPVPKTPRQLREFLGTAGFCRLWIPGFAEMAAPLYPLTKPGTLFSWGPDQQKAYQEIKQALLTAPALGLPDLTKPFELFVDEKQGYAKGVLTQKLGPWRRPVAYLSKKLDPVAAGWPPCLRMVAAIAVLTKDAGKLTMGQPLVILAPHAVEALVKQPPDRWLSNARMTHYQAMLLDTDRVQFGPVVALNPATLLPLPEEGAPHDCLEILAETHGTRPDLTDQPIPDADHTWYTDGSSFLQEGQRKAGAAVTTETEVIWAGALPAGTSAQRAELIALTQALKMAEGKRLNVYTDSRYAFATAHIHGEIYRRRGWLTSEGREIKNKSEILALLKALFLPKRLSIIHCLGHQKGDSAEARGNRLADQAAREAAIKTPPDTSTLLAGKRTADGSEFEKRTADGSEFESPKKKAKVE

SEQ ID NO: 2211 - protein, 2096 aa, synthetic construct
MPAAKRVKLDGGDKKYSIGLDIGTNSVGWAVITDEYKVPSKKFKVLGNTDRHSIKKNLIGALLFDSGETAEATRLKRTARRRYTRRKNRICYLQEIFSNEMAKVDDSFFHRLEESFLVEEDKKHERHPIFGNIVDEVAYHEKYPTIYHLRKKLVDSTDKADLRLIYLALAHMIKFRGHFLIEGDLNPDNSDVDKLFIQLVQTYNQLFEENPINASGVDAKAILSARLSKSRRLENLIAQLPGEKKNGLFGNLIALSLGLTPNFKSNFDLAEDAKLQLSKDTYDDDLDNLLAQIGDQYADLFLAAKNLSDAILLSDILRVNTEITKAPLSASMIKRYDEHHQDLTLLKALVRQQLPEKYKEIFFDQSKNGYAGYIDGGASQEEFYKFIKPILEKMDGTEELLVKLNREDLLRKQRTFDNGSIPHQIHLGELHAILRRQEDFYPFLKDNREKIEKILTFRIPYYVGPLARGNSRFAWMTRKSEETITPWNFEEVVDKGASAQSFIERMTNFDKNLPNEKVLPKHSLLYEYFTVYNELTKVKYVTEGMRKPAFLSGEQKKAIVDLLFKTNRKVTVKQLKEDYFKKIECFDSVEISGVEDRFNASLGTYHDLLKIIKDKDFLDNEENEDILEDIVLTLTLFEDREMIEERLKTYAHLFDDKVMKQLKRRRYTGWGRLSRKLINGIRDKQSGKTILDFLKSDGFANRNFMQLIHDDSLTFKEDIQKAQVSGQGDSLHEHIANLAGSPAIKKGILQTVKVVDELVKVMGRHKPENIVIEMARENQTTQKGQKNSRERMKRIEEGIKELGSQILKEHPVENTQLQNEKLYLYYLQNGRDMYVDQELDINRLSDYDVDHIVPQSFLKDDSIDNKVLTRSDKARGKSDNVPSEEVVKKMKNYWRQLLNAKLITQRKFDNLTKAERGGLSELDKAGFIKRQLVETRQITKHVAQILDSRMNTKYDENDKLIREVKVITLKSKLVSDFRKDFQFYKVREINNYHHAHDAYLNAVVGTALIKKYPKLESEFVYGDYKVYDVRKMIAKSEQEIGKATAKYFFYSNIMNFFKTEITLANGEIRKRPLIETNGETGEIVWDKGRDFATVRKVLSMPQVNIVKKTEVQTGGFSKESILPKRNSDKLIARKKDWDPKKYGGFDSPTVAYSVLVVAKVEKGKSKKLKSVKELLGITIMERSSFEKNPIDFLEAKGYKEVKKDLIIKLPKYSLFELENGRKRMLASAGELQKGNELALPSKYVNFLYLASHYEKLKGSPEDNEQKQLFVEQHKHYLDEIIEQISEFSKRVILADANLDKVLSAYNKHRDKPIREQAENIIHLFTLTNLGAPAAFKYFDTTIDRKRYTSTKEVLDATLIHQSITGLYETRIDLSQLGGDGGEAAAKGSSPAPGGTLGIEDEYRLHETSTEPDVSLGSTWLSDFPQAWAETGGMGLAVRQAPLIIPLKATSTPVSIQQYPMSHEARLGIKPHIQRLLDQGILVPCQSPWNTPLLPVKKPGTNDYRPVQDLREVNKRVEDIHPTVPNPYNLLSGLPPSHQWYTVLDLKDAFFCLRLHPTSQPLFAFEWRDPGMGISGQLTWTRLPQGFKNSPTLFNEALHRDLADFRIQHPDLILLQYVDDILLAATSELDCQQGTRALLQTLGDLGYRASAKKAQICQKQVKYLGYLLREGQRWLTEARKETVMGQPVPKTPRQLREFLGTAGFCRLWIPGFAEMAAPLYPLTKPGTLFSWGPDQQKAYQEIKQALLTAPALGLPDLTKPFELFVDEKQGYAKGVLTQKLGPWRRPVAYLSKKLDPVAAGWPPCLRMVAAIAVLTKDAGKLTMGQPLVILAPHAVEALVKQPPDRWLSNARMTHYQAMLLDTDRVQFGPVVALNPATLLPLPEEGAPHDCLEILAETHGTRPDLTDQPIPDADHTWYTDGSSFLQEGQRKAGAAVTTETEVIWAGALPAGTSAQRAELIALTQALKMAEGKRLNVYTDSRYAFATAHIHGEIYRRRGWLTSEGREIKNKSEILALLKALFLPKRLSIIHCLGHQKGDSAEARGNRLADQAAREAAIKTPPDTSTLLAGKRTADGSEFEKRTADGSEFESPKKKAKVE

SEQ ID NO: 2212 - protein, 2094 aa, synthetic construct; identical to SEQ ID NO: 2079

SEQ ID NO: 2213 - protein, 2096 aa, synthetic construct
MPAAKRVKLDGGDKKYSIGLDIGTNSVGWAVITDEYKVPSKKFKVLGNTDRHSIKKNLIGALLFDSGETAEATRLKRTARRRYTRRKNRICYLQEIFSNEMAKVDDSFFHRLEESFLVEEDKKHERHPIFGNIVDEVAYHEKYPTIYHLRKKLVDSTDKADLRLIYLALAHMIKFRGHFLIEGDLNPDNSDVDKLFIQLVQTYNQLFEENPINASGVDAKAILSARLSKSRRLENLIAQLPGEKKNGLFGNLIALSLGLTPNFKSNFDLAEDAKLQLSKDTYDDDLDNLLAQIGDQYADLFLAAKNLSDAILLSDILRVNTEITKAPLSASMIKRYDEHHQDLTLLKALVRQQLPEKYKEIFFDQSKNGYAGYIDGGASQEEFYKFIKPILEKMDGTEELLVKLNREDLLRKQRTFDNGSIPHQIHLGELHAILRRQEDFYPFLKDNREKIEKILTFRIPYYVGPLARGNSRFAWMTRKSEETITPWNFEEVVDKGASAQSFIERMTNFDKNLPNEKVLPKHSLLYEYFTVYNELTKVKYVTEGMRKPAFLSGEQKKAIVDLLFKTNRKVTVKQLKEDYFKKIECFDSVEISGVEDRFNASLGTYHDLLKIIKDKDFLDNEENEDILEDIVLTLTLFEDREMIEERLKTYAHLFDDKVMKQLKRRRYTGWGRLSRKLINGIRDKQSGKTILDFLKSDGFANRNFMQLIHDDSLTFKEDIQKAQVSGQGDSLHEHIANLAGSPAIKKGILQTVKVVDELVKVMGRHKPENIVIEMARENQTTQKGQKNSRERMKRIEEGIKELGSQILKEHPVENTQLQNEKLYLYYLQNGRDMYVDQELDINRLSDYDVDHIVPQSFLKDDSIDNKVLTRSDKARGKSDNVPSEEVVKKMKNYWRQLLNAKLITQRKFDNLTKAERGGLSELDKAGFIKRQLVETRQITKHVAQILDSRMNTKYDENDKLIREVKVITLKSKLVSDFRKDFQFYKVREINNYHHAHDAYLNAVVGTALIKKYPKLESEFVYGDYKVYDVRKMIAKSEQEIGKATAKYFFYSNIMNFFKTEITLANGEIRKRPLIETNGETGEIVWDKGRDFATVRKVLSMPQVNIVKKTEVQTGGFSKESILPKRNSDKLIARKKDWDPKKYGGFDSPTVAYSVLVVAKVEKGKSKKLKSVKELLGITIMERSSFEKNPIDFLEAKGYKEVKKDLIIKLPKYSLFELENGRKRMLASAGELQKGNELALPSKYVNFLYLASHYEKLKGSPEDNEQKQLFVEQHKHYLDEIIEQISEFSKRVILADANLDKVLSAYNKHRDKPIREQAENIIHLFTLTNLGAPAAFKYFDTTIDRKRYTSTKEVLDATLIHQSITGLYETRIDLSQLGGDGGEAAAKPAPGSSGGTLGIEDEYRLHETSTEPDVSLGSTWLSDFPQAWAETGGMGLAVRQAPLIIPLKATSTPVSIQQYPMSHEARLGIKPHIQRLLDQGILVPCQSPWNTPLLPVKKPGTNDYRPVQDLREVNKRVEDIHPTVPNPYNLLSGLPPSHQWYTVLDLKDAFFCLRLHPTSQPLFAFEWRDPGMGISGQLTWTRLPQGFKNSPTLFNEALHRDLADFRIQHPDLILLQYVDDILLAATSELDCQQGTRALLQTLGDLGYRASAKKAQICQKQVKYLGYLLREGQRWLTEARKETVMGQPVPKTPRQLREFLGTAGFCRLWIPGFAEMAAPLYPLTKPGTLFSWGPDQQKAYQEIKQALLTAPALGLPDLTKPFELFVDEKQGYAKGVLTQKLGPWRRPVAYLSKKLDPVAAGWPPCLRMVAAIAVLTKDAGKLTMGQPLVILAPHAVEALVKQPPDRWLSNARMTHYQAMLLDTDRVQFGPVVALNPATLLPLPEEGAPHDCLEILAETHGTRPDLTDQPIPDADHTWYTDGSSFLQEGQRKAGAAVTTETEVIWAGALPAGTSAQRAELIALTQALKMAEGKRLNVYTDSRYAFATAHIHGEIYRRRGWLTSEGREIKNKSEILALLKALFLPKRLSIIHCLGHQKGDSAEARGNRLADQAAREAAIKTPPDTSTLLAGKRTADGSEFEKRTADGSEFESPKKKAKVE

SEQ ID NO: 2214 - protein, 2096 aa, synthetic construct
MPAAKRVKLDGGDKKYSIGLDIGTNSVGWAVITDEYKVPSKKFKVLGNTDRHSIKKNLIGALLFDSGETAEATRLKRTARRRYTRRKNRICYLQEIFSNEMAKVDDSFFHRLEESFLVEEDKKHERHPIFGNIVDEVAYHEKYPTIYHLRKKLVDSTDKADLRLIYLALAHMIKFRGHFLIEGDLNPDNSDVDKLFIQLVQTYNQLFEENPINASGVDAKAILSARLSKSRRLENLIAQLPGEKKNGLFGNLIALSLGLTPNFKSNFDLAEDAKLQLSKDTYDDDLDNLLAQIGDQYADLFLAAKNLSDAILLSDILRVNTEITKAPLSASMIKRYDEHHQDLTLLKALVRQQLPEKYKEIFFDQSKNGYAGYIDGGASQEEFYKFIKPILEKMDGTEELLVKLNREDLLRKQRTFDNGSIPHQIHLGELHAILRRQEDFYPFLKDNREKIEKILTFRIPYYVGPLARGNSRFAWMTRKSEETITPWNFEEVVDKGASAQSFIERMTNFDKNLPNEKVLPKHSLLYEYFTVYNELTKVKYVTEGMRKPAFLSGEQKKAIVDLLFKTNRKVTVKQLKEDYFKKIECFDSVEISGVEDRFNASLGTYHDLLKIIKDKDFLDNEENEDILEDIVLTLTLFEDREMIEERLKTYAHLFDDKVMKQLKRRRYTGWGRLSRKLINGIRDKQSGKTILDFLKSDGFANRNFMQLIHDDSLTFKEDIQKAQVSGQGDSLHEHIANLAGSPAIKKGILQTVKVVDELVKVMGRHKPENIVIEMARENQTTQKGQKNSRERMKRIEEGIKELGSQILKEHPVENTQLQNEKLYLYYLQNGRDMYVDQELDINRLSDYDVDHIVPQSFLKDDSIDNKVLTRSDKARGKSDNVPSEEVVKKMKNYWRQLLNAKLITQRKFDNLTKAERGGLSELDKAGFIKRQLVETRQITKHVAQILDSRMNTKYDENDKLIREVKVITLKSKLVSDFRKDFQFYKVREINNYHHAHDAYLNAVVGTALIKKYPKLESEFVYGDYKVYDVRKMIAKSEQEIGKATAKYFFYSNIMNFFKTEITLANGEIRKRPLIETNGETGEIVWDKGRDFATVRKVLSMPQVNIVKKTEVQTGGFSKESILPKRNSDKLIARKKDWDPKKYGGFDSPTVAYSVLVVAKVEKGKSKKLKSVKELLGITIMERSSFEKNPIDFLEAKGYKEVKKDLIIKLPKYSLFELENGRKRMLASAGELQKGNELALPSKYVNFLYLASHYEKLKGSPEDNEQKQLFVEQHKHYLDEIIEQISEFSKRVILADANLDKVLSAYNKHRDKPIREQAENIIHLFTLTNLGAPAAFKYFDTTIDRKRYTSTKEVLDATLIHQSITGLYETRIDLSQLGGDGGGSSGGGEAAAKGGTLGIEDEYRLHETSTEPDVSLGSTWLSDFPQAWAETGGMGLAVRQAPLIIPLKATSTPVSIQQYPMSHEARLGIKPHIQRLLDQGILVPCQSPWNTPLLPVKKPGTNDYRPVQDLREVNKRVEDIHPTVPNPYNLLSGLPPSHQWYTVLDLKDAFFCLRLHPTSQPLFAFEWRDPGMGISGQLTWTRLPQGFKNSPTLFNEALHRDLADFRIQHPDLILLQYVDDILLAATSELDCQQGTRALLQTLGDLGYRASAKKAQICQKQVKYLGYLLREGQRWLTEARKETVMGQPVPKTPRQLREFLGTAGFCRLWIPGFAEMAAPLYPLTKPGTLFSWGPDQQKAYQEIKQALLTAPALGLPDLTKPFELFVDEKQGYAKGVLTQKLGPWRRPVAYLSKKLDPVAAGWPPCLRMVAAIAVLTKDAGKLTMGQPLVILAPHAVEALVKQPPDRWLSNARMTHYQAMLLDTDRVQFGPVVALNPATLLPLPEEGAPHDCLEILAETHGTRPDLTDQPIPDADHTWYTDGSSFLQEGQRKAGAAVTTETEVIWAGALPAGTSAQRAELIALTQALKMAEGKRLNVYTDSRYAFATAHIHGEIYRRRGWLTSEGREIKNKSEILALLKALFLPKRLSIIHCLGHQKGDSAEARGNRLADQAAREAAIKTPPDTSTLLAGKRTADGSEFEKRTADGSEFESPKKKAKVE

SEQ ID NO: 2215 - protein, 2096 aa, synthetic construct
MPAAKRVKLDGGDKKYSIGLDIGTNSVGWAVITDEYKVPSKKFKVLGNTDRHSIKKNLIGALLFDSGETAEATRLKRTARRRYTRRKNRICYLQEIFSNEMAKVDDSFFHRLEESFLVEEDKKHERHPIFGNIVDEVAYHEKYPTIYHLRKKLVDSTDKADLRLIYLALAHMIKFRGHFLIEGDLNPDNSDVDKLFIQLVQTYNQLFEENPINASGVDAKAILSARLSKSRRLENLIAQLPGEKKNGLFGNLIALSLGLTPNFKSNFDLAEDAKLQLSKDTYDDDLDNLLAQIGDQYADLFLAAKNLSDAILLSDILRVNTEITKAPLSASMIKRYDEHHQDLTLLKALVRQQLPEKYKEIFFDQSKNGYAGYIDGGASQEEFYKFIKPILEKMDGTEELLVKLNREDLLRKQRTFDNGSIPHQIHLGELHAILRRQEDFYPFLKDNREKIEKILTFRIPYYVGPLARGNSRFAWMTRKSEETITPWNFEEVVDKGASAQSFIERMTNFDKNLPNEKVLPKHSLLYEYFTVYNELTKVKYVTEGMRKPAFLSGEQKKAIVDLLFKTNRKVTVKQLKEDYFKKIECFDSVEISGVEDRFNASLGTYHDLLKIIKDKDFLDNEENEDILEDIVLTLTLFEDREMIEERLKTYAHLFDDKVMKQLKRRRYTGWGRLSRKLINGIRDKQSGKTILDFLKSDGFANRNFMQLIHDDSLTFKEDIQKAQVSGQGDSLHEHIANLAGSPAIKKGILQTVKVVDELVKVMGRHKPENIVIEMARENQTTQKGQKNSRERMKRIEEGIKELGSQILKEHPVENTQLQNEKLYLYYLQNGRDMYVDQELDINRLSDYDVDHIVPQSFLKDDSIDNKVLTRSDKARGKSDNVPSEEVVKKMKNYWRQLLNAKLITQRKFDNLTKAERGGLSELDKAGFIKRQLVETRQITKHVAQILDSRMNTKYDENDKLIREVKVITLKSKLVSDFRKDFQFYKVREINNYHHAHDAYLNAVVGTALIKKYPKLESEFVYGDYKVYDVRKMIAKSEQEIGKATAKYFFYSNIMNFFKTEITLANGEIRKRPLIETNGETGEIVWDKGRDFATVRKVLSMPQVNIVKKTEVQTGGFSKESILPKRNSDKLIARKKDWDPKKYGGFDSPTVAYSVLVVAKVEKGKSKKLKSVKELLGITIMERSSFEKNPIDFLEAKGYKEVKKDLIIKLPKYSLFELENGRKRMLASAGELQKGNELALPSKYVNFLYLASHYEKLKGSPEDNEQKQLFVEQHKHYLDEIIEQISEFSKRVILADANLDKVLSAYNKHRDKPIREQAENIIHLFTLTNLGAPAAFKYFDTTIDRKRYTSTKEVLDATLIHQSITGLYETRIDLSQLGGDGGGSSEAAAKPAPGGTLGIEDEYRLHETSTEPDVSLGSTWLSDFPQAWAETGGMGLAVRQAPLIIPLKATSTPVSIQQYPMSHEARLGIKPHIQRLLDQGILVPCQSPWNTPLLPVKKPGTNDYRPVQDLREVNKRVEDIHPTVPNPYNLLSGLPPSHQWYTVLDLKDAFFCLRLHPTSQPLFAFEWRDPGMGISGQLTWTRLPQGFKNSPTLFNEALHRDLADFRIQHPDLILLQYVDDILLAATSELDCQQGTRALLQTLGDLGYRASAKKAQICQKQVKYLGYLLREGQRWLTEARKETVMGQPVPKTPRQLREFLGTAGFCRLWIPGFAEMAAPLYPLTKPGTLFSWGPDQQKAYQEIKQALLTAPALGLPDLTKPFELFVDEKQGYAKGVLTQKLGPWRRPVAYLSKKLDPVAAGWPPCLRMVAAIAVLTKDAGKLTMGQPLVILAPHAVEALVKQPPDRWLSNARMTHYQAMLLDTDRVQFGPVVALNPATLLPLPEEGAPHDCLEILAETHGTRPDLTDQPIPDADHTWYTDGSSFLQEGQRKAGAAVTTETEVIWAGALPAGTSAQRAELIALTQALKMAEGKRLNVYTDSRYAFATAHIHGEIYRRRGWLTSEGREIKNKSEILALLKALFLPKRLSIIHCLGHQKGDSAEARGNRLADQAAREAAIKTPPDTSTLLAGKRTADGSEFEKRTADGSEFESPKKKAKVE

SEQ ID NO: 2216 - protein, 2091 aa, synthetic construct
MPAAKRVKLDGGDKKYSIGLDIGTNSVGWAVITDEYKVPSKKFKVLGNTDRHSIKKNLIGALLFDSGETAEATRLKRTARRRYTRRKNRICYLQEIFSNEMAKVDDSFFHRLEESFLVEEDKKHERHPIFGNIVDEVAYHEKYPTIYHLRKKLVDSTDKADLRLIYLALAHMIKFRGHFLIEGDLNPDNSDVDKLFIQLVQTYNQLFEENPINASGVDAKAILSARLSKSRRLENLIAQLPGEKKNGLFGNLIALSLGLTPNFKSNFDLAEDAKLQLSKDTYDDDLDNLLAQIGDQYADLFLAAKNLSDAILLSDILRVNTEITKAPLSASMIKRYDEHHQDLTLLKALVRQQLPEKYKEIFFDQSKNGYAGYIDGGASQEEFYKFIKPILEKMDGTEELLVKLNREDLLRKQRTFDNGSIPHQIHLGELHAILRRQEDFYPFLKDNREKIEKILTFRIPYYVGPLARGNSRFAWMTRKSEETITPWNFEEVVDKGASAQSFIERMTNFDKNLPNEKVLPKHSLLYEYFTVYNELTKVKYVTEGMRKPAFLSGEQKKAIVDLLFKTNRKVTVKQLKEDYFKKIECFDSVEISGVEDRFNASLGTYHDLLKIIKDKDFLDNEENEDILEDIVLTLTLFEDREMIEERLKTYAHLFDDKVMKQLKRRRYTGWGRLSRKLINGIRDKQSGKTILDFLKSDGFANRNFMQLIHDDSLTFKEDIQKAQVSGQGDSLHEHIANLAGSPAIKKGILQTVKVVDELVKVMGRHKPENIVIEMARENQTTQKGQKNSRERMKRIEEGIKELGSQILKEHPVENTQLQNEKLYLYYLQNGRDMYVDQELDINRLSDYDVDHIVPQSFLKDDSIDNKVLTRSDKARGKSDNVPSEEVVKKMKNYWRQLLNAKLITQRKFDNLTKAERGGLSELDKAGFIKRQLVETRQITKHVAQILDSRMNTKYDENDKLIREVKVITLKSKLVSDFRKDFQFYKVREINNYHHAHDAYLNAVVGTALIKKYPKLESEFVYGDYKVYDVRKMIAKSEQEIGKATAKYFFYSNIMNFFKTEITLANGEIRKRPLIETNGETGEIVWDKGRDFATVRKVLSMPQVNIVKKTEVQTGGFSKESILPKRNSDKLIARKKDWDPKKYGGFDSPTVAYSVLVVAKVEKGKSKKLKSVKELLGITIMERSSFEKNPIDFLEAKGYKEVKKDLIIKLPKYSLFELENGRKRMLASAGELQKGNELALPSKYVNFLYLASHYEKLKGSPEDNEQKQLFVEQHKHYLDEIIEQISEFSKRVILADANLDKVLSAYNKHRDKPIREQAENIIHLFTLTNLGAPAAFKYFDTTIDRKRYTSTKEVLDATLIHQSITGLYETRIDLSQLGGDGGGGGGGGGGTLGIEDEYRLHETSTEPDVSLGSTWLSDFPQAWAETGGMGLAVRQAPLIIPLKATSTPVSIQQYPMSHEARLGIKPHIQRLLDQGILVPCQSPWNTPLLPVKKPGTNDYRPVQDLREVNKRVEDIHPTVPNPYNLLSGLPPSHQWYTVLDLKDAFFCLRLHPTSQPLFAFEWRDPGMGISGQLTWTRLPQGFKNSPTLFNEALHRDLADFRIQHPDLILLQYVDDILLAATSELDCQQGTRALLQTLGDLGYRASAKKAQICQKQVKYLGYLLREGQRWLTEARKETVMGQPVPKTPRQLREFLGTAGFCRLWIPGFAEMAAPLYPLTKPGTLFSWGPDQQKAYQEIKQALLTAPALGLPDLTKPFELFVDEKQGYAKGVLTQKLGPWRRPVAYLSKKLDPVAAGWPPCLRMVAAIAVLTKDAGKLTMGQPLVILAPHAVEALVKQPPDRWLSNARMTHYQAMLLDTDRVQFGPVVALNPATLLPLPEEGAPHDCLEILAETHGTRPDLTDQPIPDADHTWYTDGSSFLQEGQRKAGAAVTTETEVIWAGALPAGTSAQRAELIALTQALKMAEGKRLNVYTDSRYAFATAHIHGEIYRRRGWLTSEGREIKNKSEILALLKALFLPKRLSIIHCLGHQKGDSAEARGNRLADQAAREAAIKTPPDTSTLLAGKRTADGSEFEKRTADGSEFESPKKKAKVE

SEQ ID NO: 2217 - protein, 2094 aa, synthetic construct
MPAAKRVKLDGGDKKYSIGLDIGTNSVGWAVITDEYKVPSKKFKVLGNTDRHSIKKNLIGALLFDSGETAEATRLKRTARRRYTRRKNRICYLQEIFSNEMAKVDDSFFHRLEESFLVEEDKKHERHPIFGNIVDEVAYHEKYPTIYHLRKKLVDSTDKADLRLIYLALAHMIKFRGHFLIEGDLNPDNSDVDKLFIQLVQTYNQLFEENPINASGVDAKAILSARLSKSRRLENLIAQLPGEKKNGLFGNLIALSLGLTPNFKSNFDLAEDAKLQLSKDTYDDDLDNLLAQIGDQYADLFLAAKNLSDAILLSDILRVNTEITKAPLSASMIKRYDEHHQDLTLLKALVRQQLPEKYKEIFFDQSKNGYAGYIDGGASQEEFYKFIKPILEKMDGTEELLVKLNREDLLRKQRTFDNGSIPHQIHLGELHAILRRQEDFYPFLKDNREKIEKILTFRIPYYVGPLARGNSRFAWMTRKSEETITPWNFEEVVDKGASAQSFIERMTNFDKNLPNEKVLPKHSLLYEYFTVYNELTKVKYVTEGMRKPAFLSGEQKKAIVDLLFKTNRKVTVKQLKEDYFKKIECFDSVEISGVEDRFNASLGTYHDLLKIIKDKDFLDNEENEDILEDIVLTLTLFEDREMIEERLKTYAHLFDDKVMKQLKRRRYTGWGRLSRKLINGIRDKQSGKTILDFLKSDGFANRNFMQLIHDDSLTFKEDIQKAQVSGQGDSLHEHIANLAGSPAIKKGILQTVKVVDELVKVMGRHKPENIVIEMARENQTTQKGQKNSRERMKRIEEGIKELGSQILKEHPVENTQLQNEKLYLYYLQNGRDMYVDQELDINRLSDYDVDHIVPQSFLKDDSIDNKVLTRSDKARGKSDNVPSEEVVKKMKNYWRQLLNAKLITQRKFDNLTKAERGGLSELDKAGFIKRQLVETRQITKHVAQILDSRMNTKYDENDKLIREVKVITLKSKLVSDFRKDFQFYKVREINNYHHAHDAYLNAVVGTALIKKYPKLESEFVYGDYKVYDVRKMIAKSEQEIGKATAKYFFYSNIMNFFKTEITLANGEIRKRPLIETNGETGEIVWDKGRDFATVRKVLSMPQVNIVKKTEVQTGGFSKESILPKRNSDKLIARKKDWDPKKYGGFDSPTVAYSVLVVAKVEKGKSKKLKSVKELLGITIMERSSFEKNPIDFLEAKGYKEVKKDLIIKLPKYSLFELENGRKRMLASAGELQKGNELALPSKYVNFLYLASHYEKLKGSPEDNEQKQLFVEQHKHYLDEIIEQISEFSKRVILADANLDKVLSAYNKHRDKPIREQAENIIHLFTLTNLGAPAAFKYFDTTIDRKRYTSTKEVLDATLIHQSITGLYETRIDLSQLGGDGGGGSGSSPAPGGTLGIEDEYRLHETSTEPDVSLGSTWLSDFPQAWAETGGMGLAVRQAPLIIPLKATSTPVSIQQYPMSHEARLGIKPHIQRLLDQGILVPCQSPWNTPLLPVKKPGTNDYRPVQDLREVNKRVEDIHPTVPNPYNLLSGLPPSHQWYTVLDLKDAFFCLRLHPTSQPLFAFEWRDPGMGISGQLTWTRLPQGFKNSPTLFNEALHRDLADFRIQHPDLILLQYVDDILLAATSELDCQQGTRALLQTLGDLGYRASAKKAQICQKQVKYLGYLLREGQRWLTEARKETVMGQPVPKTPRQLREFLGTAGFCRLWIPGFAEMAAPLYPLTKPGTLFSWGPDQQKAYQEIKQALLTAPALGLPDLTKPFELFVDEKQGYAKGVLTQKLGPWRRPVAYLSKKLDPVAAGWPPCLRMVAAIAVLTKDAGKLTMGQPLVILAPHAVEALVKQPPDRWLSNARMTHYQAMLLDTDRVQFGPVVALNPATLLPLPEEGAPHDCLEILAETHGTRPDLTDQPIPDADHTWYTDGSSFLQEGQRKAGAAVTTETEVIWAGALPAGTSAQRAELIALTQALKMAEGKRLNVYTDSRYAFATAHIHGEIYRRRGWLTSEGREIKNKSEILALLKALFLPKRLSIIHCLGHQKGDSAEARGNRLADQAAREAAIKTPPDTSTLLAGKRTADGSEFEKRTADGSEFESPKKKAKVE

SEQ ID NO: 2218 - protein, 2096 aa, synthetic construct
MPAAKRVKLDGGDKKYSIGLDIGTNSVGWAVITDEYKVPSKKFKVLGNTDRHSIKKNLIGALLFDSGETAEATRLKRTARRRYTRRKNRICYLQEIFSNEMAKVDDSFFHRLEESFLVEEDKKHERHPIFGNIVDEVAYHEKYPTIYHLRKKLVDSTDKADLRLIYLALAHMIKFRGHFLIEGDLNPDNSDVDKLFIQLVQTYNQLFEENPINASGVDAKAILSARLSKSRRLENLIAQLPGEKKNGLFGNLIALSLGLTPNFKSNFDLAEDAKLQLSKDTYDDDLDNLLAQIGDQYADLFLAAKNLSDAILLSDILRVNTEITKAPLSASMIKRYDEHHQDLTLLKALVRQQLPEKYKEIFFDQSKNGYAGYIDGGASQEEFYKFIKPILEKMDGTEELLVKLNREDLLRKQRTFDNGSIPHQIHLGELHAILRRQEDFYPFLKDNREKIEKILTFRIPYYVGPLARGNSRFAWMTRKSEETITPWNFEEVVDKGASAQSFIERMTNFDKNLPNEKVLPKHSLLYEYFTVYNELTKVKYVTEGMRKPAFLSGEQKKAIVDLLFKTNRKVTVKQLKEDYFKKIECFDSVEISGVEDRFNASLGTYHDLLKIIKDKDFLDNEENEDILEDIVLTLTLFEDREMIEERLKTYAHLFDDKVMKQLKRRRYTGWGRLSRKLINGIRDKQSGKTILDFLKSDGFANRNFMQLIHDDSLTFKEDIQKAQVSGQGDSLHEHIANLAGSPAIKKGILQTVKVVDELVKVMGRHKPENIVIEMARENQTTQKGQKNSRERMKRIEEGIKELGSQILKEHPVENTQLQNEKLYLYYLQNGRDMYVDQELDINRLSDYDVDHIVPQSFLKDDSIDNKVLTRSDKARGKSDNVPSEEVVKKMKNYWRQLLNAKLITQRKFDNLTKAERGGLSELDKAGFIKRQLVETRQITKHVAQILDSRMNTKYDENDKLIREVKVITLKSKLVSDFRKDFQFYKVREINNYHHAHDAYLNAVVGTALIKKYPKLESEFVYGDYKVYDVRKMIAKSEQEIGKATAKYFFYSNIMNFFKTEITLANGEIRKRPLIETNGETGEIVWDKGRDFATVRKVLSMPQVNIVKKTEVQTGGFSKESILPKRNSDKLIARKKDWDPKKYGGFDSPTVAYSVLVVAKVEKGKSKKLKSVKELLGITIMERSSFEKNPIDFLEAKGYKEVKKDLIIKLPKYSLFELENGRKRMLASAGELQKGNELALPSKYVNFLYLASHYEKLKGSPEDNEQKQLFVEQHKHYLDEIIEQISEFSKRVILADANLDKVLSAYNKHRDKPIREQAENIIHLFTLTNLGAPAAFKYFDTTIDRKRYTSTKEVLDATLIHQSITGLYETRIDLSQLGGDGGEAAAKGGSGGGGGTLGIEDEYRLHETSTEPDVSLGSTWLSDFPQAWAETGGMGLAVRQAPLIIPLKATSTPVSIQQYPMSHEARLGIKPHIQRLLDQGILVPCQSPWNTPLLPVKKPGTNDYRPVQDLREVNKRVEDIHPTVPNPYNLLSGLPPSHQWYTVLDLKDAFFCLRLHPTSQPLFAFEWRDPGMGISGQLTWTRLPQGFKNSPTLFNEALHRDLADFRIQHPDLILLQYVDDILLAATSELDCQQGTRALLQTLGDLGYRASAKKAQICQKQVKYLGYLLREGQRWLTEARKETVMGQPVPKTPRQLREFLGTAGFCRLWIPGFAEMAAPLYPLTKPGTLFSWGPDQQKAYQEIKQALLTAPALGLPDLTKPFELFVDEKQGYAKGVLTQKLGPWRRPVAYLSKKLDPVAAGWPPCLRMVAAIAVLTKDAGKLTMGQPLVILAPHAVEALVKQPPDRWLSNARMTHYQAMLLDTDRVQFGPVVALNPATLLPLPEEGAPHDCLEILAETHGTRPDLTDQPIPDADHTWYTDGSSFLQEGQRKAGAAVTTETEVIWAGALPAGTSAQRAELIALTQALKMAEGKRLNVYTDSRYAFATAHIHGEIYRRRGWLTSEGREIKNKSEILALLKALFLPKRLSIIHCLGHQKGDSAEARGNRLADQAAREAAIKTPPDTSTLLAGKRTADGSEFEKRTADGSEFESPKKKAKVE

SEQ ID NO: 2219 - protein, 2094 aa, synthetic construct
MPAAKRVKLDGGDKKYSIGLDIGTNSVGWAVITDEYKVPSKKFKVLGNTDRHSIKKNLIGALLFDSGETAEATRLKRTARRRYTRRKNRICYLQEIFSNEMAKVDDSFFHRLEESFLVEEDKKHERHPIFGNIVDEVAYHEKYPTIYHLRKKLVDSTDKADLRLIYLALAHMIKFRGHFLIEGDLNPDNSDVDKLFIQLVQTYNQLFEENPINASGVDAKAILSARLSKSRRLENLIAQLPGEKKNGLFGNLIALSLGLTPNFKSNFDLAEDAKLQLSKDTYDDDLDNLLAQIGDQYADLFLAAKNLSDAILLSDILRVNTEITKAPLSASMIKRYDEHHQDLTLLKALVRQQLPEKYKEIFFDQSKNGYAGYIDGGASQEEFYKFIKPILEKMDGTEELLVKLNREDLLRKQRTFDNGSIPHQIHLGELHAILRRQEDFYPFLKDNREKIEKILTFRIPYYVGPLARGNSRFAWMTRKSEETITPWNFEEVVDKGASAQSFIERMTNFDKNLPNEKVLPKHSLLYEYFTVYNELTKVKYVTEGMRKPAFLSGEQKKAIVDLLFKTNRKVTVKQLKEDYFKKIECFDSVEISGVEDRFNASLGTYHDLLKIIKDKDFLDNEENEDILEDIVLTLTLFEDREMIEERLKTYAHLFDDKVMKQLKRRRYTGWGRLSRKLINGIRDKQSGKTILDFLKSDGFANRNFMQLIHDDSLTFKEDIQKAQVSGQGDSLHEHIANLAGSPAIKKGILQTVKVVDELVKVMGRHKPENIVIEMARENQTTQKGQKNSRERMKRIEEGIKELGSQILKEHPVENTQLQNEKLYLYYLQNGRDMYVDQELDINRLSDYDVDHIVPQSFLKDDSIDNKVLTRSDKARGKSDNVPSEEVVKKMKNYWRQLLNAKLITQRKFDNLTKAERGGLSELDKAGFIKRQLVETRQITKHVAQILDSRMNTKYDENDKLIREVKVITLKSKLVSDFRKDFQFYKVREINNYHHAHDAYLNAVVGTALIKKYPKLESEFVYGDYKVYDVRKMIAKSEQEIGKATAKYFFYSNIMNFFKTEITLANGEIRKRPLIETNGETGEIVWDKGRDFATVRKVLSMPQVNIVKKTEVQTGGFSKESILPKRNSDKLIARKKDWDPKKYGGFDSPTVAYSVLVVAKVEKGKSKKLKSVKELLGITIMERSSFEKNPIDFLEAKGYKEVKKDLIIKLPKYSLFELENGRKRMLASAGELQKGNELALPSKYVNFLYLASHYEKLKGSPEDNEQKQLFVEQHKHYLDEIIEQISEFSKRVILADANLDKVLSAYNKHRDKPIREQAENIIHLFTLTNLGAPAAFKYFDTTIDRKRYTSTKEVLDATLIHQSITGLYETRIDLSQLGGDGGGSSGSSGSSGGTLGIEDEYRLHETSTEPDVSLGSTWLSDFPQAWAETGGMGLAVRQAPLIIPLKATSTPVSIQQYPMSHEARLGIKPHIQRLLDQGILVPCQSPWNTPLLPVKKPGTNDYRPVQDLREVNKRVEDIHPTVPNPYNLLSGLPPSHQWYTVLDLKDAFFCLRLHPTSQPLFAFEWRDPGMGISGQLTWTRLPQGFKNSPTLFNEALHRDLADFRIQHPDLILLQYVDDILLAATSELDCQQGTRALLQTLGDLGYRASAKKAQICQKQVKYLGYLLREGQRWLTEARKETVMGQPVPKTPRQLREFLGTAGFCRLWIPGFAEMAAPLYPLTKPGTLFSWGPDQQKAYQEIKQALLTAPALGLPDLTKPFELFVDEKQGYAKGVLTQKLGPWRRPVAYLSKKLDPVAAGWPPCLRMVAAIAVLTKDAGKLTMGQPLVILAPHAVEALVKQPPDRWLSNARMTHYQAMLLDTDRVQFGPVVALNPATLLPLPEEGAPHDCLEILAETHGTRPDLTDQPIPDADHTWYTDGSSFLQEGQRKAGAAVTTETEVIWAGALPAGTSAQRAELIALTQALKMAEGKRLNVYTDSRYAFATAHIHGEIYRRRGWLTSEGREIKNKSEILALLKALFLPKRLSIIHCLGHQKGDSAEARGNRLADQAAREAAIKTPPDTSTLLAGKRTADGSEFEKRTADGSEFESPKKKAKVE

SEQ ID NO: 2220 - protein, 2097 aa, synthetic construct
MPAAKRVKLDGGDKKYSIGLDIGTNSVGWAVITDEYKVPSKKFKVLGNTDRHSIKKNLIGALLFDSGETAEATRLKRTARRRYTRRKNRICYLQEIFSNEMAKVDDSFFHRLEESFLVEEDKKHERHPIFGNIVDEVAYHEKYPTIYHLRKKLVDSTDKADLRLIYLALAHMIKFRGHFLIEGDLNPDNSDVDKLFIQLVQTYNQLFEENPINASGVDAKAILSARLSKSRRLENLIAQLPGEKKNGLFGNLIALSLGLTPNFKSNFDLAEDAKLQLSKDTYDDDLDNLLAQIGDQYADLFLAAKNLSDAILLSDILRVNTEITKAPLSASMIKRYDEHHQDLTLLKALVRQQLPEKYKEIFFDQSKNGYAGYIDGGASQEEFYKFIKPILEKMDGTEELLVKLNREDLLRKQRTFDNGSIPHQIHLGELHAILRRQEDFYPFLKDNREKIEKILTFRIPYYVGPLARGNSRFAWMTRKSEETITPWNFEEVVDKGASAQSFIERMTNFDKNLPNEKVLPKHSLLYEYFTVYNELTKVKYVTEGMRKPAFLSGEQKKAIVDLLFKTNRKVTVKQLKEDYFKKIECFDSVEISGVEDRFNASLGTYHDLLKIIKDKDFLDNEENEDILEDIVLTLTLFEDREMIEERLKTYAHLFDDKVMKQLKRRRYTGWGRLSRKLINGIRDKQSGKTILDFLKSDGFANRNFMQLIHDDSLTFKEDIQKAQVSGQGDSLHEHIANLAGSPAIKKGILQTVKVVDELVKVMGRHKPENIVIEMARENQTTQKGQKNSRERMKRIEEGIKELGSQILKEHPVENTQLQNEKLYLYYLQNGRDMYVDQELDINRLSDYDVDHIVPQSFLKDDSIDNKVLTRSDKARGKSDNVPSEEVVKKMKNYWRQLLNAKLITQRKFDNLTKAERGGLSELDKAGFIKRQLVETRQITKHVAQILDSRMNTKYDENDKLIREVKVITLKSKLVSDFRKDFQFYKVREINNYHHAHDAYLNAVVGTALIKKYPKLESEFVYGDYKVYDVRKMIAKSEQEIGKATAKYFFYSNIMNFFKTEITLANGEIRKRPLIETNGETGEIVWDKGRDFATVRKVLSMPQVNIVKKTEVQTGGFSKESILPKRNSDKLIARKKDWDPKKYGGFDSPTVAYSVLVVAKVEKGKSKKLKSVKELLGITIMERSSFEKNPIDFLEAKGYKEVKKDLIIKLPKYSLFELENGRKRMLASAGELQKGNELALPSKYVNFLYLASHYEKLKGSPEDNEQKQLFVEQHKHYLDEIIEQISEFSKRVILADANLDKVLSAYNKHRDKPIREQAENIIHLFTLTNLGAPAAFKYFDTTIDRKRYTSTKEVLDATLIHQSITGLYETRIDLSQLGGDGGGSAGSAAGSGEFGGTLGIEDEYRLHETSTEPDVSLGSTWLSDFPQAWAETGGMGLAVRQAPLIIPLKATSTPVSIQQYPMSHEARLGIKPHIQRLLDQGILVPCQSPWNTPLLPVKKPGTNDYRPVQDLREVNKRVEDIHPTVPNPYNLLSGLPPSHQWYTVLDLKDAFFCLRLHPTSQPLFAFEWRDPGMGISGQLTWTRLPQGFKNSPTLFNEALHRDLADFRIQHPDLILLQYVDDILLAATSELDCQQGTRALLQTLGDLGYRASAKKAQICQKQVKYLGYLLREGQRWLTEARKETVMGQPVPKTPRQLREFLGTAGFCRLWIPGFAEMAAPLYPLTKPGTLFSWGPDQQKAYQEIKQALLTAPALGLPDLTKPFELFVDEKQGYAKGVLTQKLGPWRRPVAYLSKKLDPVAAGWPPCLRMVAAIAVLTKDAGKLTMGQPLVILAPHAVEALVKQPPDRWLSNARMTHYQAMLLDTDRVQFGPVVALNPATLLPLPEEGAPHDCLEILAETHGTRPDLTDQPIPDADHTWYTDGSSFLQEGQRKAGAAVTTETEVIWAGALPAGTSAQRAELIALTQALKMAEGKRLNVYTDSRYAFATAHIHGEIYRRRGWLTSEGREIKNKSEILALLKALFLPKRLSIIHCLGHQKGDSAEARGNRLADQAAREAAIKTPPDTSTLLAGKRTADGSEFEKRTADGSEFESPKKKAKVE

SEQ ID NO: 2221 - protein, 2090 aa, synthetic construct
MPAAKRVKLDGGDKKYSIGLDIGTNSVGWAVITDEYKVPSKKFKVLGNTDRHSIKKNLIGALLFDSGETAEATRLKRTARRRYTRRKNRICYLQEIFSNEMAKVDDSFFHRLEESFLVEEDKKHERHPIFGNIVDEVAYHEKYPTIYHLRKKLVDSTDKADLRLIYLALAHMIKFRGHFLIEGDLNPDNSDVDKLFIQLVQTYNQLFEENPINASGVDAKAILSARLSKSRRLENLIAQLPGEKKNGLFGNLIALSLGLTPNFKSNFDLAEDAKLQLSKDTYDDDLDNLLAQIGDQYADLFLAAKNLSDAILLSDILRVNTEITKAPLSASMIKRYDEHHQDLTLLKALVRQQLPEKYKEIFFDQSKNGYAGYIDGGASQEEFYKFIKPILEKMDGTEELLVKLNREDLLRKQRTFDNGSIPHQIHLGELHAILRRQEDFYPFLKDNREKIEKILTFRIPYYVGPLARGNSRFAWMTRKSEETITPWNFEEVVDKGASAQSFIERMTNFDKNLPNEKVLPKHSLLYEYFTVYNELTKVKYVTEGMRKPAFLSGEQKKAIVDLLFKTNRKVTVKQLKEDYFKKIECFDSVEISGVEDRFNASLGTYHDLLKIIKDKDFLDNEENEDILEDIVLTLTLFEDREMIEERLKTYAHLFDDKVMKQLKRRRYTGWGRLSRKLINGIRDKQSGKTILDFLKSDGFANRNFMQLIHDDSLTFKEDIQKAQVSGQGDSLHEHIANLAGSPAIKKGILQTVKVVDELVKVMGRHKPENIVIEMARENQTTQKGQKNSRERMKRIEEGIKELGSQILKEHPVENTQLQNEKLYLYYLQNGRDMYVDQELDINRLSDYDVDHIVPQSFLKDDSIDNKVLTRSDKARGKSDNVPSEEVVKKMKNYWRQLLNAKLITQRKFDNLTKAERGGLSELDKAGFIKRQLVETRQITKHVAQILDSRMNTKYDENDKLIREVKVITLKSKLVSDFRKDFQFYKVREINNYHHAHDAYLNAVVGTALIKKYPKLESEFVYGDYKVYDVRKMIAKSEQEIGKATAKYFFYSNIMNFFKTEITLANGEIRKRPLIETNGETGEIVWDKGRDFATVRKVLSMPQVNIVKKTEVQTGGFSKESILPKRNSDKLIARKKDWDPKKYGGFDSPTVAYSVLVVAKVEKGKSKKLKSVKELLGITIMERSSFEKNPIDFLEAKGYKEVKKDLIIKLPKYSLFELENGRKRMLASAGELQKGNELALPSKYVNFLYLASHYEKLKGSPEDNEQKQLFVEQHKHYLDEIIEQISEFSKRVILADANLDKVLSAYNKHRDKPIREQAENIIHLFTLTNLGAPAAFKYFDTTIDRKRYTSTKEVLDATLIHQSITGLYETRIDLSQLGGDGGGGGGGGGTLGIEDEYRLHETSTEPDVSLGSTWLSDFPQAWAETGGMGLAVRQAPLIIPLKATSTPVSIQQYPMSHEARLGIKPHIQRLLDQGILVPCQSPWNTPLLPVKKPGTNDYRPVQDLREVNKRVEDIHPTVPNPYNLLSGLPPSHQWYTVLDLKDAFFCLRLHPTSQPLFAFEWRDPGMGISGQLTWTRLPQGFKNSPTLFNEALHRDLADFRIQHPDLILLQYVDDILLAATSELDCQQGTRALLQTLGDLGYRASAKKAQICQKQVKYLGYLLREGQRWLTEARKETVMGQPVPKTPRQLREFLGTAGFCRLWIPGFAEMAAPLYPLTKPGTLFSWGPDQQKAYQEIKQALLTAPALGLPDLTKPFELFVDEKQGYAKGVLTQKLGPWRRPVAYLSKKLDPVAAGWPPCLRMVAAIAVLTKDAGKLTMGQPLVILAPHAVEALVKQPPDRWLSNARMTHYQAMLLDTDRVQFGPVVALNPATLLPLPEEGAPHDCLEILAETHGTRPDLTDQPIPDADHTWYTDGSSFLQEGQRKAGAAVTTETEVIWAGALPAGTSAQRAELIALTQALKMAEGKRLNVYTDSRYAFATAHIHGEIYRRRGWLTSEGREIKNKSEILALLKALFLPKRLSIIHCLGHQKGDSAEARGNRLADQAAREAAIKTPPDTSTLLAGKRTADGSEFEKRTADGSEFESPKKKAKVE

SEQ ID NO: 2222 - protein, 2094 aa, synthetic construct
MPAAKRVKLDGGDKKYSIGLDIGTNSVGWAVITDEYKVPSKKFKVLGNTDRHSIKKNLIGALLFDSGETAEATRLKRTARRRYTRRKNRICYLQEIFSNEMAKVDDSFFHRLEESFLVEEDKKHERHPIFGNIVDEVAYHEKYPTIYHLRKKLVDSTDKADLRLIYLALAHMIKFRGHFLIEGDLNPDNSDVDKLFIQLVQTYNQLFEENPINASGVDAKAILSARLSKSRRLENLIAQLPGEKKNGLFGNLIALSLGLTPNFKSNFDLAEDAKLQLSKDTYDDDLDNLLAQIGDQYADLFLAAKNLSDAILLSDILRVNTEITKAPLSASMIKRYDEHHQDLTLLKALVRQQLPEKYKEIFFDQSKNGYAGYIDGGASQEEFYKFIKPILEKMDGTEELLVKLNREDLLRKQRTFDNGSIPHQIHLGELHAILRRQEDFYPFLKDNREKIEKILTFRIPYYVGPLARGNSRFAWMTRKSEETITPWNFEEVVDKGASAQSFIERMTNFDKNLPNEKVLPKHSLLYEYFTVYNELTKVKYVTEGMRKPAFLSGEQKKAIVDLLFKTNRKVTVKQLKEDYFKKIECFDSVEISGVEDRFNASLGTYHDLLKIIKDKDFLDNEENEDILEDIVLTLTLFEDREMIEERLKTYAHLFDDKVMKQLKRRRYTGWGRLSRKLINGIRDKQSGKTILDFLKSDGFANRNFMQLIHDDSLTFKEDIQKAQVSGQGDSLHEHIANLAGSPAIKKGILQTVKVVDELVKVMGRHKPENIVIEMARENQTTQKGQKNSRERMKRIEEGIKELGSQILKEHPVENTQLQNEKLYLYYLQNGRDMYVDQELDINRLSDYDVDHIVPQSFLKDDSIDNKVLTRSDKARGKSDNVPSEEVVKKMKNYWRQLLNAKLITQRKFDNLTKAERGGLSELDKAGFIKRQLVETRQITKHVAQILDSRMNTKYDENDKLIREVKVITLKSKLVSDFRKDFQFYKVREINNYHHAHDAYLNAVVGTALIKKYPKLESEFVYGDYKVYDVRKMIAKSEQEIGKATAKYFFYSNIMNFFKTEITLANGEIRKRPLIETNGETGEIVWDKGRDFATVRKVLSMPQVNIVKKTEVQTGGFSKESILPKRNSDKLIARKKDWDPKKYGGFDSPTVAYSVLVVAKVEKGKSKKLKSVKELLGITIMERSSFEKNPIDFLEAKGYKEVKKDLIIKLPKYSLFELENGRKRMLASAGELQKGNELALPSKYVNFLYLASHYEKLKGSPEDNEQKQLFVEQHKHYLDEIIEQISEFSKRVILADANLDKVLSAYNKHRDKPIREQAENIIHLFTLTNLGAPAAFKYFDTTIDRKRYTSTKEVLDATLIHQSITGLYETRIDLSQLGGDGGGSSGGSPAPGGTLGIEDEYRLHETSTEPDVSLGSTWLSDFPQAWAETGGMGLAVRQAPLIIPLKATSTPVSIQQYPMSHEARLGIKPHIQRLLDQGILVPCQSPWNTPLLPVKKPGTNDYRPVQDLREVNKRVEDIHPTVPNPYNLLSGLPPSHQWYTVLDLKDAFFCLRLHPTSQPLFAFEWRDPGMGISGQLTWTRLPQGFKNSPTLFNEALHRDLADFRIQHPDLILLQYVDDILLAATSELDCQQGTRALLQTLGDLGYRASAKKAQICQKQVKYLGYLLREGQRWLTEARKETVMGQPVPKTPRQLREFLGTAGFCRLWIPGFAEMAAPLYPLTKPGTLFSWGPDQQKAYQEIKQALLTAPALGLPDLTKPFELFVDEKQGYAKGVLTQKLGPWRRPVAYLSKKLDPVAAGWPPCLRMVAAIAVLTKDAGKLTMGQPLVILAPHAVEALVKQPPDRWLSNARMTHYQAMLLDTDRVQFGPVVALNPATLLPLPEEGAPHDCLEILAETHGTRPDLTDQPIPDADHTWYTDGSSFLQEGQRKAGAAVTTETEVIWAGALPAGTSAQRAELIALTQALKMAEGKRLNVYTDSRYAFATAHIHGEIYRRRGWLTSEGREIKNKSEILALLKALFLPKRLSIIHCLGHQKGDSAEARGNRLADQAAREAAIKTPPDTSTLLAGKRTADGSEFEKRTADGSEFESPKKKAKVE

SEQ ID NO: 2223 - protein, 2096 aa, synthetic construct
MPAAKRVKLDGGDKKYSIGLDIGTNSVGWAVITDEYKVPSKKFKVLGNTDRHSIKKNLIGALLFDSGETAEATRLKRTARRRYTRRKNRICYLQEIFSNEMAKVDDSFFHRLEESFLVEEDKKHERHPIFGNIVDEVAYHEKYPTIYHLRKKLVDSTDKADLRLIYLALAHMIKFRGHFLIEGDLNPDNSDVDKLFIQLVQTYNQLFEENPINASGVDAKAILSARLSKSRRLENLIAQLPGEKKNGLFGNLIALSLGLTPNFKSNFDLAEDAKLQLSKDTYDDDLDNLLAQIGDQYADLFLAAKNLSDAILLSDILRVNTEITKAPLSASMIKRYDEHHQDLTLLKALVRQQLPEKYKEIFFDQSKNGYAGYIDGGASQEEFYKFIKPILEKMDGTEELLVKLNREDLLRKQRTFDNGSIPHQIHLGELHAILRRQEDFYPFLKDNREKIEKILTFRIPYYVGPLARGNSRFAWMTRKSEETITPWNFEEVVDKGASAQSFIERMTNFDKNLPNEKVLPKHSLLYEYFTVYNELTKVKYVTEGMRKPAFLSGEQKKAIVDLLFKTNRKVTVKQLKEDYFKKIECFDSVEISGVEDRFNASLGTYHDLLKIIKDKDFLDNEENEDILEDIVLTLTLFEDREMIEERLKTYAHLFDDKVMKQLKRRRYTGWGRLSRKLINGIRDKQSGKTILDFLKSDGFANRNFMQLIHDDSLTFKEDIQKAQVSGQGDSLHEHIANLAGSPAIKKGILQTVKVVDELVKVMGRHKPENIVIEMARENQTTQKGQKNSRERMKRIEEGIKELGSQILKEHPVENTQLQNEKLYLYYLQNGRDMYVDQELDINRLSDYDVDHIVPQSFLKDDSIDNKVLTRSDKARGKSDNVPSEEVVKKMKNYWRQLLNAKLITQRKFDNLTKAERGGLSELDKAGFIKRQLVETRQITKHVAQILDSRMNTKYDENDKLIREVKVITLKSKLVSDFRKDFQFYKVREINNYHHAHDAYLNAVVGTALIKKYPKLESEFVYGDYKVYDVRKMIAKSEQEIGKATAKYFFYSNIMNFFKTEITLANGEIRKRPLIETNGETGEIVWDKGRDFATVRKVLSMPQVNIVKKTEVQTGGFSKESILPKRNSDKLIARKKDWDPKKYGGFDSPTVAYSVLVVAKVEKGKSKKLKSVKELLGITIMERSSFEKNPIDFLEAKGYKEVKKDLIIKLPKYSLFELENGRKRMLASAGELQKGNELALPSKYVNFLYLASHYEKLKGSPEDNEQKQLFVEQHKHYLDEIIEQISEFSKRVILADANLDKVLSAYNKHRDKPIREQAENIIHLFTLTNLGAPAAFKYFDTTIDRKRYTSTKEVLDATLIHQSITGLYETRIDLSQLGGDGGEAAAKPAPGGGGGTLNIEDEYRLHETSKEPDVSLGSTWLSDFPQAWAETGGMGLAVRQAPLIIPLKATSTPVSIKQYPMSQEARLGIKPHIQRLLDQGILVPCQSPWNTPLLPVKKPGTNDYRPVQDLREVNKRVEDIHPTVPNPYNLLSGLPPSHQWYTVLDLKDAFFCLRLHPTSQPLFAFEWRDPEMGISGQLTWTRLPQGFKNSPTLFDEALHRDLAGFRIQHPDLILLQYVDDLLLAATSELDCQQGTRALLQTLGDLGYRASAKKAQICQKQVKYLGYLLKEGQRWLTEARKETVMGQPIPKTPRQLREFLGTAGFCRLWIPGFAEMAAPLYPLTKTGTLFNWGPDQQKAFQEIKQALLTAPALGLPDLTKPFELFVDEKQGYAKGVLTQKLGPWRRPVAYLSKKLDPVAAGWPPCLRMVAAIAVLTKDAGKLTMGQPLVILAPHAVEALVKQPPDRWLSNARMTHYQALLLDTDRVQFGPVVALNPATLLPLPEEGLQHDCLDILAEAHGTRSDLMDQPLPDADHTWYTDGSSFLQEGQRKAGAAVTTETEVIWARALPAGTSAQRAELIALTQALKMAEGKKLNVYTDSRYAFATAHIHGEIYRRRGLLTSEGKEIKNKDEILALLKALFLPKRLSIIHCPGHQKGNSAEARGNRMADQAAREVATRETPETSTLLAGKRTADGSEFEKRTADGSEFESPKKKAKVE

SEQ ID NO: 2224 - protein, 2115 aa, synthetic construct
MPAAKRVKLDGGDKKYSIGLDIGTNSVGWAVITDEYKVPSKKFKVLGNTDRHSIKKNLIGALLFDSGETAEATRLKRTARRRYTRRKNRICYLQEIFSNEMAKVDDSFFHRLEESFLVEEDKKHERHPIFGNIVDEVAYHEKYPTIYHLRKKLVDSTDKADLRLIYLALAHMIKFRGHFLIEGDLNPDNSDVDKLFIQLVQTYNQLFEENPINASGVDAKAILSARLSKSRRLENLIAQLPGEKKNGLFGNLIALSLGLTPNFKSNFDLAEDAKLQLSKDTYDDDLDNLLAQIGDQYADLFLAAKNLSDAILLSDILRVNTEITKAPLSASMIKRYDEHHQDLTLLKALVRQQLPEKYKEIFFDQSKNGYAGYIDGGASQEEFYKFIKPILEKMDGTEELLVKLNREDLLRKQRTFDNGSIPHQIHLGELHAILRRQEDFYPFLKDNREKIEKILTFRIPYYVGPLARGNSRFAWMTRKSEETITPWNFEEVVDKGASAQSFIERMTNFDKNLPNEKVLPKHSLLYEYFTVYNELTKVKYVTEGMRKPAFLSGEQKKAIVDLLFKTNRKVTVKQLKEDYFKKIECFDSVEISGVEDRFNASLGTYHDLLKIIKDKDFLDNEENEDILEDIVLTLTLFEDREMIEERLKTYAHLFDDKVMKQLKRRRYTGWGRLSRKLINGIRDKQSGKTILDFLKSDGFANRNFMQLIHDDSLTFKEDIQKAQVSGQGDSLHEHIANLAGSPAIKKGILQTVKVVDELVKVMGRHKPENIVIEMARENQTTQKGQKNSRERMKRIEEGIKELGSQILKEHPVENTQLQNEKLYLYYLQNGRDMYVDQELDINRLSDYDVDHIVPQSFLKDDSIDNKVLTRSDKARGKSDNVPSEEVVKKMKNYWRQLLNAKLITQRKFDNLTKAERGGLSELDKAGFIKRQLVETRQITKHVAQILDSRMNTKYDENDKLIREVKVITLKSKLVSDFRKDFQFYKVREINNYHHAHDAYLNAVVGTALIKKYPKLESEFVYGDYKVYDVRKMIAKSEQEIGKATAKYFFYSNIMNFFKTEITLANGEIRKRPLIETNGETGEIVWDKGRDFATVRKVLSMPQVNIVKKTEVQTGGFSKESILPKRNSDKLIARKKDWDPKKYGGFDSPTVAYSVLVVAKVEKGKSKKLKSVKELLGITIMERSSFEKNPIDFLEAKGYKEVKKDLIIKLPKYSLFELENGRKRMLASAGELQKGNELALPSKYVNFLYLASHYEKLKGSPEDNEQKQLFVEQHKHYLDEIIEQISEFSKRVILADANLDKVLSAYNKHRDKPIREQAENIIHLFTLTNLGAPAAFKYFDTTIDRKRYTSTKEVLDATLIHQSITGLYETRIDLSQLGGDGGGGGGSGGGGSGGGGSGGGGSGGGGSGGGGSGGTLNIEDEYRLHETSKEPDVSLGSTWLSDFPQAWAETGGMGLAVRQAPLIIPLKATSTPVSIKQYPMSQEARLGIKPHIQRLLDQGILVPCQSPWNTPLLPVKKPGTNDYRPVQDLREVNKRVEDIHPTVPNPYNLLSGLPPSHQWYTVLDLKDAFFCLRLHPTSQPLFAFEWRDPEMGISGQLTWTRLPQGFKNSPTLFNEALHRDLAGFRIQHPDLILLQYVDDLLLAATSELDCQQGTRALLQTLGDLGYRASAKKAQICQKQVKYLGYLLKEGQRWLTEARKETVMGQPIPKTPRQLREFLGTAGFCRLWIPGFAEMAAPLYPLTKPGTLFNWGPDQQKAFQEIKQALLTAPALGLPDLTKPFELFVDEKQGYAKGVLTQKLGPWRRPVAYLSKKLDPVAAGWPPCLRMVAAIAVLTKDAGKLTMGQPLVILAPHAVEALVKQPPDRWLSNARMTHYQALLLDTDRVQFGPVVALNPATLLPLPEEGLQHDCLDILAEAHGTRSDLMDQPLPDADHTWYTDGSSFLQEGQRKAGAAVTTETEVIWARALPAGTSAQRAELIALTQALKMAEGKKLNVYTDSRYAFATAHIHGEIYRRRGWLTSEGKEIKNKDEILALLKALFLPKRLSIIHCPGHQKGNSAEARGNRMADQAAREVATRETPETSTLLAGKRTADGSEFEKRTADGSEFESPKKKAKVE

SEQ ID NO: 2225 - protein, 2096 aa, synthetic construct
MPAAKRVKLDGGDKKYSIGLDIGTNSVGWAVITDEYKVPSKKFKVLGNTDRHSIKKNLIGALLFDSGETAEATRLKRTARRRYTRRKNRICYLQEIFSNEMAKVDDSFFHRLEESFLVEEDKKHERHPIFGNIVDEVAYHEKYPTIYHLRKKLVDSTDKADLRLIYLALAHMIKFRGHFLIEGDLNPDNSDVDKLFIQLVQTYNQLFEENPINASGVDAKAILSARLSKSRRLENLIAQLPGEKKNGLFGNLIALSLGLTPNFKSNFDLAEDAKLQLSKDTYDDDLDNLLAQIGDQYADLFLAAKNLSDAILLSDILRVNTEITKAPLSASMIKRYDEHHQDLTLLKALVRQQLPEKYKEIFFDQSKNGYAGYIDGGASQEEFYKFIKPILEKMDGTEELLVKLNREDLLRKQRTFDNGSIPHQIHLGELHAILRRQEDFYPFLKDNREKIEKILTFRIPYYVGPLARGNSRFAWMTRKSEETITPWNFEEVVDKGASAQSFIERMTNFDKNLPNEKVLPKHSLLYEYFTVYNELTKVKYVTEGMRKPAFLSGEQKKAIVDLLFKTNRKVTVKQLKEDYFKKIECFDSVEISGVEDRFNASLGTYHDLLKIIKDKDFLDNEENEDILEDIVLTLTLFEDREMIEERLKTYAHLFDDKVMKQLKRRRYTGWGRLSRKLINGIRDKQSGKTILDFLKSDGFANRNFMQLIHDDSLTFKEDIQKAQVSGQGDSLHEHIANLAGSPAIKKGILQTVKVVDELVKVMGRHKPENIVIEMARENQTTQKGQKNSRERMKRIEEGIKELGSQILKEHPVENTQLQNEKLYLYYLQNGRDMYVDQELDINRLSDYDVDHIVPQSFLKDDSIDNKVLTRSDKARGKSDNVPSEEVVKKMKNYWRQLLNAKLITQRKFDNLTKAERGGLSELDKAGFIKRQLVETRQITKHVAQILDSRMNTKYDENDKLIREVKVITLKSKLVSDFRKDFQFYKVREINNYHHAHDAYLNAVVGTALIKKYPKLESEFVYGDYKVYDVRKMIAKSEQEIGKATAKYFFYSNIMNFFKTEITLANGEIRKRPLIETNGETGEIVWDKGRDFATVRKVLSMPQVNIVKKTEVQTGGFSKESILPKRNSDKLIARKKDWDPKKYGGFDSPTVAYSVLVVAKVEKGKSKKLKSVKELLGITIMERSSFEKNPIDFLEAKGYKEVKKDLIIKLPKYSLFELENGRKRMLASAGELQKGNELALPSKYVNFLYLASHYEKLKGSPEDNEQKQLFVEQHKHYLDEIIEQISEFSKRVILADANLDKVLSAYNKHRDKPIREQAENIIHLFTLTNLGAPAAFKYFDTTIDRKRYTSTKEVLDATLIHQSITGLYETRIDLSQLGGDGGPAPGSSEAAAKGGTLNIEDEYRLHETSKEPDVSLGSTWLSDFPQAWAETGGMGLAVRQAPLIIPLKATSTPVSIKQYPMSQEARLGIKPHIQRLLDQGILVPCQSPWNTPLLPVKKPGTNDYRPVQDLREVNKRVEDIHPTVPNPYNLLSGLPPSHQWYTVLDLKDAFFCLRLHPTSQPLFAFEWRDPEMGISGQLTWTRLPQGFKNSPTLFNEALHRDLAGFRIQHPDLILLQYVDDLLLAATSELDCQQGTRALLQTLGDLGYRASAKKAQICQKQVKYLGYLLKEGQRWLTEARKETVMGQPIPKTPRQLREFLGTAGFCRLWIPGFAEMAAPLYPLTKPGTLFNWGPDQQKAFQEIKQALLTAPALGLPDLTKPFELFVDEKQGYAKGVLTQKLGPWRRPVAYLSKKLDPVAAGWPPCLRMVAAIAVLTKDAGKLTMGQPLVILAPHAVEALVKQPPDRWLSNARMTHYQALLLDTDRVQFGPVVALNPATLLPLPEEGLQHDCLDILAEAHGTRSDLMDQPLPDADHTWYTDGSSFLQEGQRKAGAAVTTETEVIWARALPAGTSAQRAELIALTQALKMAEGKKLNVYTDSRYAFATAHIHGEIYRRRGWLTSEGKEIKNKDEILALLKALFLPKRLSIIHCPGHQKGNSAEARGNRMADQAAREVATRETPETSTLLAGKRTADGSEFEKRTADGSEFESPKKKAKVE

SEQ ID NO: 2226 - protein, 2100 aa, synthetic construct
MPAAKRVKLDGGDKKYSIGLDIGTNSVGWAVITDEYKVPSKKFKVLGNTDRHSIKKNLIGALLFDSGETAEATRLKRTARRRYTRRKNRICYLQEIFSNEMAKVDDSFFHRLEESFLVEEDKKHERHPIFGNIVDEVAYHEKYPTIYHLRKKLVDSTDKADLRLIYLALAHMIKFRGHFLIEGDLNPDNSDVDKLFIQLVQTYNQLFEENPINASGVDAKAILSARLSKSRRLENLIAQLPGEKKNGLFGNLIALSLGLTPNFKSNFDLAEDAKLQLSKDTYDDDLDNLLAQIGDQYADLFLAAKNLSDAILLSDILRVNTEITKAPLSASMIKRYDEHHQDLTLLKALVRQQLPEKYKEIFFDQSKNGYAGYIDGGASQEEFYKFIKPILEKMDGTEELLVKLNREDLLRKQRTFDNGSIPHQIHLGELHAILRRQEDFYPFLKDNREKIEKILTFRIPYYVGPLARGNSRFAWMTRKSEETITPWNFEEVVDKGASAQSFIERMTNFDKNLPNEKVLPKHSLLYEYFTVYNELTKVKYVTEGMRKPAFLSGEQKKAIVDLLFKTNRKVTVKQLKEDYFKKIECFDSVEISGVEDRFNASLGTYHDLLKIIKDKDFLDNEENEDILEDIVLTLTLFEDREMIEERLKTYAHLFDDKVMKQLKRRRYTGWGRLSRKLINGIRDKQSGKTILDFLKSDGFANRNFMQLIHDDSLTFKEDIQKAQVSGQGDSLHEHIANLAGSPAIKKGILQTVKVVDELVKVMGRHKPENIVIEMARENQTTQKGQKNSRERMKRIEEGIKELGSQILKEHPVENTQLQNEKLYLYYLQNGRDMYVDQELDINRLSDYDVDHIVPQSFLKDDSIDNKVLTRSDKARGKSDNVPSEEVVKKMKNYWRQLLNAKLITQRKFDNLTKAERGGLSELDKAGFIKRQLVETRQITKHVAQILDSRMNTKYDENDKLIREVKVITLKSKLVSDFRKDFQFYKVREINNYHHAHDAYLNAVVGTALIKKYPKLESEFVYGDYKVYDVRKMIAKSEQEIGKATAKYFFYSNIMNFFKTEITLANGEIRKRPLIETNGETGEIVWDKGRDFATVRKVLSMPQVNIVKKTEVQTGGFSKESILPKRNSDKLIARKKDWDPKKYGGFDSPTVAYSVLVVAKVEKGKSKKLKSVKELLGITIMERSSFEKNPIDFLEAKGYKEVKKDLIIKLPKYSLFELENGRKRMLASAGELQKGNELALPSKYVNFLYLASHYEKLKGSPEDNEQKQLFVEQHKHYLDEIIEQISEFSKRVILADANLDKVLSAYNKHRDKPIREQAENIIHLFTLTNLGAPAAFKYFDTTIDRKRYTSTKEVLDATLIHQSITGLYETRIDLSQLGGDGGEAAAKGGGGSEAAAKGGTLNIEDEYRLHETSKEPDVSLGSTWLSDFPQAWAETGGMGLAVRQAPLIIPLKATSTPVSIKQYPMSQEARLGIKPHIQRLLDQGILVPCQSPWNTPLLPVKKPGTNDYRPVQDLREVNKRVEDIHPTVPNPYNLLSGLPPSHQWYTVLDLKDAFFCLRLHPTSQPLFAFEWRDPEMGISGQLTWTRLPQGFKNSPTLFNEALHRDLAGFRIQHPDLILLQYVDDLLLAATSELDCQQGTRALLQTLGDLGYRASAKKAQICQKQVKYLGYLLKEGQRWLTEARKETVMGQPIPKTPRQLREFLGTAGFCRLWIPGFAEMAAPLYPLTKPGTLFNWGPDQQKAFQEIKQALLTAPALGLPDLTKPFELFVDEKQGYAKGVLTQKLGPWRRPVAYLSKKLDPVAAGWPPCLRMVAAIAVLTKDAGKLTMGQPLVILAPHAVEALVKQPPDRWLSNARMTHYQALLLDTDRVQFGPVVALNPATLLPLPEEGLQHDCLDILAEAHGTRSDLMDQPLPDADHTWYTDGSSFLQEGQRKAGAAVTTETEVIWARALPAGTSAQRAELIALTQALKMAEGKKLNVYTDSRYAFATAHIHGEIYRRRGWLTSEGKEIKNKDEILALLKALFLPKRLSIIHCPGHQKGNSAEARGNRMADQAAREVATRETPETSTLLAGKRTADGSEFEKRTADGSEFESPKKKAKVE

SEQ ID NO: 2227 - protein, 2091 aa, synthetic construct
MPAAKRVKLDGGDKKYSIGLDIGTNSVGWAVITDEYKVPSKKFKVLGNTDRHSIKKNLIGALLFDSGETAEATRLKRTARRRYTRRKNRICYLQEIFSNEMAKVDDSFFHRLEESFLVEEDKKHERHPIFGNIVDEVAYHEKYPTIYHLRKKLVDSTDKADLRLIYLALAHMIKFRGHFLIEGDLNPDNSDVDKLFIQLVQTYNQLFEENPINASGVDAKAILSARLSKSRRLENLIAQLPGEKKNGLFGNLIALSLGLTPNFKSNFDLAEDAKLQLSKDTYDDDLDNLLAQIGDQYADLFLAAKNLSDAILLSDILRVNTEITKAPLSASMIKRYDEHHQDLTLLKALVRQQLPEKYKEIFFDQSKNGYAGYIDGGASQEEFYKFIKPILEKMDGTEELLVKLNREDLLRKQRTFDNGSIPHQIHLGELHAILRRQEDFYPFLKDNREKIEKILTFRIPYYVGPLARGNSRFAWMTRKSEETITPWNFEEVVDKGASAQSFIERMTNFDKNLPNEKVLPKHSLLYEYFTVYNELTKVKYVTEGMRKPAFLSGEQKKAIVDLLFKTNRKVTVKQLKEDYFKKIECFDSVEISGVEDRFNASLGTYHDLLKIIKDKDFLDNEENEDILEDIVLTLTLFEDREMIEERLKTYAHLFDDKVMKQLKRRRYTGWGRLSRKLINGIRDKQSGKTILDFLKSDGFANRNFMQLIHDDSLTFKEDIQKAQVSGQGDSLHEHIANLAGSPAIKKGILQTVKVVDELVKVMGRHKPENIVIEMARENQTTQKGQKNSRERMKRIEEGIKELGSQILKEHPVENTQLQNEKLYLYYLQNGRDMYVDQELDINRLSDYDVDHIVPQSFLKDDSIDNKVLTRSDKARGKSDNVPSEEVVKKMKNYWRQLLNAKLITQRKFDNLTKAERGGLSELDKAGFIKRQLVETRQITKHVAQILDSRMNTKYDENDKLIREVKVITLKSKLVSDFRKDFQFYKVREINNYHHAHDAYLNAVVGTALIKKYPKLESEFVYGDYKVYDVRKMIAKSEQEIGKATAKYFFYSNIMNFFKTEITLANGEIRKRPLIETNGETGEIVWDKGRDFATVRKVLSMPQVNIVKKTEVQTGGFSKESILPKRNSDKLIARKKDWDPKKYGGFDSPTVAYSVLVVAKVEKGKSKKLKSVKELLGITIMERSSFEKNPIDFLEAKGYKEVKKDLIIKLPKYSLFELENGRKRMLASAGELQKGNELALPSKYVNFLYLASHYEKLKGSPEDNEQKQLFVEQHKHYLDEIIEQISEFSKRVILADANLDKVLSAYNKHRDKPIREQAENIIHLFTLTNLGAPAAFKYFDTTIDRKRYTSTKEVLDATLIHQSITGLYETRIDLSQLGGDGGGSSGSSGGTLNIEDEYRLHETSKEPDVSLGSTWLSDFPQAWAETGGMGLAVRQAPLIIPLKATSTPVSIKQYPMSQEARLGIKPHIQRLLDQGILVPCQSPWNTPLLPVKKPGTNDYRPVQDLREVNKRVEDIHPTVPNPYNLLSGLPPSHQWYTVLDLKDAFFCLRLHPTSQPLFAFEWRDPEMGISGQLTWTRLPQGFKNSPTLFNEALHRDLAGFRIQHPDLILLQYVDDLLLAATSELDCQQGTRALLQTLGDLGYRASAKKAQICQKQVKYLGYLLKEGQRWLTEARKETVMGQPIPKTPRQLREFLGTAGFCRLWIPGFAEMAAPLYPLTKPGTLFNWGPDQQKAFQEIKQALLTAPALGLPDLTKPFELFVDEKQGYAKGVLTQKLGPWRRPVAYLSKKLDPVAAGWPPCLRMVAAIAVLTKDAGKLTMGQPLVILAPHAVEALVKQPPDRWLSNARMTHYQALLLDTDRVQFGPVVALNPATLLPLPEEGLQHDCLDILAEAHGTRSDLMDQPLPDADHTWYTDGSSFLQEGQRKAGAAVTTETEVIWARALPAGTSAQRAELIALTQALKMAEGKKLNVYTDSRYAFATAHIHGEIYRRRGWLTSEGKEIKNKDEILALLKALFLPKRLSIIHCPGHQKGNSAEARGNRMADQAAREVATRETPETSTLLAGKRTADGSEFEKRTADGSEFESPKKKAKVE

SEQ ID NO: 2228 - protein, 2097 aa, synthetic construct
MPAAKRVKLDGGDKKYSIGLDIGTNSVGWAVITDEYKVPSKKFKVLGNTDRHSIKKNLIGALLFDSGETAEATRLKRTARRRYTRRKNRICYLQEIFSNEMAKVDDSFFHRLEESFLVEEDKKHERHPIFGNIVDEVAYHEKYPTIYHLRKKLVDSTDKADLRLIYLALAHMIKFRGHFLIEGDLNPDNSDVDKLFIQLVQTYNQLFEENPINASGVDAKAILSARLSKSRRLENLIAQLPGEKKNGLFGNLIALSLGLTPNFKSNFDLAEDAKLQLSKDTYDDDLDNLLAQIGDQYADLFLAAKNLSDAILLSDILRVNTEITKAPLSASMIKRYDEHHQDLTLLKALVRQQLPEKYKEIFFDQSKNGYAGYIDGGASQEEFYKFIKPILEKMDGTEELLVKLNREDLLRKQRTFDNGSIPHQIHLGELHAILRRQEDFYPFLKDNREKIEKILTFRIPYYVGPLARGNSRFAWMTRKSEETITPWNFEEVVDKGASAQSFIERMTNFDKNLPNEKVLPKHSLLYEYFTVYNELTKVKYVTEGMRKPAFLSGEQKKAIVDLLFKTNRKVTVKQLKEDYFKKIECFDSVEISGVEDRFNASLGTYHDLLKIIKDKDFLDNEENEDILEDIVLTLTLFEDREMIEERLKTYAHLFDDKVMKQLKRRRYTGWGRLSRKLINGIRDKQSGKTILDFLKSDGFANRNFMQLIHDDSLTFKEDIQKAQVSGQGDSLHEHIANLAGSPAIKKGILQTVKVVDELVKVMGRHKPENIVIEMARENQTTQKGQKNSRERMKRIEEGIKELGSQILKEHPVENTQLQNEKLYLYYLQNGRDMYVDQELDINRLSDYDVDHIVPQSFLKDDSIDNKVLTRSDKARGKSDNVPSEEVVKKMKNYWRQLLNAKLITQRKFDNLTKAERGGLSELDKAGFIKRQLVETRQITKHVAQILDSRMNTKYDENDKLIREVKVITLKSKLVSDFRKDFQFYKVREINNYHHAHDAYLNAVVGTALIKKYPKLESEFVYGDYKVYDVRKMIAKSEQEIGKATAKYFFYSNIMNFFKTEITLANGEIRKRPLIETNGETGEIVWDKGRDFATVRKVLSMPQVNIVKKTEVQTGGFSKESILPKRNSDKLIARKKDWDPKKYGGFDSPTVAYSVLVVAKVEKGKSKKLKSVKELLGITIMERSSFEKNPIDFLEAKGYKEVKKDLIIKLPKYSLFELENGRKRMLASAGELQKGNELALPSKYVNFLYLASHYEKLKGSPEDNEQKQLFVEQHKHYLDEIIEQISEFSKRVILADANLDKVLSAYNKHRDKPIREQAENIIHLFTLTNLGAPAAFKYFDTTIDRKRYTSTKEVLDATLIHQSITGLYETRIDLSQLGGDGGGSAGSAAGSGEFGGTLNIEDEYRLHETSKEPDVSLGSTWLSDFPQAWAETGGMGLAVRQAPLIIPLKATSTPVSIKQYPMSQEARLGIKPHIQRLLDQGILVPCQSPWNTPLLPVKKPGTNDYRPVQDLREVNKRVEDIHPTVPNPYNLLSGLPPSHQWYTVLDLKDAFFCLRLHPTSQPLFAFEWRDPEMGISGQLTWTRLPQGFKNSPTLFNEALHRDLAGFRIQHPDLILLQYVDDLLLAATSELDCQQGTRALLQTLGDLGYRASAKKAQICQKQVKYLGYLLKEGQRWLTEARKETVMGQPIPKTPRQLREFLGTAGFCRLWIPGFAEMAAPLYPLTKPGTLFNWGPDQQKAFQEIKQALLTAPALGLPDLTKPFELFVDEKQGYAKGVLTQKLGPWRRPVAYLSKKLDPVAAGWPPCLRMVAAIAVLTKDAGKLTMGQPLVILAPHAVEALVKQPPDRWLSNARMTHYQALLLDTDRVQFGPVVALNPATLLPLPEEGLQHDCLDILAEAHGTRSDLMDQPLPDADHTWYTDGSSFLQEGQRKAGAAVTTETEVIWARALPAGTSAQRAELIALTQALKMAEGKKLNVYTDSRYAFATAHIHGEIYRRRGWLTSEGKEIKNKDEILALLKALFLPKRLSIIHCPGHQKGNSAEARGNRMADQAAREVATRETPETSTLLAGKRTADGSEFEKRTADGSEFESPKKKAKVE

SEQ ID NO: 2229 - protein, 2088 aa, synthetic construct
MPAAKRVKLDGGDKKYSIGLDIGTNSVGWAVITDEYKVPSKKFKVLGNTDRHSIKKNLIGALLFDSGETAEATRLKRTARRRYTRRKNRICYLQEIFSNEMAKVDDSFFHRLEESFLVEEDKKHERHPIFGNIVDEVAYHEKYPTIYHLRKKLVDSTDKADLRLIYLALAHMIKFRGHFLIEGDLNPDNSDVDKLFIQLVQTYNQLFEENPINASGVDAKAILSARLSKSRRLENLIAQLPGEKKNGLFGNLIALSLGLTPNFKSNFDLAEDAKLQLSKDTYDDDLDNLLAQIGDQYADLFLAAKNLSDAILLSDILRVNTEITKAPLSASMIKRYDEHHQDLTLLKALVRQQLPEKYKEIFFDQSKNGYAGYIDGGASQEEFYKFIKPILEKMDGTEELLVKLNREDLLRKQRTFDNGSIPHQIHLGELHAILRRQEDFYPFLKDNREKIEKILTFRIPYYVGPLARGNSRFAWMTRKSEETITPWNFEEVVDKGASAQSFIERMTNFDKNLPNEKVLPKHSLLYEYFTVYNELTKVKYVTEGMRKPAFLSGEQKKAIVDLLFKTNRKVTVKQLKEDYFKKIECFDSVEISGVEDRFNASLGTYHDLLKIIKDKDFLDNEENEDILEDIVLTLTLFEDREMIEERLKTYAHLFDDKVMKQLKRRRYTGWGRLSRKLINGIRDKQSGKTILDFLKSDGFANRNFMQLIHDDSLTFKEDIQKAQVSGQGDSLHEHIANLAGSPAIKKGILQTVKVVDELVKVMGRHKPENIVIEMARENQTTQKGQKNSRERMKRIEEGIKELGSQILKEHPVENTQLQNEKLYLYYLQNGRDMYVDQELDINRLSDYDVDHIVPQSFLKDDSIDNKVLTRSDKARGKSDNVPSEEVVKKMKNYWRQLLNAKLITQRKFDNLTKAERGGLSELDKAGFIKRQLVETRQITKHVAQILDSRMNTKYDENDKLIREVKVITLKSKLVSDFRKDFQFYKVREINNYHHAHDAYLNAVVGTALIKKYPKLESEFVYGDYKVYDVRKMIAKSEQEIGKATAKYFFYSNIMNFFKTEITLANGEIRKRPLIETNGETGEIVWDKGRDFATVRKVLSMPQVNIVKKTEVQTGGFSKESILPKRNSDKLIARKKDWDPKKYGGFDSPTVAYSVLVVAKVEKGKSKKLKSVKELLGITIMERSSFEKNPIDFLEAKGYKEVKKDLIIKLPKYSLFELENGRKRMLASAGELQKGNELALPSKYVNFLYLASHYEKLKGSPEDNEQKQLFVEQHKHYLDEIIEQISEFSKRVILADANLDKVLSAYNKHRDKPIREQAENIIHLFTLTNLGAPAAFKYFDTTIDRKRYTSTKEVLDATLIHQSITGLYETRIDLSQLGGDGGGGGGGTLNIEDEYRLHETSKEPDVSLGSTWLSDFPQAWAETGGMGLAVRQAPLIIPLKATSTPVSIKQYPMSQEARLGIKPHIQRLLDQGILVPCQSPWNTPLLPVKKPGTNDYRPVQDLREVNKRVEDIHPTVPNPYNLLSGLPPSHQWYTVLDLKDAFFCLRLHPTSQPLFAFEWRDPEMGISGQLTWTRLPQGFKNSPTLFNEALHRDLAGFRIQHPDLILLQYVDDLLLAATSELDCQQGTRALLQTLGDLGYRASAKKAQICQKQVKYLGYLLKEGQRWLTEARKETVMGQPIPKTPRQLREFLGTAGFCRLWIPGFAEMAAPLYPLTKPGTLFNWGPDQQKAFQEIKQALLTAPALGLPDLTKPFELFVDEKQGYAKGVLTQKLGPWRRPVAYLSKKLDPVAAGWPPCLRMVAAIAVLTKDAGKLTMGQPLVILAPHAVEALVKQPPDRWLSNARMTHYQALLLDTDRVQFGPVVALNPATLLPLPEEGLQHDCLDILAEAHGTRSDLMDQPLPDADHTWYTDGSSFLQEGQRKAGAAVTTETEVIWARALPAGTSAQRAELIALTQALKMAEGKKLNVYTDSRYAFATAHIHGEIYRRRGWLTSEGKEIKNKDEILALLKALFLPKRLSIIHCPGHQKGNSAEARGNRMADQAAREVATRETPETSTLLAGKRTADGSEFEKRTADGSEFESPKKKAKVE

SEQ ID NO: 2230 - protein, 2096 aa, synthetic construct
MPAAKRVKLDGGDKKYSIGLDIGTNSVGWAVITDEYKVPSKKFKVLGNTDRHSIKKNLIGALLFDSGETAEATRLKRTARRRYTRRKNRICYLQEIFSNEMAKVDDSFFHRLEESFLVEEDKKHERHPIFGNIVDEVAYHEKYPTIYHLRKKLVDSTDKADLRLIYLALAHMIKFRGHFLIEGDLNPDNSDVDKLFIQLVQTYNQLFEENPINASGVDAKAILSARLSKSRRLENLIAQLPGEKKNGLFGNLIALSLGLTPNFKSNFDLAEDAKLQLSKDTYDDDLDNLLAQIGDQYADLFLAAKNLSDAILLSDILRVNTEITKAPLSASMIKRYDEHHQDLTLLKALVRQQLPEKYKEIFFDQSKNGYAGYIDGGASQEEFYKFIKPILEKMDGTEELLVKLNREDLLRKQRTFDNGSIPHQIHLGELHAILRRQEDFYPFLKDNREKIEKILTFRIPYYVGPLARGNSRFAWMTRKSEETITPWNFEEVVDKGASAQSFIERMTNFDKNLPNEKVLPKHSLLYEYFTVYNELTKVKYVTEGMRKPAFLSGEQKKAIVDLLFKTNRKVTVKQLKEDYFKKIECFDSVEISGVEDRFNASLGTYHDLLKIIKDKDFLDNEENEDILEDIVLTLTLFEDREMIEERLKTYAHLFDDKVMKQLKRRRYTGWGRLSRKLINGIRDKQSGKTILDFLKSDGFANRNFMQLIHDDSLTFKEDIQKAQVSGQGDSLHEHIANLAGSPAIKKGILQTVKVVDELVKVMGRHKPENIVIEMARENQTTQKGQKNSRERMKRIEEGIKELGSQILKEHPVENTQLQNEKLYLYYLQNGRDMYVDQELDINRLSDYDVDHIVPQSFLKDDSIDNKVLTRSDKARGKSDNVPSEEVVKKMKNYWRQLLNAKLITQRKFDNLTKAERGGLSELDKAGFIKRQLVETRQITKHVAQILDSRMNTKYDENDKLIREVKVITLKSKLVSDFRKDFQFYKVREINNYHHAHDAYLNAVVGTALIKKYPKLESEFVYGDYKVYDVRKMIAKSEQEIGKATAKYFFYSNIMNFFKTEITLANGEIRKRPLIETNGETGEIVWDKGRDFATVRKVLSMPQVNIVKKTEVQTGGFSKESILPKRNSDKLIARKKDWDPKKYGGFDSPTVAYSVLVVAKVEKGKSKKLKSVKELLGITIMERSSFEKNPIDFLEAKGYKEVKKDLIIKLPKYSLFELENGRKRMLASAGELQKGNELALPSKYVNFLYLASHYEKLKGSPEDNEQKQLFVEQHKHYLDEIIEQISEFSKRVILADANLDKVLSAYNKHRDKPIREQAENIIHLFTLTNLGAPAAFKYFDTTIDRKRYTSTKEVLDATLIHQSITGLYETRIDLSQLGGDGGEAAAKPAPGGGGGTLNIEDEYRLHETSKEPDVSLGSTWLSDFPQAWAETGGMGLAVRQAPLIIPLKATSTPVSIKQYPMSQEARLGIKPHIQRLLDQGILVPCQSPWNTPLLPVKKPGTNDYRPVQDLREVNKRVEDIHPTVPNPYNLLSGLPPSHQWYTVLDLKDAFFCLRLHPTSQPLFAFEWRDPEMGISGQLTWTRLPQGFKNSPTLFNEALHRDLAGFRIQHPDLILLQYVDDLLLAATSELDCQQGTRALLQTLGDLGYRASAKKAQICQKQVKYLGYLLKEGQRWLTEARKETVMGQPIPKTPRQLREFLGTAGFCRLWIPGFAEMAAPLYPLTKPGTLFNWGPDQQKAFQEIKQALLTAPALGLPDLTKPFELFVDEKQGYAKGVLTQKLGPWRRPVAYLSKKLDPVAAGWPPCLRMVAAIAVLTKDAGKLTMGQPLVILAPHAVEALVKQPPDRWLSNARMTHYQALLLDTDRVQFGPVVALNPATLLPLPEEGLQHDCLDILAEAHGTRSDLMDQPLPDADHTWYTDGSSFLQEGQRKAGAAVTTETEVIWARALPAGTSAQRAELIALTQALKMAEGKKLNVYTDSRYAFATAHIHGEIYRRRGWLTSEGKEIKNKDEILALLKALFLPKRLSIIHCPGHQKGNSAEARGNRMADQAAREVATRETPETSTLLAGKRTADGSEFEKRTADGSEFESPKKKAKVE

SEQ ID NO: 2231 - protein, 2094 aa, synthetic construct
MPAAKRVKLDGGDKKYSIGLDIGTNSVGWAVITDEYKVPSKKFKVLGNTDRHSIKKNLIGALLFDSGETAEATRLKRTARRRYTRRKNRICYLQEIFSNEMAKVDDSFFHRLEESFLVEEDKKHERHPIFGNIVDEVAYHEKYPTIYHLRKKLVDSTDKADLRLIYLALAHMIKFRGHFLIEGDLNPDNSDVDKLFIQLVQTYNQLFEENPINASGVDAKAILSARLSKSRRLENLIAQLPGEKKNGLFGNLIALSLGLTPNFKSNFDLAEDAKLQLSKDTYDDDLDNLLAQIGDQYADLFLAAKNLSDAILLSDILRVNTEITKAPLSASMIKRYDEHHQDLTLLKALVRQQLPEKYKEIFFDQSKNGYAGYIDGGASQEEFYKFIKPILEKMDGTEELLVKLNREDLLRKQRTFDNGSIPHQIHLGELHAILRRQEDFYPFLKDNREKIEKILTFRIPYYVGPLARGNSRFAWMTRKSEETITPWNFEEVVDKGASAQSFIERMTNFDKNLPNEKVLPKHSLLYEYFTVYNELTKVKYVTEGMRKPAFLSGEQKKAIVDLLFKTNRKVTVKQLKEDYFKKIECFDSVEISGVEDRFNASLGTYHDLLKIIKDKDFLDNEENEDILEDIVLTLTLFEDREMIEERLKTYAHLFDDKVMKQLKRRRYTGWGRLSRKLINGIRDKQSGKTILDFLKSDGFANRNFMQLIHDDSLTFKEDIQKAQVSGQGDSLHEHIANLAGSPAIKKGILQTVKVVDELVKVMGRHKPENIVIEMARENQTTQKGQKNSRERMKRIEEGIKELGSQILKEHPVENTQLQNEKLYLYYLQNGRDMYVDQELDINRLSDYDVDHIVPQSFLKDDSIDNKVLTRSDKARGKSDNVPSEEVVKKMKNYWRQLLNAKLITQRKFDNLTKAERGGLSELDKAGFIKRQLVETRQITKHVAQILDSRMNTKYDENDKLIREVKVITLKSKLVSDFRKDFQFYKVREINNYHHAHDAYLNAVVGTALIKKYPKLESEFVYGDYKVYDVRKMIAKSEQEIGKATAKYFFYSNIMNFFKTEITLANGEIRKRPLIETNGETGEIVWDKGRDFATVRKVLSMPQVNIVKKTEVQTGGFSKESILPKRNSDKLIARKKDWDPKKYGGFDSPTVAYSVLVVAKVEKGKSKKLKSVKELLGITIMERSSFEKNPIDFLEAKGYKEVKKDLIIKLPKYSLFELENGRKRMLASAGELQKGNELALPSKYVNFLYLASHYEKLKGSPEDNEQKQLFVEQHKHYLDEIIEQISEFSKRVILADANLDKVLSAYNKHRDKPIREQAENIIHLFTLTNLGAPAAFKYFDTTIDRKRYTSTKEVLDATLIHQSITGLYETRIDLSQLGGDGGGGGGGSGSSGGTLNIEDEYRLHETSKEPDVSLGSTWLSDFPQAWAETGGMGLAVRQAPLIIPLKATSTPVSIKQYPMSQEARLGIKPHIQRLLDQGILVPCQSPWNTPLLPVKKPGTNDYRPVQDLREVNKRVEDIHPTVPNPYNLLSGLPPSHQWYTVLDLKDAFFCLRLHPTSQPLFAFEWRDPEMGISGQLTWTRLPQGFKNSPTLFNEALHRDLAGFRIQHPDLILLQYVDDLLLAATSELDCQQGTRALLQTLGDLGYRASAKKAQICQKQVKYLGYLLKEGQRWLTEARKETVMGQPIPKTPRQLREFLGTAGFCRLWIPGFAEMAAPLYPLTKPGTLFNWGPDQQKAFQEIKQALLTAPALGLPDLTKPFELFVDEKQGYAKGVLTQKLGPWRRPVAYLSKKLDPVAAGWPPCLRMVAAIAVLTKDAGKLTMGQPLVILAPHAVEALVKQPPDRWLSNARMTHYQALLLDTDRVQFGPVVALNPATLLPLPEEGLQHDCLDILAEAHGTRSDLMDQPLPDADHTWYTDGSSFLQEGQRKAGAAVTTETEVIWARALPAGTSAQRAELIALTQALKMAEGKKLNVYTDSRYAFATAHIHGEIYRRRGWLTSEGKEIKNKDEILALLKALFLPKRLSIIHCPGHQKGNSAEARGNRMADQAAREVATRETPETSTLLAGKRTADGSEFEKRTADGSEFESPKKKAKVE

SEQ ID NO: 2232 - protein, 2096 aa, synthetic construct
MPAAKRVKLDGGDKKYSIGLDIGTNSVGWAVITDEYKVPSKKFKVLGNTDRHSIKKNLIGALLFDSGETAEATRLKRTARRRYTRRKNRICYLQEIFSNEMAKVDDSFFHRLEESFLVEEDKKHERHPIFGNIVDEVAYHEKYPTIYHLRKKLVDSTDKADLRLIYLALAHMIKFRGHFLIEGDLNPDNSDVDKLFIQLVQTYNQLFEENPINASGVDAKAILSARLSKSRRLENLIAQLPGEKKNGLFGNLIALSLGLTPNFKSNFDLAEDAKLQLSKDTYDDDLDNLLAQIGDQYADLFLAAKNLSDAILLSDILRVNTEITKAPLSASMIKRYDEHHQDLTLLKALVRQQLPEKYKEIFFDQSKNGYAGYIDGGASQEEFYKFIKPILEKMDGTEELLVKLNREDLLRKQRTFDNGSIPHQIHLGELHAILRRQEDFYPFLKDNREKIEKILTFRIPYYVGPLARGNSRFAWMTRKSEETITPWNFEEVVDKGASAQSFIERMTNFDKNLPNEKVLPKHSLLYEYFTVYNELTKVKYVTEGMRKPAFLSGEQKKAIVDLLFKTNRKVTVKQLKEDYFKKIECFDSVEISGVEDRFNASLGTYHDLLKIIKDKDFLDNEENEDILEDIVLTLTLFEDREMIEERLKTYAHLFDDKVMKQLKRRRYTGWGRLSRKLINGIRDKQSGKTILDFLKSDGFANRNFMQLIHDDSLTFKEDIQKAQVSGQGDSLHEHIANLAGSPAIKKGILQTVKVVDELVKVMGRHKPENIVIEMARENQTTQKGQKNSRERMKRIEEGIKELGSQILKEHPVENTQLQNEKLYLYYLQNGRDMYVDQELDINRLSDYDVDHIVPQSFLKDDSIDNKVLTRSDKARGKSDNVPSEEVVKKMKNYWRQLLNAKLITQRKFDNLTKAERGGLSELDKAGFIKRQLVETRQITKHVAQILDSRMNTKYDENDKLIREVKVITLKSKLVSDFRKDFQFYKVREINNYHHAHDAYLNAVVGTALIKKYPKLESEFVYGDYKVYDVRKMIAKSEQEIGKATAKYFFYSNIMNFFKTEITLANGEIRKRPLIETNGETGEIVWDKGRDFATVRKVLSMPQVNIVKKTEVQTGGFSKESILPKRNSDKLIARKKDWDPKKYGGFDSPTVAYSVLVVAKVEKGKSKKLKSVKELLGITIMERSSFEKNPIDFLEAKGYKEVKKDLIIKLPKYSLFELENGRKRMLASAGELQKGNELALPSKYVNFLYLASHYEKLKGSPEDNEQKQLFVEQHKHYLDEIIEQISEFSKRVILADANLDKVLSAYNKHRDKPIREQAENIIHLFTLTNLGAPAAFKYFDTTIDRKRYTSTKEVLDATLIHQSITGLYETRIDLSQLGGDGGPAPEAAAKGGSGGTLNIEDEYRLHETSKEPDVSLGSTWLSDFPQAWAETGGMGLAVRQAPLIIPLKATSTPVSIKQYPMSQEARLGIKPHIQRLLDQGILVPCQSPWNTPLLPVKKPGTNDYRPVQDLREVNKRVEDIHPTVPNPYNLLSGLPPSHQWYTVLDLKDAFFCLRLHPTSQPLFAFEWRDPEMGISGQLTWTRLPQGFKNSPTLFNEALHRDLAGFRIQHPDLILLQYVDDLLLAATSELDCQQGTRALLQTLGDLGYRASAKKAQICQKQVKYLGYLLKEGQRWLTEARKETVMGQPIPKTPRQLREFLGTAGFCRLWIPGFAEMAAPLYPLTKPGTLFNWGPDQQKAFQEIKQALLTAPALGLPDLTKPFELFVDEKQGYAKGVLTQKLGPWRRPVAYLSKKLDPVAAGWPPCLRMVAAIAVLTKDAGKLTMGQPLVILAPHAVEALVKQPPDRWLSNARMTHYQALLLDTDRVQFGPVVALNPATLLPLPEEGLQHDCLDILAEAHGTRSDLMDQPLPDADHTWYTDGSSFLQEGQRKAGAAVTTETEVIWARALPAGTSAQRAELIALTQALKMAEGKKLNVYTDSRYAFATAHIHGEIYRRRGWLTSEGKEIKNKDEILALLKALFLPKRLSIIHCPGHQKGNSAEARGNRMADQAAREVATRETPETSTLLAGKRTADGSEFEKRTADGSEFESPKKKAKVE

SEQ ID NO: 2233 - protein, 2093 aa, synthetic construct
MPAAKRVKLDGGDKKYSIGLDIGTNSVGWAVITDEYKVPSKKFKVLGNTDRHSIKKNLIGALLFDSGETAEATRLKRTARRRYTRRKNRICYLQEIFSNEMAKVDDSFFHRLEESFLVEEDKKHERHPIFGNIVDEVAYHEKYPTIYHLRKKLVDSTDKADLRLIYLALAHMIKFRGHFLIEGDLNPDNSDVDKLFIQLVQTYNQLFEENPINASGVDAKAILSARLSKSRRLENLIAQLPGEKKNGLFGNLIALSLGLTPNFKSNFDLAEDAKLQLSKDTYDDDLDNLLAQIGDQYADLFLAAKNLSDAILLSDILRVNTEITKAPLSASMIKRYDEHHQDLTLLKALVRQQLPEKYKEIFFDQSKNGYAGYIDGGASQEEFYKFIKPILEKMDGTEELLVKLNREDLLRKQRTFDNGSIPHQIHLGELHAILRRQEDFYPFLKDNREKIEKILTFRIPYYVGPLARGNSRFAWMTRKSEETITPWNFEEVVDKGASAQSFIERMTNFDKNLPNEKVLPKHSLLYEYFTVYNELTKVKYVTEGMRKPAFLSGEQKKAIVDLLFKTNRKVTVKQLKEDYFKKIECFDSVEISGVEDRFNASLGTYHDLLKIIKDKDFLDNEENEDILEDIVLTLTLFEDREMIEERLKTYAHLFDDKVMKQLKRRRYTGWGRLSRKLINGIRDKQSGKTILDFLKSDGFANRNFMQLIHDDSLTFKEDIQKAQVSGQGDSLHEHIANLAGSPAIKKGILQTVKVVDELVKVMGRHKPENIVIEMARENQTTQKGQKNSRERMKRIEEGIKELGSQILKEHPVENTQLQNEKLYLYYLQNGRDMYVDQELDINRLSDYDVDHIVPQSFLKDDSIDNKVLTRSDKARGKSDNVPSEEVVKKMKNYWRQLLNAKLITQRKFDNLTKAERGGLSELDKAGFIKRQLVETRQITKHVAQILDSRMNTKYDENDKLIREVKVITLKSKLVSDFRKDFQFYKVREINNYHHAHDAYLNAVVGTALIKKYPKLESEFVYGDYKVYDVRKMIAKSEQEIGKATAKYFFYSNIMNFFKTEITLANGEIRKRPLIETNGETGEIVWDKGRDFATVRKVLSMPQVNIVKKTEVQTGGFSKESILPKRNSDKLIARKKDWDPKKYGGFDSPTVAYSVLVVAKVEKGKSKKLKSVKELLGITIMERSSFEKNPIDFLEAKGYKEVKKDLIIKLPKYSLFELENGRKRMLASAGELQKGNELALPSKYVNFLYLASHYEKLKGSPEDNEQKQLFVEQHKHYLDEIIEQISEFSKRVILADANLDKVLSAYNKHRDKPIREQAENIIHLFTLTNLGAPAAFKYFDTTIDRKRYTSTKEVLDATLIHQSITGLYETRIDLSQLGGDGGGSSEAAAKGGTLNIEDEYRLHETSKEPDVSLGSTWLSDFPQAWAETGGMGLAVRQAPLIIPLKATSTPVSIKQYPMSQEARLGIKPHIQRLLDQGILVPCQSPWNTPLLPVKKPGTNDYRPVQDLREVNKRVEDIHPTVPNPYNLLSGLPPSHQWYTVLDLKDAFFCLRLHPTSQPLFAFEWRDPEMGISGQLTWTRLPQGFKNSPTLFNEALHRDLAGFRIQHPDLILLQYVDDLLLAATSELDCQQGTRALLQTLGDLGYRASAKKAQICQKQVKYLGYLLKEGQRWLTEARKETVMGQPIPKTPRQLREFLGTAGFCRLWIPGFAEMAAPLYPLTKPGTLFNWGPDQQKAFQEIKQALLTAPALGLPDLTKPFELFVDEKQGYAKGVLTQKLGPWRRPVAYLSKKLDPVAAGWPPCLRMVAAIAVLTKDAGKLTMGQPLVILAPHAVEALVKQPPDRWLSNARMTHYQALLLDTDRVQFGPVVALNPATLLPLPEEGLQHDCLDILAEAHGTRSDLMDQPLPDADHTWYTDGSSFLQEGQRKAGAAVTTETEVIWARALPAGTSAQRAELIALTQALKMAEGKKLNVYTDSRYAFATAHIHGEIYRRRGWLTSEGKEIKNKDEILALLKALFLPKRLSIIHCPGHQKGNSAEARGNRMADQAAREVATRETPETSTLLAGKRTADGSEFEKRTADGSEFESPKKKAKVE

SEQ ID NO: 2234 - protein, 2094 aa, synthetic construct
MPAAKRVKLDGGDKKYSIGLDIGTNSVGWAVITDEYKVPSKKFKVLGNTDRHSIKKNLIGALLFDSGETAEATRLKRTARRRYTRRKNRICYLQEIFSNEMAKVDDSFFHRLEESFLVEEDKKHERHPIFGNIVDEVAYHEKYPTIYHLRKKLVDSTDKADLRLIYLALAHMIKFRGHFLIEGDLNPDNSDVDKLFIQLVQTYNQLFEENPINASGVDAKAILSARLSKSRRLENLIAQLPGEKKNGLFGNLIALSLGLTPNFKSNFDLAEDAKLQLSKDTYDDDLDNLLAQIGDQYADLFLAAKNLSDAILLSDILRVNTEITKAPLSASMIKRYDEHHQDLTLLKALVRQQLPEKYKEIFFDQSKNGYAGYIDGGASQEEFYKFIKPILEKMDGTEELLVKLNREDLLRKQRTFDNGSIPHQIHLGELHAILRRQEDFYPFLKDNREKIEKILTFRIPYYVGPLARGNSRFAWMTRKSEETITPWNFEEVVDKGASAQSFIERMTNFDKNLPNEKVLPKHSLLYEYFTVYNELTKVKYVTEGMRKPAFLSGEQKKAIVDLLFKTNRKVTVKQLKEDYFKKIECFDSVEISGVEDRFNASLGTYHDLLKIIKDKDFLDNEENEDILEDIVLTLTLFEDREMIEERLKTYAHLFDDKVMKQLKRRRYTGWGRLSRKLINGIRDKQSGKTILDFLKSDGFANRNFMQLIHDDSLTFKEDIQKAQVSGQGDSLHEHIANLAGSPAIKKGILQTVKVVDELVKVMGRHKPENIVIEMARENQTTQKGQKNSRERMKRIEEGIKELGSQILKEHPVENTQLQNEKLYLYYLQNGRDMYVDQELDINRLSDYDVDHIVPQSFLKDDSIDNKVLTRSDKARGKSDNVPSEEVVKKMKNYWRQLLNAKLITQRKFDNLTKAERGGLSELDKAGFIKRQLVETRQITKHVAQILDSRMNTKYDENDKLIREVKVITLKSKLVSDFRKDFQFYKVREINNYHHAHDAYLNAVVGTALIKKYPKLESEFVYGDYKVYDVRKMIAKSEQEIGKATAKYFFYSNIMNFFKTEITLANGEIRKRPLIETNGETGEIVWDKGRDFATVRKVLSMPQVNIVKKTEVQTGGFSKESILPKRNSDKLIARKKDWDPKKYGGFDSPTVAYSVLVVAKVEKGKSKKLKSVKELLGITIMERSSFEKNPIDFLEAKGYKEVKKDLIIKLPKYSLFELENGRKRMLASAGELQKGNELALPSKYVNFLYLASHYEKLKGSPEDNEQKQLFVEQHKHYLDEIIEQISEFSKRVILADANLDKVLSAYNKHRDKPIREQAENIIHLFTLTNLGAPAAFKYFDTTIDRKRYTSTKEVLDATLIHQSITGLYETRIDLSQLGGDGGPAPGGGGSSGGTLNIEDEYRLHETSKEPDVSLGSTWLSDFPQAWAETGGMGLAVRQAPLIIPLKATSTPVSIKQYPMSQEARLGIKPHIQRLLDQGILVPCQSPWNTPLLPVKKPGTNDYRPVQDLREVNKRVEDIHPTVPNPYNLLSGLPPSHQWYTVLDLKDAFFCLRLHPTSQPLFAFEWRDPEMGISGQLTWTRLPQGFKNSPTLFNEALHRDLAGFRIQHPDLILLQYVDDLLLAATSELDCQQGTRALLQTLGDLGYRASAKKAQICQKQVKYLGYLLKEGQRWLTEARKETVMGQPIPKTPRQLREFLGTAGFCRLWIPGFAEMAAPLYPLTKPGTLFNWGPDQQKAFQEIKQALLTAPALGLPDLTKPFELFVDEKQGYAKGVLTQKLGPWRRPVAYLSKKLDPVAAGWPPCLRMVAAIAVLTKDAGKLTMGQPLVILAPHAVEALVKQPPDRWLSNARMTHYQALLLDTDRVQFGPVVALNPATLLPLPEEGLQHDCLDILAEAHGTRSDLMDQPLPDADHTWYTDGSSFLQEGQRKAGAAVTTETEVIWARALPAGTSAQRAELIALTQALKMAEGKKLNVYTDSRYAFATAHIHGEIYRRRGWLTSEGKEIKNKDEILALLKALFLPKRLSIIHCPGHQKGNSAEARGNRMADQAAREVATRETPETSTLLAGKRTADGSEFEKRTADGSEFESPKKKAKVE

SEQ ID NO: 2235 - protein, 2096 aa, synthetic construct
MPAAKRVKLDGGDKKYSIGLDIGTNSVGWAVITDEYKVPSKKFKVLGNTDRHSIKKNLIGALLFDSGETAEATRLKRTARRRYTRRKNRICYLQEIFSNEMAKVDDSFFHRLEESFLVEEDKKHERHPIFGNIVDEVAYHEKYPTIYHLRKKLVDSTDKADLRLIYLALAHMIKFRGHFLIEGDLNPDNSDVDKLFIQLVQTYNQLFEENPINASGVDAKAILSARLSKSRRLENLIAQLPGEKKNGLFGNLIALSLGLTPNFKSNFDLAEDAKLQLSKDTYDDDLDNLLAQIGDQYADLFLAAKNLSDAILLSDILRVNTEITKAPLSASMIKRYDEHHQDLTLLKALVRQQLPEKYKEIFFDQSKNGYAGYIDGGASQEEFYKFIKPILEKMDGTEELLVKLNREDLLRKQRTFDNGSIPHQIHLGELHAILRRQEDFYPFLKDNREKIEKILTFRIPYYVGPLARGNSRFAWMTRKSEETITPWNFEEVVDKGASAQSFIERMTNFDKNLPNEKVLPKHSLLYEYFTVYNELTKVKYVTEGMRKPAFLSGEQKKAIVDLLFKTNRKVTVKQLKEDYFKKIECFDSVEISGVEDRFNASLGTYHDLLKIIKDKDFLDNEENEDILEDIVLTLTLFEDREMIEERLKTYAHLFDDKVMKQLKRRRYTGWGRLSRKLINGIRDKQSGKTILDFLKSDGFANRNFMQLIHDDSLTFKEDIQKAQVSGQGDSLHEHIANLAGSPAIKKGILQTVKVVDELVKVMGRHKPENIVIEMARENQTTQKGQKNSRERMKRIEEGIKELGSQILKEHPVENTQLQNEKLYLYYLQNGRDMYVDQELDINRLSDYDVDHIVPQSFLKDDSIDNKVLTRSDKARGKSDNVPSEEVVKKMKNYWRQLLNAKLITQRKFDNLTKAERGGLSELDKAGFIKRQLVETRQITKHVAQILDSRMNTKYDENDKLIREVKVITLKSKLVSDFRKDFQFYKVREINNYHHAHDAYLNAVVGTALIKKYPKLESEFVYGDYKVYDVRKMIAKSEQEIGKATAKYFFYSNIMNFFKTEITLANGEIRKRPLIETNGETGEIVWDKGRDFATVRKVLSMPQVNIVKKTEVQTGGFSKESILPKRNSDKLIARKKDWDPKKYGGFDSPTVAYSVLVVAKVEKGKSKKLKSVKELLGITIMERSSFEKNPIDFLEAKGYKEVKKDLIIKLPKYSLFELENGRKRMLASAGELQKGNELALPSKYVNFLYLASHYEKLKGSPEDNEQKQLFVEQHKHYLDEIIEQISEFSKRVILADANLDKVLSAYNKHRDKPIREQAENIIHLFTLTNLGAPAAFKYFDTTIDRKRYTSTKEVLDATLIHQSITGLYETRIDLSQLGGDGGEAAAKGSSPAPGGTLNIEDEYRLHETSKEPDVSLGSTWLSDFPQAWAETGGMGLAVRQAPLIIPLKATSTPVSIKQYPMSQEARLGIKPHIQRLLDQGILVPCQSPWNTPLLPVKKPGTNDYRPVQDLREVNKRVEDIHPTVPNPYNLLSGLPPSHQWYTVLDLKDAFFCLRLHPTSQPLFAFEWRDPEMGISGQLTWTRLPQGFKNSPTLFNEALHRDLAGFRIQHPDLILLQYVDDLLLAATSELDCQQGTRALLQTLGDLGYRASAKKAQICQKQVKYLGYLLKEGQRWLTEARKETVMGQPIPKTPRQLREFLGTAGFCRLWIPGFAEMAAPLYPLTKPGTLFNWGPDQQKAFQEIKQALLTAPALGLPDLTKPFELFVDEKQGYAKGVLTQKLGPWRRPVAYLSKKLDPVAAGWPPCLRMVAAIAVLTKDAGKLTMGQPLVILAPHAVEALVKQPPDRWLSNARMTHYQALLLDTDRVQFGPVVALNPATLLPLPEEGLQHDCLDILAEAHGTRSDLMDQPLPDADHTWYTDGSSFLQEGQRKAGAAVTTETEVIWARALPAGTSAQRAELIALTQALKMAEGKKLNVYTDSRYAFATAHIHGEIYRRRGWLTSEGKEIKNKDEILALLKALFLPKRLSIIHCPGHQKGNSAEARGNRMADQAAREVATRETPETSTLLAGKRTADGSEFEKRTADGSEFESPKKKAKVE

SEQ ID NO: 2236 - protein, 2095 aa, synthetic construct
MPAAKRVKLDGGDKKYSIGLDIGTNSVGWAVITDEYKVPSKKFKVLGNTDRHSIKKNLIGALLFDSGETAEATRLKRTARRRYTRRKNRICYLQEIFSNEMAKVDDSFFHRLEESFLVEEDKKHERHPIFGNIVDEVAYHEKYPTIYHLRKKLVDSTDKADLRLIYLALAHMIKFRGHFLIEGDLNPDNSDVDKLFIQLVQTYNQLFEENPINASGVDAKAILSARLSKSRRLENLIAQLPGEKKNGLFGNLIALSLGLTPNFKSNFDLAEDAKLQLSKDTYDDDLDNLLAQIGDQYADLFLAAKNLSDAILLSDILRVNTEITKAPLSASMIKRYDEHHQDLTLLKALVRQQLPEKYKEIFFDQSKNGYAGYIDGGASQEEFYKFIKPILEKMDGTEELLVKLNREDLLRKQRTFDNGSIPHQIHLGELHAILRRQEDFYPFLKDNREKIEKILTFRIPYYVGPLARGNSRFAWMTRKSEETITPWNFEEVVDKGASAQSFIERMTNFDKNLPNEKVLPKHSLLYEYFTVYNELTKVKYVTEGMRKPAFLSGEQKKAIVDLLFKTNRKVTVKQLKEDYFKKIECFDSVEISGVEDRFNASLGTYHDLLKIIKDKDFLDNEENEDILEDIVLTLTLFEDREMIEERLKTYAHLFDDKVMKQLKRRRYTGWGRLSRKLINGIRDKQSGKTILDFLKSDGFANRNFMQLIHDDSLTFKEDIQKAQVSGQGDSLHEHIANLAGSPAIKKGILQTVKVVDELVKVMGRHKPENIVIEMARENQTTQKGQKNSRERMKRIEEGIKELGSQILKEHPVENTQLQNEKLYLYYLQNGRDMYVDQELDINRLSDYDVDHIVPQSFLKDDSIDNKVLTRSDKARGKSDNVPSEEVVKKMKNYWRQLLNAKLITQRKFDNLTKAERGGLSELDKAGFIKRQLVETRQITKHVAQILDSRMNTKYDENDKLIREVKVITLKSKLVSDFRKDFQFYKVREINNYHHAHDAYLNAVVGTALIKKYPKLESEFVYGDYKVYDVRKMIAKSEQEIGKATAKYFFYSNIMNFFKTEITLANGEIRKRPLIETNGETGEIVWDKGRDFATVRKVLSMPQVNIVKKTEVQTGGFSKESILPKRNSDKLIARKKDWDPKKYGGFDSPTVAYSVLVVAKVEKGKSKKLKSVKELLGITIMERSSFEKNPIDFLEAKGYKEVKKDLIIKLPKYSLFELENGRKRMLASAGELQKGNELALPSKYVNFLYLASHYEKLKGSPEDNEQKQLFVEQHKHYLDEIIEQISEFSKRVILADANLDKVLSAYNKHRDKPIREQAENIIHLFTLTNLGAPAAFKYFDTTIDRKRYTSTKEVLDATLIHQSITGLYETRIDLSQLGGDGGEAAAKEAAAKGGTLNIEDEYRLHETSKEPDVSLGSTWLSDFPQAWAETGGMGLAVRQAPLIIPLKATSTPVSIKQYPMSQEARLGIKPHIQRLLDQGILVPCQSPWNTPLLPVKKPGTNDYRPVQDLREVNKRVEDIHPTVPNPYNLLSGLPPSHQWYTVLDLKDAFFCLRLHPTSQPLFAFEWRDPEMGISGQLTWTRLPQGFKNSPTLFNEALHRDLAGFRIQHPDLILLQYVDDLLLAATSELDCQQGTRALLQTLGDLGYRASAKKAQICQKQVKYLGYLLKEGQRWLTEARKETVMGQPIPKTPRQLREFLGTAGFCRLWIPGFAEMAAPLYPLTKPGTLFNWGPDQQKAFQEIKQALLTAPALGLPDLTKPFELFVDEKQGYAKGVLTQKLGPWRRPVAYLSKKLDPVAAGWPPCLRMVAAIAVLTKDAGKLTMGQPLVILAPHAVEALVKQPPDRWLSNARMTHYQALLLDTDRVQFGPVVALNPATLLPLPEEGLQHDCLDILAEAHGTRSDLMDQPLPDADHTWYTDGSSFLQEGQRKAGAAVTTETEVIWARALPAGTSAQRAELIALTQALKMAEGKKLNVYTDSRYAFATAHIHGEIYRRRGWLTSEGKEIKNKDEILALLKALFLPKRLSIIHCPGHQKGNSAEARGNRMADQAAREVATRETPETSTLLAGKRTADGSEFEKRTADGSEFESPKKKAKVE

SEQ ID NO: 2237 - protein, 2105 aa, synthetic construct
MPAAKRVKLDGGDKKYSIGLDIGTNSVGWAVITDEYKVPSKKFKVLGNTDRHSIKKNLIGALLFDSGETAEATRLKRTARRRYTRRKNRICYLQEIFSNEMAKVDDSFFHRLEESFLVEEDKKHERHPIFGNIVDEVAYHEKYPTIYHLRKKLVDSTDKADLRLIYLALAHMIKFRGHFLIEGDLNPDNSDVDKLFIQLVQTYNQLFEENPINASGVDAKAILSARLSKSRRLENLIAQLPGEKKNGLFGNLIALSLGLTPNFKSNFDLAEDAKLQLSKDTYDDDLDNLLAQIGDQYADLFLAAKNLSDAILLSDILRVNTEITKAPLSASMIKRYDEHHQDLTLLKALVRQQLPEKYKEIFFDQSKNGYAGYIDGGASQEEFYKFIKPILEKMDGTEELLVKLNREDLLRKQRTFDNGSIPHQIHLGELHAILRRQEDFYPFLKDNREKIEKILTFRIPYYVGPLARGNSRFAWMTRKSEETITPWNFEEVVDKGASAQSFIERMTNFDKNLPNEKVLPKHSLLYEYFTVYNELTKVKYVTEGMRKPAFLSGEQKKAIVDLLFKTNRKVTVKQLKEDYFKKIECFDSVEISGVEDRFNASLGTYHDLLKIIKDKDFLDNEENEDILEDIVLTLTLFEDREMIEERLKTYAHLFDDKVMKQLKRRRYTGWGRLSRKLINGIRDKQSGKTILDFLKSDGFANRNFMQLIHDDSLTFKEDIQKAQVSGQGDSLHEHIANLAGSPAIKKGILQTVKVVDELVKVMGRHKPENIVIEMARENQTTQKGQKNSRERMKRIEEGIKELGSQILKEHPVENTQLQNEKLYLYYLQNGRDMYVDQELDINRLSDYDVDHIVPQSFLKDDSIDNKVLTRSDKARGKSDNVPSEEVVKKMKNYWRQLLNAKLITQRKFDNLTKAERGGLSELDKAGFIKRQLVETRQITKHVAQILDSRMNTKYDENDKLIREVKVITLKSKLVSDFRKDFQFYKVREINNYHHAHDAYLNAVVGTALIKKYPKLESEFVYGDYKVYDVRKMIAKSEQEIGKATAKYFFYSNIMNFFKTEITLANGEIRKRPLIETNGETGEIVWDKGRDFATVRKVLSMPQVNIVKKTEVQTGGFSKESILPKRNSDKLIARKKDWDPKKYGGFDSPTVAYSVLVVAKVEKGKSKKLKSVKELLGITIMERSSFEKNPIDFLEAKGYKEVKKDLIIKLPKYSLFELENGRKRMLASAGELQKGNELALPSKYVNFLYLASHYEKLKGSPEDNEQKQLFVEQHKHYLDEIIEQISEFSKRVILADANLDKVLSAYNKHRDKPIREQAENIIHLFTLTNLGAPAAFKYFDTTIDRKRYTSTKEVLDATLIHQSITGLYETRIDLSQLGGDGGEAAAKEAAAKEAAAKEAAAKGGTLNIEDEYRLHETSKEPDVSLGSTWLSDFPQAWAETGGMGLAVRQAPLIIPLKATSTPVSIKQYPMSQEARLGIKPHIQRLLDQGILVPCQSPWNTPLLPVKKPGTNDYRPVQDLREVNKRVEDIHPTVPNPYNLLSGLPPSHQWYTVLDLKDAFFCLRLHPTSQPLFAFEWRDPEMGISGQLTWTRLPQGFKNSPTLFNEALHRDLAGFRIQHPDLILLQYVDDLLLAATSELDCQQGTRALLQTLGDLGYRASAKKAQICQKQVKYLGYLLKEGQRWLTEARKETVMGQPIPKTPRQLREFLGTAGFCRLWIPGFAEMAAPLYPLTKPGTLFNWGPDQQKAFQEIKQALLTAPALGLPDLTKPFELFVDEKQGYAKGVLTQKLGPWRRPVAYLSKKLDPVAAGWPPCLRMVAAIAVLTKDAGKLTMGQPLVILAPHAVEALVKQPPDRWLSNARMTHYQALLLDTDRVQFGPVVALNPATLLPLPEEGLQHDCLDILAEAHGTRSDLMDQPLPDADHTWYTDGSSFLQEGQRKAGAAVTTETEVIWARALPAGTSAQRAELIALTQALKMAEGKKLNVYTDSRYAFATAHIHGEIYRRRGWLTSEGKEIKNKDEILALLKALFLPKRLSIIHCPGHQKGNSAEARGNRMADQAAREVATRETPETSTLLAGKRTADGSEFEKRTADGSEFESPKKKAKVE

SEQ ID NO: 2238 - protein, 2093 aa, synthetic construct
MPAAKRVKLDGGDKKYSIGLDIGTNSVGWAVITDEYKVPSKKFKVLGNTDRHSIKKNLIGALLFDSGETAEATRLKRTARRRYTRRKNRICYLQEIFSNEMAKVDDSFFHRLEESFLVEEDKKHERHPIFGNIVDEVAYHEKYPTIYHLRKKLVDSTDKADLRLIYLALAHMIKFRGHFLIEGDLNPDNSDVDKLFIQLVQTYNQLFEENPINASGVDAKAILSARLSKSRRLENLIAQLPGEKKNGLFGNLIALSLGLTPNFKSNFDLAEDAKLQLSKDTYDDDLDNLLAQIGDQYADLFLAAKNLSDAILLSDILRVNTEITKAPLSASMIKRYDEHHQDLTLLKALVRQQLPEKYKEIFFDQSKNGYAGYIDGGASQEEFYKFIKPILEKMDGTEELLVKLNREDLLRKQRTFDNGSIPHQIHLGELHAILRRQEDFYPFLKDNREKIEKILTFRIPYYVGPLARGNSRFAWMTRKSEETITPWNFEEVVDKGASAQSFIERMTNFDKNLPNEKVLPKHSLLYEYFTVYNELTKVKYVTEGMRKPAFLSGEQKKAIVDLLFKTNRKVTVKQLKEDYFKKIECFDSVEISGVEDRFNASLGTYHDLLKIIKDKDFLDNEENEDILEDIVLTLTLFEDREMIEERLKTYAHLFDDKVMKQLKRRRYTGWGRLSRKLINGIRDKQSGKTILDFLKSDGFANRNFMQLIHDDSLTFKEDIQKAQVSGQGDSLHEHIANLAGSPAIKKGILQTVKVVDELVKVMGRHKPENIVIEMARENQTTQKGQKNSRERMKRIEEGIKELGSQILKEHPVENTQLQNEKLYLYYLQNGRDMYVDQELDINRLSDYDVDHIVPQSFLKDDSIDNKVLTRSDKARGKSDNVPSEEVVKKMKNYWRQLLNAKLITQRKFDNLTKAERGGLSELDKAGFIKRQLVETRQITKHVAQILDSRMNTKYDENDKLIREVKVITLKSKLVSDFRKDFQFYKVREINNYHHAHDAYLNAVVGTALIKKYPKLESEFVYGDYKVYDVRKMIAKSEQEIGKATAKYFFYSNIMNFFKTEITLANGEIRKRPLIETNGETGEIVWDKGRDFATVRKVLSMPQVNIVKKTEVQTGGFSKESILPKRNSDKLIARKKDWDPKKYGGFDSPTVAYSVLVVAKVEKGKSKKLKSVKELLGITIMERSSFEKNPIDFLEAKGYKEVKKDLIIKLPKYSLFELENGRKRMLASAGELQKGNELALPSKYVNFLYLASHYEKLKGSPEDNEQKQLFVEQHKHYLDEIIEQISEFSKRVILADANLDKVLSAYNKHRDKPIREQAENIIHLFTLTNLGAPAAFKYFDTTIDRKRYTSTKEVLDATLIHQSITGLYETRIDLSQLGGDGGEAAAKGGSGGTLNIEDEYRLHETSKEPDVSLGSTWLSDFPQAWAETGGMGLAVRQAPLIIPLKATSTPVSIKQYPMSQEARLGIKPHIQRLLDQGILVPCQSPWNTPLLPVKKPGTNDYRPVQDLREVNKRVEDIHPTVPNPYNLLSGLPPSHQWYTVLDLKDAFFCLRLHPTSQPLFAFEWRDPEMGISGQLTWTRLPQGFKNSPTLFNEALHRDLAGFRIQHPDLILLQYVDDLLLAATSELDCQQGTRALLQTLGDLGYRASAKKAQICQKQVKYLGYLLKEGQRWLTEARKETVMGQPIPKTPRQLREFLGTAGFCRLWIPGFAEMAAPLYPLTKPGTLFNWGPDQQKAFQEIKQALLTAPALGLPDLTKPFELFVDEKQGYAKGVLTQKLGPWRRPVAYLSKKLDPVAAGWPPCLRMVAAIAVLTKDAGKLTMGQPLVILAPHAVEALVKQPPDRWLSNARMTHYQALLLDTDRVQFGPVVALNPATLLPLPEEGLQHDCLDILAEAHGTRSDLMDQPLPDADHTWYTDGSSFLQEGQRKAGAAVTTETEVIWARALPAGTSAQRAELIALTQALKMAEGKKLNVYTDSRYAFATAHIHGEIYRRRGWLTSEGKEIKNKDEILALLKALFLPKRLSIIHCPGHQKGNSAEARGNRMADQAAREVATRETPETSTLLAGKRTADGSEFEKRTADGSEFESPKKKAKVE

SEQ ID NO: 2239 - protein, 2096 aa, synthetic construct
MPAAKRVKLDGGDKKYSIGLDIGTNSVGWAVITDEYKVPSKKFKVLGNTDRHSIKKNLIGALLFDSGETAEATRLKRTARRRYTRRKNRICYLQEIFSNEMAKVDDSFFHRLEESFLVEEDKKHERHPIFGNIVDEVAYHEKYPTIYHLRKKLVDSTDKADLRLIYLALAHMIKFRGHFLIEGDLNPDNSDVDKLFIQLVQTYNQLFEENPINASGVDAKAILSARLSKSRRLENLIAQLPGEKKNGLFGNLIALSLGLTPNFKSNFDLAEDAKLQLSKDTYDDDLDNLLAQIGDQYADLFLAAKNLSDAILLSDILRVNTEITKAPLSASMIKRYDEHHQDLTLLKALVRQQLPEKYKEIFFDQSKNGYAGYIDGGASQEEFYKFIKPILEKMDGTEELLVKLNREDLLRKQRTFDNGSIPHQIHLGELHAILRRQEDFYPFLKDNREKIEKILTFRIPYYVGPLARGNSRFAWMTRKSEETITPWNFEEVVDKGASAQSFIERMTNFDKNLPNEKVLPKHSLLYEYFTVYNELTKVKYVTEGMRKPAFLSGEQKKAIVDLLFKTNRKVTVKQLKEDYFKKIECFDSVEISGVEDRFNASLGTYHDLLKIIKDKDFLDNEENEDILEDIVLTLTLFEDREMIEERLKTYAHLFDDKVMKQLKRRRYTGWGRLSRKLINGIRDKQSGKTILDFLKSDGFANRNFMQLIHDDSLTFKEDIQKAQVSGQGDSLHEHIANLAGSPAIKKGILQTVKVVDELVKVMGRHKPENIVIEMARENQTTQKGQKNSRERMKRIEEGIKELGSQILKEHPVENTQLQNEKLYLYYLQNGRDMYVDQELDINRLSDYDVDHIVPQSFLKDDSIDNKVLTRSDKARGKSDNVPSEEVVKKMKNYWRQLLNAKLITQRKFDNLTKAERGGLSELDKAGFIKRQLVETRQITKHVAQILDSRMNTKYDENDKLIREVKVITLKSKLVSDFRKDFQFYKVREINNYHHAHDAYLNAVVGTALIKKYPKLESEFVYGDYKVYDVRKMIAKSEQEIGKATAKYFFYSNIMNFFKTEITLANGEIRKRPLIETNGETGEIVWDKGRDFATVRKVLSMPQVNIVKKTEVQTGGFSKESILPKRNSDKLIARKKDWDPKKYGGFDSPTVAYSVLVVAKVEKGKSKKLKSVKELLGITIMERSSFEKNPIDFLEAKGYKEVKKDLIIKLPKYSLFELENGRKRMLASAGELQKGNELALPSKYVNFLYLASHYEKLKGSPEDNEQKQLFVEQHKHYLDEIIEQISEFSKRVILADANLDKVLSAYNKHRDKPIREQAENIIHLFTLTNLGAPAAFKYFDTTIDRKRYTSTKEVLDATLIHQSITGLYETRIDLSQLGGDGGEAAAKGGSGSSGGTLNIEDEYRLHETSKEPDVSLGSTWLSDFPQAWAETGGMGLAVRQAPLIIPLKATSTPVSIKQYPMSQEARLGIKPHIQRLLDQGILVPCQSPWNTPLLPVKKPGTNDYRPVQDLREVNKRVEDIHPTVPNPYNLLSGLPPSHQWYTVLDLKDAFFCLRLHPTSQPLFAFEWRDPEMGISGQLTWTRLPQGFKNSPTLFNEALHRDLAGFRIQHPDLILLQYVDDLLLAATSELDCQQGTRALLQTLGDLGYRASAKKAQICQKQVKYLGYLLKEGQRWLTEARKETVMGQPIPKTPRQLREFLGTAGFCRLWIPGFAEMAAPLYPLTKPGTLFNWGPDQQKAFQEIKQALLTAPALGLPDLTKPFELFVDEKQGYAKGVLTQKLGPWRRPVAYLSKKLDPVAAGWPPCLRMVAAIAVLTKDAGKLTMGQPLVILAPHAVEALVKQPPDRWLSNARMTHYQALLLDTDRVQFGPVVALNPATLLPLPEEGLQHDCLDILAEAHGTRSDLMDQPLPDADHTWYTDGSSFLQEGQRKAGAAVTTETEVIWARALPAGTSAQRAELIALTQALKMAEGKKLNVYTDSRYAFATAHIHGEIYRRRGWLTSEGKEIKNKDEILALLKALFLPKRLSIIHCPGHQKGNSAEARGNRMADQAAREVATRETPETSTLLAGKRTADGSEFEKRTADGSEFESPKKKAKVE

SEQ ID NO: 2240 - protein, 2100 aa, synthetic construct
MPAAKRVKLDGGDKKYSIGLDIGTNSVGWAVITDEYKVPSKKFKVLGNTDRHSIKKNLIGALLFDSGETAEATRLKRTARRRYTRRKNRICYLQEIFSNEMAKVDDSFFHRLEESFLVEEDKKHERHPIFGNIVDEVAYHEKYPTIYHLRKKLVDSTDKADLRLIYLALAHMIKFRGHFLIEGDLNPDNSDVDKLFIQLVQTYNQLFEENPINASGVDAKAILSARLSKSRRLENLIAQLPGEKKNGLFGNLIALSLGLTPNFKSNFDLAEDAKLQLSKDTYDDDLDNLLAQIGDQYADLFLAAKNLSDAILLSDILRVNTEITKAPLSASMIKRYDEHHQDLTLLKALVRQQLPEKYKEIFFDQSKNGYAGYIDGGASQEEFYKFIKPILEKMDGTEELLVKLNREDLLRKQRTFDNGSIPHQIHLGELHAILRRQEDFYPFLKDNREKIEKILTFRIPYYVGPLARGNSRFAWMTRKSEETITPWNFEEVVDKGASAQSFIERMTNFDKNLPNEKVLPKHSLLYEYFTVYNELTKVKYVTEGMRKPAFLSGEQKKAIVDLLFKTNRKVTVKQLKEDYFKKIECFDSVEISGVEDRFNASLGTYHDLLKIIKDKDFLDNEENEDILEDIVLTLTLFEDREMIEERLKTYAHLFDDKVMKQLKRRRYTGWGRLSRKLINGIRDKQSGKTILDFLKSDGFANRNFMQLIHDDSLTFKEDIQKAQVSGQGDSLHEHIANLAGSPAIKKGILQTVKVVDELVKVMGRHKPENIVIEMARENQTTQKGQKNSRERMKRIEEGIKELGSQILKEHPVENTQLQNEKLYLYYLQNGRDMYVDQELDINRLSDYDVDHIVPQSFLKDDSIDNKVLTRSDKARGKSDNVPSEEVVKKMKNYWRQLLNAKLITQRKFDNLTKAERGGLSELDKAGFIKRQLVETRQITKHVAQILDSRMNTKYDENDKLIREVKVITLKSKLVSDFRKDFQFYKVREINNYHHAHDAYLNAVVGTALIKKYPKLESEFVYGDYKVYDVRKMIAKSEQEIGKATAKYFFYSNIMNFFKTEITLANGEIRKRPLIETNGETGEIVWDKGRDFATVRKVLSMPQVNIVKKTEVQTGGFSKESILPKRNSDKLIARKKDWDPKKYGGFDSPTVAYSVLVVAKVEKGKSKKLKSVKELLGITIMERSSFEKNPIDFLEAKGYKEVKKDLIIKLPKYSLFELENGRKRMLASAGELQKGNELALPSKYVNFLYLASHYEKLKGSPEDNEQKQLFVEQHKHYLDEIIEQISEFSKRVILADANLDKVLSAYNKHRDKPIREQAENIIHLFTLTNLGAPAAFKYFDTTIDRKRYTSTKEVLDATLIHQSITGLYETRIDLSQLGGDGGGGGGSGGGGSGGGGSGGTLNIEDEYRLHETSKEPDVSLGSTWLSDFPQAWAETGGMGLAVRQAPLIIPLKATSTPVSIKQYPMSQEARLGIKPHIQRLLDQGILVPCQSPWNTPLLPVKKPGTNDYRPVQDLREVNKRVEDIHPTVPNPYNLLSGLPPSHQWYTVLDLKDAFFCLRLHPTSQPLFAFEWRDPEMGISGQLTWTRLPQGFKNSPTLFNEALHRDLAGFRIQHPDLILLQYVDDLLLAATSELDCQQGTRALLQTLGDLGYRASAKKAQICQKQVKYLGYLLKEGQRWLTEARKETVMGQPIPKTPRQLREFLGTAGFCRLWIPGFAEMAAPLYPLTKPGTLFNWGPDQQKAFQEIKQALLTAPALGLPDLTKPFELFVDEKQGYAKGVLTQKLGPWRRPVAYLSKKLDPVAAGWPPCLRMVAAIAVLTKDAGKLTMGQPLVILAPHAVEALVKQPPDRWLSNARMTHYQALLLDTDRVQFGPVVALNPATLLPLPEEGLQHDCLDILAEAHGTRSDLMDQPLPDADHTWYTDGSSFLQEGQRKAGAAVTTETEVIWARALPAGTSAQRAELIALTQALKMAEGKKLNVYTDSRYAFATAHIHGEIYRRRGWLTSEGKEIKNKDEILALLKALFLPKRLSIIHCPGHQKGNSAEARGNRMADQAAREVATRETPETSTLLAGKRTADGSEFEKRTADGSEFESPKKKAKVE

SEQ ID NO: 2241 - protein, 2093 aa, synthetic construct
MPAAKRVKLDGGDKKYSIGLDIGTNSVGWAVITDEYKVPSKKFKVLGNTDRHSIKKNLIGALLFDSGETAEATRLKRTARRRYTRRKNRICYLQEIFSNEMAKVDDSFFHRLEESFLVEEDKKHERHPIFGNIVDEVAYHEKYPTIYHLRKKLVDSTDKADLRLIYLALAHMIKFRGHFLIEGDLNPDNSDVDKLFIQLVQTYNQLFEENPINASGVDAKAILSARLSKSRRLENLIAQLPGEKKNGLFGNLIALSLGLTPNFKSNFDLAEDAKLQLSKDTYDDDLDNLLAQIGDQYADLFLAAKNLSDAILLSDILRVNTEITKAPLSASMIKRYDEHHQDLTLLKALVRQQLPEKYKEIFFDQSKNGYAGYIDGGASQEEFYKFIKPILEKMDGTEELLVKLNREDLLRKQRTFDNGSIPHQIHLGELHAILRRQEDFYPFLKDNREKIEKILTFRIPYYVGPLARGNSRFAWMTRKSEETITPWNFEEVVDKGASAQSFIERMTNFDKNLPNEKVLPKHSLLYEYFTVYNELTKVKYVTEGMRKPAFLSGEQKKAIVDLLFKTNRKVTVKQLKEDYFKKIECFDSVEISGVEDRFNASLGTYHDLLKIIKDKDFLDNEENEDILEDIVLTLTLFEDREMIEERLKTYAHLFDDKVMKQLKRRRYTGWGRLSRKLINGIRDKQSGKTILDFLKSDGFANRNFMQLIHDDSLTFKEDIQKAQVSGQGDSLHEHIANLAGSPAIKKGILQTVKVVDELVKVMGRHKPENIVIEMARENQTTQKGQKNSRERMKRIEEGIKELGSQILKEHPVENTQLQNEKLYLYYLQNGRDMYVDQELDINRLSDYDVDHIVPQSFLKDDSIDNKVLTRSDKARGKSDNVPSEEVVKKMKNYWRQLLNAKLITQRKFDNLTKAERGGLSELDKAGFIKRQLVETRQITKHVAQILDSRMNTKYDENDKLIREVKVITLKSKLVSDFRKDFQFYKVREINNYHHAHDAYLNAVVGTALIKKYPKLESEFVYGDYKVYDVRKMIAKSEQEIGKATAKYFFYSNIMNFFKTEITLANGEIRKRPLIETNGETGEIVWDKGRDFATVRKVLSMPQVNIVKKTEVQTGGFSKESILPKRNSDKLIARKKDWDPKKYGGFDSPTVAYSVLVVAKVEKGKSKKLKSVKELLGITIMERSSFEKNPIDFLEAKGYKEVKKDLIIKLPKYSLFELENGRKRMLASAGELQKGNELALPSKYVNFLYLASHYEKLKGSPEDNEQKQLFVEQHKHYLDEIIEQISEFSKRVILADANLDKVLSAYNKHRDKPIREQAENIIHLFTLTNLGAPAAFKYFDTTIDRKRYTSTKEVLDATLIHQSITGLYETRIDLSQLGGDGGGGGEAAAKGGTLNIEDEYRLHETSKEPDVSLGSTWLSDFPQAWAETGGMGLAVRQAPLIIPLKATSTPVSIKQYPMSQEARLGIKPHIQRLLDQGILVPCQSPWNTPLLPVKKPGTNDYRPVQDLREVNKRVEDIHPTVPNPYNLLSGLPPSHQWYTVLDLKDAFFCLRLHPTSQPLFAFEWRDPEMGISGQLTWTRLPQGFKNSPTLFNEALHRDLAGFRIQHPDLILLQYVDDLLLAATSELDCQQGTRALLQTLGDLGYRASAKKAQICQKQVKYLGYLLKEGQRWLTEARKETVMGQPIPKTPRQLREFLGTAGFCRLWIPGFAEMAAPLYPLTKPGTLFNWGPDQQKAFQEIKQALLTAPALGLPDLTKPFELFVDEKQGYAKGVLTQKLGPWRRPVAYLSKKLDPVAAGWPPCLRMVAAIAVLTKDAGKLTMGQPLVILAPHAVEALVKQPPDRWLSNARMTHYQALLLDTDRVQFGPVVALNPATLLPLPEEGLQHDCLDILAEAHGTRSDLMDQPLPDADHTWYTDGSSFLQEGQRKAGAAVTTETEVIWARALPAGTSAQRAELIALTQALKMAEGKKLNVYTDSRYAFATAHIHGEIYRRRGWLTSEGKEIKNKDEILALLKALFLPKRLSIIHCPGHQKGNSAEARGNRMADQAAREVATRETPETSTLLAGKRTADGSEFEKRTADGSEFESPKKKAKVE

SEQ ID NO: 2242 - protein, 2088 aa, synthetic construct
MPAAKRVKLDGGDKKYSIGLDIGTNSVGWAVITDEYKVPSKKFKVLGNTDRHSIKKNLIGALLFDSGETAEATRLKRTARRRYTRRKNRICYLQEIFSNEMAKVDDSFFHRLEESFLVEEDKKHERHPIFGNIVDEVAYHEKYPTIYHLRKKLVDSTDKADLRLIYLALAHMIKFRGHFLIEGDLNPDNSDVDKLFIQLVQTYNQLFEENPINASGVDAKAILSARLSKSRRLENLIAQLPGEKKNGLFGNLIALSLGLTPNFKSNFDLAEDAKLQLSKDTYDDDLDNLLAQIGDQYADLFLAAKNLSDAILLSDILRVNTEITKAPLSASMIKRYDEHHQDLTLLKALVRQQLPEKYKEIFFDQSKNGYAGYIDGGASQEEFYKFIKPILEKMDGTEELLVKLNREDLLRKQRTFDNGSIPHQIHLGELHAILRRQEDFYPFLKDNREKIEKILTFRIPYYVGPLARGNSRFAWMTRKSEETITPWNFEEVVDKGASAQSFIERMTNFDKNLPNEKVLPKHSLLYEYFTVYNELTKVKYVTEGMRKPAFLSGEQKKAIVDLLFKTNRKVTVKQLKEDYFKKIECFDSVEISGVEDRFNASLGTYHDLLKIIKDKDFLDNEENEDILEDIVLTLTLFEDREMIEERLKTYAHLFDDKVMKQLKRRRYTGWGRLSRKLINGIRDKQSGKTILDFLKSDGFANRNFMQLIHDDSLTFKEDIQKAQVSGQGDSLHEHIANLAGSPAIKKGILQTVKVVDELVKVMGRHKPENIVIEMARENQTTQKGQKNSRERMKRIEEGIKELGSQILKEHPVENTQLQNEKLYLYYLQNGRDMYVDQELDINRLSDYDVDHIVPQSFLKDDSIDNKVLTRSDKARGKSDNVPSEEVVKKMKNYWRQLLNAKLITQRKFDNLTKAERGGLSELDKAGFIKRQLVETRQITKHVAQILDSRMNTKYDENDKLIREVKVITLKSKLVSDFRKDFQFYKVREINNYHHAHDAYLNAVVGTALIKKYPKLESEFVYGDYKVYDVRKMIAKSEQEIGKATAKYFFYSNIMNFFKTEITLANGEIRKRPLIETNGETGEIVWDKGRDFATVRKVLSMPQVNIVKKTEVQTGGFSKESILPKRNSDKLIARKKDWDPKKYGGFDSPTVAYSVLVVAKVEKGKSKKLKSVKELLGITIMERSSFEKNPIDFLEAKGYKEVKKDLIIKLPKYSLFELENGRKRMLASAGELQKGNELALPSKYVNFLYLASHYEKLKGSPEDNEQKQLFVEQHKHYLDEIIEQISEFSKRVILADANLDKVLSAYNKHRDKPIREQAENIIHLFTLTNLGAPAAFKYFDTTIDRKRYTSTKEVLDATLIHQSITGLYETRIDLSQLGGDGGGSSGGTLNIEDEYRLHETSKEPDVSLGSTWLSDFPQAWAETGGMGLAVRQAPLIIPLKATSTPVSIKQYPMSQEARLGIKPHIQRLLDQGILVPCQSPWNTPLLPVKKPGTNDYRPVQDLREVNKRVEDIHPTVPNPYNLLSGLPPSHQWYTVLDLKDAFFCLRLHPTSQPLFAFEWRDPEMGISGQLTWTRLPQGFKNSPTLFNEALHRDLAGFRIQHPDLILLQYVDDLLLAATSELDCQQGTRALLQTLGDLGYRASAKKAQICQKQVKYLGYLLKEGQRWLTEARKETVMGQPIPKTPRQLREFLGTAGFCRLWIPGFAEMAAPLYPLTKPGTLFNWGPDQQKAFQEIKQALLTAPALGLPDLTKPFELFVDEKQGYAKGVLTQKLGPWRRPVAYLSKKLDPVAAGWPPCLRMVAAIAVLTKDAGKLTMGQPLVILAPHAVEALVKQPPDRWLSNARMTHYQALLLDTDRVQFGPVVALNPATLLPLPEEGLQHDCLDILAEAHGTRSDLMDQPLPDADHTWYTDGSSFLQEGQRKAGAAVTTETEVIWARALPAGTSAQRAELIALTQALKMAEGKKLNVYTDSRYAFATAHIHGEIYRRRGWLTSEGKEIKNKDEILALLKALFLPKRLSIIHCPGHQKGNSAEARGNRMADQAAREVATRETPETSTLLAGKRTADGSEFEKRTADGSEFESPKKKAKVE

SEQ ID NO: 2243 - protein, 2090 aa, synthetic construct
MPAAKRVKLDGGDKKYSIGLDIGTNSVGWAVITDEYKVPSKKFKVLGNTDRHSIKKNLIGALLFDSGETAEATRLKRTARRRYTRRKNRICYLQEIFSNEMAKVDDSFFHRLEESFLVEEDKKHERHPIFGNIVDEVAYHEKYPTIYHLRKKLVDSTDKADLRLIYLALAHMIKFRGHFLIEGDLNPDNSDVDKLFIQLVQTYNQLFEENPINASGVDAKAILSARLSKSRRLENLIAQLPGEKKNGLFGNLIALSLGLTPNFKSNFDLAEDAKLQLSKDTYDDDLDNLLAQIGDQYADLFLAAKNLSDAILLSDILRVNTEITKAPLSASMIKRYDEHHQDLTLLKALVRQQLPEKYKEIFFDQSKNGYAGYIDGGASQEEFYKFIKPILEKMDGTEELLVKLNREDLLRKQRTFDNGSIPHQIHLGELHAILRRQEDFYPFLKDNREKIEKILTFRIPYYVGPLARGNSRFAWMTRKSEETITPWNFEEVVDKGASAQSFIERMTNFDKNLPNEKVLPKHSLLYEYFTVYNELTKVKYVTEGMRKPAFLSGEQKKAIVDLLFKTNRKVTVKQLKEDYFKKIECFDSVEISGVEDRFNASLGTYHDLLKIIKDKDFLDNEENEDILEDIVLTLTLFEDREMIEERLKTYAHLFDDKVMKQLKRRRYTGWGRLSRKLINGIRDKQSGKTILDFLKSDGFANRNFMQLIHDDSLTFKEDIQKAQVSGQGDSLHEHIANLAGSPAIKKGILQTVKVVDELVKVMGRHKPENIVIEMARENQTTQKGQKNSRERMKRIEEGIKELGSQILKEHPVENTQLQNEKLYLYYLQNGRDMYVDQELDINRLSDYDVDHIVPQSFLKDDSIDNKVLTRSDKARGKSDNVPSEEVVKKMKNYWRQLLNAKLITQRKFDNLTKAERGGLSELDKAGFIKRQLVETRQITKHVAQILDSRMNTKYDENDKLIREVKVITLKSKLVSDFRKDFQFYKVREINNYHHAHDAYLNAVVGTALIKKYPKLESEFVYGDYKVYDVRKMIAKSEQEIGKATAKYFFYSNIMNFFKTEITLANGEIRKRPLIETNGETGEIVWDKGRDFATVRKVLSMPQVNIVKKTEVQTGGFSKESILPKRNSDKLIARKKDWDPKKYGGFDSPTVAYSVLVVAKVEKGKSKKLKSVKELLGITIMERSSFEKNPIDFLEAKGYKEVKKDLIIKLPKYSLFELENGRKRMLASAGELQKGNELALPSKYVNFLYLASHYEKLKGSPEDNEQKQLFVEQHKHYLDEIIEQISEFSKRVILADANLDKVLSAYNKHRDKPIREQAENIIHLFTLTNLGAPAAFKYFDTTIDRKRYTSTKEVLDATLIHQSITGLYETRIDLSQLGGDGGPAPAPGGTLNIEDEYRLHETSKEPDVSLGSTWLSDFPQAWAETGGMGLAVRQAPLIIPLKATSTPVSIKQYPMSQEARLGIKPHIQRLLDQGILVPCQSPWNTPLLPVKKPGTNDYRPVQDLREVNKRVEDIHPTVPNPYNLLSGLPPSHQWYTVLDLKDAFFCLRLHPTSQPLFAFEWRDPEMGISGQLTWTRLPQGFKNSPTLFNEALHRDLAGFRIQHPDLILLQYVDDLLLAATSELDCQQGTRALLQTLGDLGYRASAKKAQICQKQVKYLGYLLKEGQRWLTEARKETVMGQPIPKTPRQLREFLGTAGFCRLWIPGFAEMAAPLYPLTKPGTLFNWGPDQQKAFQEIKQALLTAPALGLPDLTKPFELFVDEKQGYAKGVLTQKLGPWRRPVAYLSKKLDPVAAGWPPCLRMVAAIAVLTKDAGKLTMGQPLVILAPHAVEALVKQPPDRWLSNARMTHYQALLLDTDRVQFGPVVALNPATLLPLPEEGLQHDCLDILAEAHGTRSDLMDQPLPDADHTWYTDGSSFLQEGQRKAGAAVTTETEVIWARALPAGTSAQRAELIALTQALKMAEGKKLNVYTDSRYAFATAHIHGEIYRRRGWLTSEGKEIKNKDEILALLKALFLPKRLSIIHCPGHQKGNSAEARGNRMADQAAREVATRETPETSTLLAGKRTADGSEFEKRTADGSEFESPKKKAKVE

SEQ ID NO: 2244 - protein, 2096 aa, synthetic construct
MPAAKRVKLDGGDKKYSIGLDIGTNSVGWAVITDEYKVPSKKFKVLGNTDRHSIKKNLIGALLFDSGETAEATRLKRTARRRYTRRKNRICYLQEIFSNEMAKVDDSFFHRLEESFLVEEDKKHERHPIFGNIVDEVAYHEKYPTIYHLRKKLVDSTDKADLRLIYLALAHMIKFRGHFLIEGDLNPDNSDVDKLFIQLVQTYNQLFEENPINASGVDAKAILSARLSKSRRLENLIAQLPGEKKNGLFGNLIALSLGLTPNFKSNFDLAEDAKLQLSKDTYDDDLDNLLAQIGDQYADLFLAAKNLSDAILLSDILRVNTEITKAPLSASMIKRYDEHHQDLTLLKALVRQQLPEKYKEIFFDQSKNGYAGYIDGGASQEEFYKFIKPILEKMDGTEELLVKLNREDLLRKQRTFDNGSIPHQIHLGELHAILRRQEDFYPFLKDNREKIEKILTFRIPYYVGPLARGNSRFAWMTRKSEETITPWNFEEVVDKGASAQSFIERMTNFDKNLPNEKVLPKHSLLYEYFTVYNELTKVKYVTEGMRKPAFLSGEQKKAIVDLLFKTNRKVTVKQLKEDYFKKIECFDSVEISGVEDRFNASLGTYHDLLKIIKDKDFLDNEENEDILEDIVLTLTLFEDREMIEERLKTYAHLFDDKVMKQLKRRRYTGWGRLSRKLINGIRDKQSGKTILDFLKSDGFANRNFMQLIHDDSLTFKEDIQKAQVSGQGDSLHEHIANLAGSPAIKKGILQTVKVVDELVKVMGRHKPENIVIEMARENQTTQKGQKNSRERMKRIEEGIKELGSQILKEHPVENTQLQNEKLYLYYLQNGRDMYVDQELDINRLSDYDVDHIVPQSFLKDDSIDNKVLTRSDKARGKSDNVPSEEVVKKMKNYWRQLLNAKLITQRKFDNLTKAERGGLSELDKAGFIKRQLVETRQITKHVAQILDSRMNTKYDENDKLIREVKVITLKSKLVSDFRKDFQFYKVREINNYHHAHDAYLNAVVGTALIKKYPKLESEFVYGDYKVYDVRKMIAKSEQEIGKATAKYFFYSNIMNFFKTEITLANGEIRKRPLIETNGETGEIVWDKGRDFATVRKVLSMPQVNIVKKTEVQTGGFSKESILPKRNSDKLIARKKDWDPKKYGGFDSPTVAYSVLVVAKVEKGKSKKLKSVKELLGITIMERSSFEKNPIDFLEAKGYKEVKKDLIIKLPKYSLFELENGRKRMLASAGELQKGNELALPSKYVNFLYLASHYEKLKGSPEDNEQKQLFVEQHKHYLDEIIEQISEFSKRVILADANLDKVLSAYNKHRDKPIREQAENIIHLFTLTNLGAPAAFKYFDTTIDRKRYTSTKEVLDATLIHQSITGLYETRIDLSQLGGDGGGSSEAAAKGGSGGTLNIEDEYRLHETSKEPDVSLGSTWLSDFPQAWAETGGMGLAVRQAPLIIPLKATSTPVSIKQYPMSQEARLGIKPHIQRLLDQGILVPCQSPWNTPLLPVKKPGTNDYRPVQDLREVNKRVEDIHPTVPNPYNLLSGLPPSHQWYTVLDLKDAFFCLRLHPTSQPLFAFEWRDPEMGISGQLTWTRLPQGFKNSPTLFNEALHRDLAGFRIQHPDLILLQYVDDLLLAATSELDCQQGTRALLQTLGDLGYRASAKKAQICQKQVKYLGYLLKEGQRWLTEARKETVMGQPIPKTPRQLREFLGTAGFCRLWIPGFAEMAAPLYPLTKPGTLFNWGPDQQKAFQEIKQALLTAPALGLPDLTKPFELFVDEKQGYAKGVLTQKLGPWRRPVAYLSKKLDPVAAGWPPCLRMVAAIAVLTKDAGKLTMGQPLVILAPHAVEALVKQPPDRWLSNARMTHYQALLLDTDRVQFGPVVALNPATLLPLPEEGLQHDCLDILAEAHGTRSDLMDQPLPDADHTWYTDGSSFLQEGQRKAGAAVTTETEVIWARALPAGTSAQRAELIALTQALKMAEGKKLNVYTDSRYAFATAHIHGEIYRRRGWLTSEGKEIKNKDEILALLKALFLPKRLSIIHCPGHQKGNSAEARGNRMADQAAREVATRETPETSTLLAGKRTADGSEFEKRTADGSEFESPKKKAKVE

SEQ ID NO: 2245 - protein, 2091 aa, synthetic construct
MPAAKRVKLDGGDKKYSIGLDIGTNSVGWAVITDEYKVPSKKFKVLGNTDRHSIKKNLIGALLFDSGETAEATRLKRTARRRYTRRKNRICYLQEIFSNEMAKVDDSFFHRLEESFLVEEDKKHERHPIFGNIVDEVAYHEKYPTIYHLRKKLVDSTDKADLRLIYLALAHMIKFRGHFLIEGDLNPDNSDVDKLFIQLVQTYNQLFEENPINASGVDAKAILSARLSKSRRLENLIAQLPGEKKNGLFGNLIALSLGLTPNFKSNFDLAEDAKLQLSKDTYDDDLDNLLAQIGDQYADLFLAAKNLSDAILLSDILRVNTEITKAPLSASMIKRYDEHHQDLTLLKALVRQQLPEKYKEIFFDQSKNGYAGYIDGGASQEEFYKFIKPILEKMDGTEELLVKLNREDLLRKQRTFDNGSIPHQIHLGELHAILRRQEDFYPFLKDNREKIEKILTFRIPYYVGPLARGNSRFAWMTRKSEETITPWNFEEVVDKGASAQSFIERMTNFDKNLPNEKVLPKHSLLYEYFTVYNELTKVKYVTEGMRKPAFLSGEQKKAIVDLLFKTNRKVTVKQLKEDYFKKIECFDSVEISGVEDRFNASLGTYHDLLKIIKDKDFLDNEENEDILEDIVLTLTLFEDREMIEERLKTYAHLFDDKVMKQLKRRRYTGWGRLSRKLINGIRDKQSGKTILDFLKSDGFANRNFMQLIHDDSLTFKEDIQKAQVSGQGDSLHEHIANLAGSPAIKKGILQTVKVVDELVKVMGRHKPENIVIEMARENQTTQKGQKNSRERMKRIEEGIKELGSQILKEHPVENTQLQNEKLYLYYLQNGRDMYVDQELDINRLSDYDVDHIVPQSFLKDDSIDNKVLTRSDKARGKSDNVPSEEVVKKMKNYWRQLLNAKLITQRKFDNLTKAERGGLSELDKAGFIKRQLVETRQITKHVAQILDSRMNTKYDENDKLIREVKVITLKSKLVSDFRKDFQFYKVREINNYHHAHDAYLNAVVGTALIKKYPKLESEFVYGDYKVYDVRKMIAKSEQEIGKATAKYFFYSNIMNFFKTEITLANGEIRKRPLIETNGETGEIVWDKGRDFATVRKVLSMPQVNIVKKTEVQTGGFSKESILPKRNSDKLIARKKDWDPKKYGGFDSPTVAYSVLVVAKVEKGKSKKLKSVKELLGITIMERSSFEKNPIDFLEAKGYKEVKKDLIIKLPKYSLFELENGRKRMLASAGELQKGNELALPSKYVNFLYLASHYEKLKGSPEDNEQKQLFVEQHKHYLDEIIEQISEFSKRVILADANLDKVLSAYNKHRDKPIREQAENIIHLFTLTNLGAPAAFKYFDTTIDRKRYTSTKEVLDATLIHQSITGLYETRIDLSQLGGDGGPAPGGSGGTLNIEDEYRLHETSKEPDVSLGSTWLSDFPQAWAETGGMGLAVRQAPLIIPLKATSTPVSIKQYPMSQEARLGIKPHIQRLLDQGILVPCQSPWNTPLLPVKKPGTNDYRPVQDLREVNKRVEDIHPTVPNPYNLLSGLPPSHQWYTVLDLKDAFFCLRLHPTSQPLFAFEWRDPEMGISGQLTWTRLPQGFKNSPTLFNEALHRDLAGFRIQHPDLILLQYVDDLLLAATSELDCQQGTRALLQTLGDLGYRASAKKAQICQKQVKYLGYLLKEGQRWLTEARKETVMGQPIPKTPRQLREFLGTAGFCRLWIPGFAEMAAPLYPLTKPGTLFNWGPDQQKAFQEIKQALLTAPALGLPDLTKPFELFVDEKQGYAKGVLTQKLGPWRRPVAYLSKKLDPVAAGWPPCLRMVAAIAVLTKDAGKLTMGQPLVILAPHAVEALVKQPPDRWLSNARMTHYQALLLDTDRVQFGPVVALNPATLLPLPEEGLQHDCLDILAEAHGTRSDLMDQPLPDADHTWYTDGSSFLQEGQRKAGAAVTTETEVIWARALPAGTSAQRAELIALTQALKMAEGKKLNVYTDSRYAFATAHIHGEIYRRRGWLTSEGKEIKNKDEILALLKALFLPKRLSIIHCPGHQKGNSAEARGNRMADQAAREVATRETPETSTLLAGKRTADGSEFEKRTADGSEFESPKKKAKVE

SEQ ID NO: 2246 - protein, 2096 aa, synthetic construct
MPAAKRVKLDGGDKKYSIGLDIGTNSVGWAVITDEYKVPSKKFKVLGNTDRHSIKKNLIGALLFDSGETAEATRLKRTARRRYTRRKNRICYLQEIFSNEMAKVDDSFFHRLEESFLVEEDKKHERHPIFGNIVDEVAYHEKYPTIYHLRKKLVDSTDKADLRLIYLALAHMIKFRGHFLIEGDLNPDNSDVDKLFIQLVQTYNQLFEENPINASGVDAKAILSARLSKSRRLENLIAQLPGEKKNGLFGNLIALSLGLTPNFKSNFDLAEDAKLQLSKDTYDDDLDNLLAQIGDQYADLFLAAKNLSDAILLSDILRVNTEITKAPLSASMIKRYDEHHQDLTLLKALVRQQLPEKYKEIFFDQSKNGYAGYIDGGASQEEFYKFIKPILEKMDGTEELLVKLNREDLLRKQRTFDNGSIPHQIHLGELHAILRRQEDFYPFLKDNREKIEKILTFRIPYYVGPLARGNSRFAWMTRKSEETITPWNFEEVVDKGASAQSFIERMTNFDKNLPNEKVLPKHSLLYEYFTVYNELTKVKYVTEGMRKPAFLSGEQKKAIVDLLFKTNRKVTVKQLKEDYFKKIECFDSVEISGVEDRFNASLGTYHDLLKIIKDKDFLDNEENEDILEDIVLTLTLFEDREMIEERLKTYAHLFDDKVMKQLKRRRYTGWGRLSRKLINGIRDKQSGKTILDFLKSDGFANRNFMQLIHDDSLTFKEDIQKAQVSGQGDSLHEHIANLAGSPAIKKGILQTVKVVDELVKVMGRHKPENIVIEMARENQTTQKGQKNSRERMKRIEEGIKELGSQILKEHPVENTQLQNEKLYLYYLQNGRDMYVDQELDINRLSDYDVDHIVPQSFLKDDSIDNKVLTRSDKARGKSDNVPSEEVVKKMKNYWRQLLNAKLITQRKFDNLTKAERGGLSELDKAGFIKRQLVETRQITKHVAQILDSRMNTKYDENDKLIREVKVITLKSKLVSDFRKDFQFYKVREINNYHHAHDAYLNAVVGTALIKKYPKLESEFVYGDYKVYDVRKMIAKSEQEIGKATAKYFFYSNIMNFFKTEITLANGEIRKRPLIETNGETGEIVWDKGRDFATVRKVLSMPQVNIVKKTEVQTGGFSKESILPKRNSDKLIARKKDWDPKKYGGFDSPTVAYSVLVVAKVEKGKSKKLKSVKELLGITIMERSSFEKNPIDFLEAKGYKEVKKDLIIKLPKYSLFELENGRKRMLASAGELQKGNELALPSKYVNFLYLASHYEKLKGSPEDNEQKQLFVEQHKHYLDEIIEQISEFSKRVILADANLDKVLSAYNKHRDKPIREQAENIIHLFTLTNLGAPAAFKYFDTTIDRKRYTSTKEVLDATLIHQSITGLYETRIDLSQLGGDGGGGGGGSEAAAKGGTLNIEDEYRLHETSKEPDVSLGSTWLSDFPQAWAETGGMGLAVRQAPLIIPLKATSTPVSIKQYPMSQEARLGIKPHIQRLLDQGILVPCQSPWNTPLLPVKKPGTNDYRPVQDLREVNKRVEDIHPTVPNPYNLLSGLPPSHQWYTVLDLKDAFFCLRLHPTSQPLFAFEWRDPEMGISGQLTWTRLPQGFKNSPTLFNEALHRDLAGFRIQHPDLILLQYVDDLLLAATSELDCQQGTRALLQTLGDLGYRASAKKAQICQKQVKYLGYLLKEGQRWLTEARKETVMGQPIPKTPRQLREFLGTAGFCRLWIPGFAEMAAPLYPLTKPGTLFNWGPDQQKAFQEIKQALLTAPALGLPDLTKPFELFVDEKQGYAKGVLTQKLGPWRRPVAYLSKKLDPVAAGWPPCLRMVAAIAVLTKDAGKLTMGQPLVILAPHAVEALVKQPPDRWLSNARMTHYQALLLDTDRVQFGPVVALNPATLLPLPEEGLQHDCLDILAEAHGTRSDLMDQPLPDADHTWYTDGSSFLQEGQRKAGAAVTTETEVIWARALPAGTSAQRAELIALTQALKMAEGKKLNVYTDSRYAFATAHIHGEIYRRRGWLTSEGKEIKNKDEILALLKALFLPKRLSIIHCPGHQKGNSAEARGNRMADQAAREVATRETPETSTLLAGKRTADGSEFEKRTADGSEFESPKKKAKVE

SEQ ID NO: 2247 - protein, 2096 aa, synthetic construct
MPAAKRVKLDGGDKKYSIGLDIGTNSVGWAVITDEYKVPSKKFKVLGNTDRHSIKKNLIGALLFDSGETAEATRLKRTARRRYTRRKNRICYLQEIFSNEMAKVDDSFFHRLEESFLVEEDKKHERHPIFGNIVDEVAYHEKYPTIYHLRKKLVDSTDKADLRLIYLALAHMIKFRGHFLIEGDLNPDNSDVDKLFIQLVQTYNQLFEENPINASGVDAKAILSARLSKSRRLENLIAQLPGEKKNGLFGNLIALSLGLTPNFKSNFDLAEDAKLQLSKDTYDDDLDNLLAQIGDQYADLFLAAKNLSDAILLSDILRVNTEITKAPLSASMIKRYDEHHQDLTLLKALVRQQLPEKYKEIFFDQSKNGYAGYIDGGASQEEFYKFIKPILEKMDGTEELLVKLNREDLLRKQRTFDNGSIPHQIHLGELHAILRRQEDFYPFLKDNREKIEKILTFRIPYYVGPLARGNSRFAWMTRKSEETITPWNFEEVVDKGASAQSFIERMTNFDKNLPNEKVLPKHSLLYEYFTVYNELTKVKYVTEGMRKPAFLSGEQKKAIVDLLFKTNRKVTVKQLKEDYFKKIECFDSVEISGVEDRFNASLGTYHDLLKIIKDKDFLDNEENEDILEDIVLTLTLFEDREMIEERLKTYAHLFDDKVMKQLKRRRYTGWGRLSRKLINGIRDKQSGKTILDFLKSDGFANRNFMQLIHDDSLTFKEDIQKAQVSGQGDSLHEHIANLAGSPAIKKGILQTVKVVDELVKVMGRHKPENIVIEMARENQTTQKGQKNSRERMKRIEEGIKELGSQILKEHPVENTQLQNEKLYLYYLQNGRDMYVDQELDINRLSDYDVDHIVPQSFLKDDSIDNKVLTRSDKARGKSDNVPSEEVVKKMKNYWRQLLNAKLITQRKFDNLTKAERGGLSELDKAGFIKRQLVETRQITKHVAQILDSRMNTKYDENDKLIREVKVITLKSKLVSDFRKDFQFYKVREINNYHHAHDAYLNAVVGTALIKKYPKLESEFVYGDYKVYDVRKMIAKSEQEIGKATAKYFFYSNIMNFFKTEITLANGEIRKRPLIETNGETGEIVWDKGRDFATVRKVLSMPQVNIVKKTEVQTGGFSKESILPKRNSDKLIARKKDWDPKKYGGFDSPTVAYSVLVVAKVEKGKSKKLKSVKELLGITIMERSSFEKNPIDFLEAKGYKEVKKDLIIKLPKYSLFELENGRKRMLASAGELQKGNELALPSKYVNFLYLASHYEKLKGSPEDNEQKQLFVEQHKHYLDEIIEQISEFSKRVILADANLDKVLSAYNKHRDKPIREQAENIIHLFTLTNLGAPAAFKYFDTTIDRKRYTSTKEVLDATLIHQSITGLYETRIDLSQLGGDGGPAPAPAPAPAPGGTLNIEDEYRLHETSKEPDVSLGSTWLSDFPQAWAETGGMGLAVRQAPLIIPLKATSTPVSIKQYPMSQEARLGIKPHIQRLLDQGILVPCQSPWNTPLLPVKKPGTNDYRPVQDLREVNKRVEDIHPTVPNPYNLLSGLPPSHQWYTVLDLKDAFFCLRLHPTSQPLFAFEWRDPEMGISGQLTWTRLPQGFKNSPTLFNEALHRDLAGFRIQHPDLILLQYVDDLLLAATSELDCQQGTRALLQTLGDLGYRASAKKAQICQKQVKYLGYLLKEGQRWLTEARKETVMGQPIPKTPRQLREFLGTAGFCRLWIPGFAEMAAPLYPLTKPGTLFNWGPDQQKAFQEIKQALLTAPALGLPDLTKPFELFVDEKQGYAKGVLTQKLGPWRRPVAYLSKKLDPVAAGWPPCLRMVAAIAVLTKDAGKLTMGQPLVILAPHAVEALVKQPPDRWLSNARMTHYQALLLDTDRVQFGPVVALNPATLLPLPEEGLQHDCLDILAEAHGTRSDLMDQPLPDADHTWYTDGSSFLQEGQRKAGAAVTTETEVIWARALPAGTSAQRAELIALTQALKMAEGKKLNVYTDSRYAFATAHIHGEIYRRRGWLTSEGKEIKNKDEILALLKALFLPKRLSIIHCPGHQKGNSAEARGNRMADQAAREVATRETPETSTLLAGKRTADGSEFEKRTADGSEFESPKKKAKVE

SEQ ID NO: 2248 - protein, 2096 aa, synthetic construct
MPAAKRVKLDGGDKKYSIGLDIGTNSVGWAVITDEYKVPSKKFKVLGNTDRHSIKKNLIGALLFDSGETAEATRLKRTARRRYTRRKNRICYLQEIFSNEMAKVDDSFFHRLEESFLVEEDKKHERHPIFGNIVDEVAYHEKYPTIYHLRKKLVDSTDKADLRLIYLALAHMIKFRGHFLIEGDLNPDNSDVDKLFIQLVQTYNQLFEENPINASGVDAKAILSARLSKSRRLENLIAQLPGEKKNGLFGNLIALSLGLTPNFKSNFDLAEDAKLQLSKDTYDDDLDNLLAQIGDQYADLFLAAKNLSDAILLSDILRVNTEITKAPLSASMIKRYDEHHQDLTLLKALVRQQLPEKYKEIFFDQSKNGYAGYIDGGASQEEFYKFIKPILEKMDGTEELLVKLNREDLLRKQRTFDNGSIPHQIHLGELHAILRRQEDFYPFLKDNREKIEKILTFRIPYYVGPLARGNSRFAWMTRKSEETITPWNFEEVVDKGASAQSFIERMTNFDKNLPNEKVLPKHSLLYEYFTVYNELTKVKYVTEGMRKPAFLSGEQKKAIVDLLFKTNRKVTVKQLKEDYFKKIECFDSVEISGVEDRFNASLGTYHDLLKIIKDKDFLDNEENEDILEDIVLTLTLFEDREMIEERLKTYAHLFDDKVMKQLKRRRYTGWGRLSRKLINGIRDKQSGKTILDFLKSDGFANRNFMQLIHDDSLTFKEDIQKAQVSGQGDSLHEHIANLAGSPAIKKGILQTVKVVDELVKVMGRHKPENIVIEMARENQTTQKGQKNSRERMKRIEEGIKELGSQILKEHPVENTQLQNEKLYLYYLQNGRDMYVDQELDINRLSDYDVDHIVPQSFLKDDSIDNKVLTRSDKARGKSDNVPSEEVVKKMKNYWRQLLNAKLITQRKFDNLTKAERGGLSELDKAGFIKRQLVETRQITKHVAQILDSRMNTKYDENDKLIREVKVITLKSKLVSDFRKDFQFYKVREINNYHHAHDAYLNAVVGTALIKKYPKLESEFVYGDYKVYDVRKMIAKSEQEIGKATAKYFFYSNIMNFFKTEITLANGEIRKRPLIETNGETGEIVWDKGRDFATVRKVLSMPQVNIVKKTEVQTGGFSKESILPKRNSDKLIARKKDWDPKKYGGFDSPTVAYSVLVVAKVEKGKSKKLKSVKELLGITIMERSSFEKNPIDFLEAKGYKEVKKDLIIKLPKYSLFELENGRKRMLASAGELQKGNELALPSKYVNFLYLASHYEKLKGSPEDNEQKQLFVEQHKHYLDEIIEQISEFSKRVILADANLDKVLSAYNKHRDKPIREQAENIIHLFTLTNLGAPAAFKYFDTTIDRKRYTSTKEVLDATLIHQSITGLYETRIDLSQLGGDGGPAPGGSEAAAKGGTLNIEDEYRLHETSKEPDVSLGSTWLSDFPQAWAETGGMGLAVRQAPLIIPLKATSTPVSIKQYPMSQEARLGIKPHIQRLLDQGILVPCQSPWNTPLLPVKKPGTNDYRPVQDLREVNKRVEDIHPTVPNPYNLLSGLPPSHQWYTVLDLKDAFFCLRLHPTSQPLFAFEWRDPEMGISGQLTWTRLPQGFKNSPTLFNEALHRDLAGFRIQHPDLILLQYVDDLLLAATSELDCQQGTRALLQTLGDLGYRASAKKAQICQKQVKYLGYLLKEGQRWLTEARKETVMGQPIPKTPRQLREFLGTAGFCRLWIPGFAEMAAPLYPLTKPGTLFNWGPDQQKAFQEIKQALLTAPALGLPDLTKPFELFVDEKQGYAKGVLTQKLGPWRRPVAYLSKKLDPVAAGWPPCLRMVAAIAVLTKDAGKLTMGQPLVILAPHAVEALVKQPPDRWLSNARMTHYQALLLDTDRVQFGPVVALNPATLLPLPEEGLQHDCLDILAEAHGTRSDLMDQPLPDADHTWYTDGSSFLQEGQRKAGAAVTTETEVIWARALPAGTSAQRAELIALTQALKMAEGKKLNVYTDSRYAFATAHIHGEIYRRRGWLTSEGKEIKNKDEILALLKALFLPKRLSIIHCPGHQKGNSAEARGNRMADQAAREVATRETPETSTLLAGKRTADGSEFEKRTADGSEFESPKKKAKVE

SEQ ID NO: 2249 - protein, 2115 aa, synthetic construct
MPAAKRVKLDGGDKKYSIGLDIGTNSVGWAVITDEYKVPSKKFKVLGNTDRHSIKKNLIGALLFDSGETAEATRLKRTARRRYTRRKNRICYLQEIFSNEMAKVDDSFFHRLEESFLVEEDKKHERHPIFGNIVDEVAYHEKYPTIYHLRKKLVDSTDKADLRLIYLALAHMIKFRGHFLIEGDLNPDNSDVDKLFIQLVQTYNQLFEENPINASGVDAKAILSARLSKSRRLENLIAQLPGEKKNGLFGNLIALSLGLTPNFKSNFDLAEDAKLQLSKDTYDDDLDNLLAQIGDQYADLFLAAKNLSDAILLSDILRVNTEITKAPLSASMIKRYDEHHQDLTLLKALVRQQLPEKYKEIFFDQSKNGYAGYIDGGASQEEFYKFIKPILEKMDGTEELLVKLNREDLLRKQRTFDNGSIPHQIHLGELHAILRRQEDFYPFLKDNREKIEKILTFRIPYYVGPLARGNSRFAWMTRKSEETITPWNFEEVVDKGASAQSFIERMTNFDKNLPNEKVLPKHSLLYEYFTVYNELTKVKYVTEGMRKPAFLSGEQKKAIVDLLFKTNRKVTVKQLKEDYFKKIECFDSVEISGVEDRFNASLGTYHDLLKIIKDKDFLDNEENEDILEDIVLTLTLFEDREMIEERLKTYAHLFDDKVMKQLKRRRYTGWGRLSRKLINGIRDKQSGKTILDFLKSDGFANRNFMQLIHDDSLTFKEDIQKAQVSGQGDSLHEHIANLAGSPAIKKGILQTVKVVDELVKVMGRHKPENIVIEMARENQTTQKGQKNSRERMKRIEEGIKELGSQILKEHPVENTQLQNEKLYLYYLQNGRDMYVDQELDINRLSDYDVDHIVPQSFLKDDSIDNKVLTRSDKARGKSDNVPSEEVVKKMKNYWRQLLNAKLITQRKFDNLTKAERGGLSELDKAGFIKRQLVETRQITKHVAQILDSRMNTKYDENDKLIREVKVITLKSKLVSDFRKDFQFYKVREINNYHHAHDAYLNAVVGTALIKKYPKLESEFVYGDYKVYDVRKMIAKSEQEIGKATAKYFFYSNIMNFFKTEITLANGEIRKRPLIETNGETGEIVWDKGRDFATVRKVLSMPQVNIVKKTEVQTGGFSKESILPKRNSDKLIARKKDWDPKKYGGFDSPTVAYSVLVVAKVEKGKSKKLKSVKELLGITIMERSSFEKNPIDFLEAKGYKEVKKDLIIKLPKYSLFELENGRKRMLASAGELQKGNELALPSKYVNFLYLASHYEKLKGSPEDNEQKQLFVEQHKHYLDEIIEQISEFSKRVILADANLDKVLSAYNKHRDKPIREQAENIIHLFTLTNLGAPAAFKYFDTTIDRKRYTSTKEVLDATLIHQSITGLYETRIDLSQLGGDGGEAAAKEAAAKEAAAKEAAAKEAAAKEAAAKGGTLNIEDEYRLHETSKEPDVSLGSTWLSDFPQAWAETGGMGLAVRQAPLIIPLKATSTPVSIKQYPMSQEARLGIKPHIQRLLDQGILVPCQSPWNTPLLPVKKPGTNDYRPVQDLREVNKRVEDIHPTVPNPYNLLSGLPPSHQWYTVLDLKDAFFCLRLHPTSQPLFAFEWRDPEMGISGQLTWTRLPQGFKNSPTLFNEALHRDLAGFRIQHPDLILLQYVDDLLLAATSELDCQQGTRALLQTLGDLGYRASAKKAQICQKQVKYLGYLLKEGQRWLTEARKETVMGQPIPKTPRQLREFLGTAGFCRLWIPGFAEMAAPLYPLTKPGTLFNWGPDQQKAFQEIKQALLTAPALGLPDLTKPFELFVDEKQGYAKGVLTQKLGPWRRPVAYLSKKLDPVAAGWPPCLRMVAAIAVLTKDAGKLTMGQPLVILAPHAVEALVKQPPDRWLSNARMTHYQALLLDTDRVQFGPVVALNPATLLPLPEEGLQHDCLDILAEAHGTRSDLMDQPLPDADHTWYTDGSSFLQEGQRKAGAAVTTETEVIWARALPAGTSAQRAELIALTQALKMAEGKKLNVYTDSRYAFATAHIHGEIYRRRGWLTSEGKEIKNKDEILALLKALFLPKRLSIIHCPGHQKGNSAEARGNRMADQAAREVATRETPETSTLLAGKRTADGSEFEKRTADGSEFESPKKKAKVE

SEQ ID NO: 2250 - protein, 2097 aa, synthetic construct
MPAAKRVKLDGGDKKYSIGLDIGTNSVGWAVITDEYKVPSKKFKVLGNTDRHSIKKNLIGALLFDSGETAEATRLKRTARRRYTRRKNRICYLQEIFSNEMAKVDDSFFHRLEESFLVEEDKKHERHPIFGNIVDEVAYHEKYPTIYHLRKKLVDSTDKADLRLIYLALAHMIKFRGHFLIEGDLNPDNSDVDKLFIQLVQTYNQLFEENPINASGVDAKAILSARLSKSRRLENLIAQLPGEKKNGLFGNLIALSLGLTPNFKSNFDLAEDAKLQLSKDTYDDDLDNLLAQIGDQYADLFLAAKNLSDAILLSDILRVNTEITKAPLSASMIKRYDEHHQDLTLLKALVRQQLPEKYKEIFFDQSKNGYAGYIDGGASQEEFYKFIKPILEKMDGTEELLVKLNREDLLRKQRTFDNGSIPHQIHLGELHAILRRQEDFYPFLKDNREKIEKILTFRIPYYVGPLARGNSRFAWMTRKSEETITPWNFEEVVDKGASAQSFIERMTNFDKNLPNEKVLPKHSLLYEYFTVYNELTKVKYVTEGMRKPAFLSGEQKKAIVDLLFKTNRKVTVKQLKEDYFKKIECFDSVEISGVEDRFNASLGTYHDLLKIIKDKDFLDNEENEDILEDIVLTLTLFEDREMIEERLKTYAHLFDDKVMKQLKRRRYTGWGRLSRKLINGIRDKQSGKTILDFLKSDGFANRNFMQLIHDDSLTFKEDIQKAQVSGQGDSLHEHIANLAGSPAIKKGILQTVKVVDELVKVMGRHKPENIVIEMARENQTTQKGQKNSRERMKRIEEGIKELGSQILKEHPVENTQLQNEKLYLYYLQNGRDMYVDQELDINRLSDYDVDHIVPQSFLKDDSIDNKVLTRSDKARGKSDNVPSEEVVKKMKNYWRQLLNAKLITQRKFDNLTKAERGGLSELDKAGFIKRQLVETRQITKHVAQILDSRMNTKYDENDKLIREVKVITLKSKLVSDFRKDFQFYKVREINNYHHAHDAYLNAVVGTALIKKYPKLESEFVYGDYKVYDVRKMIAKSEQEIGKATAKYFFYSNIMNFFKTEITLANGEIRKRPLIETNGETGEIVWDKGRDFATVRKVLSMPQVNIVKKTEVQTGGFSKESILPKRNSDKLIARKKDWDPKKYGGFDSPTVAYSVLVVAKVEKGKSKKLKSVKELLGITIMERSSFEKNPIDFLEAKGYKEVKKDLIIKLPKYSLFELENGRKRMLASAGELQKGNELALPSKYVNFLYLASHYEKLKGSPEDNEQKQLFVEQHKHYLDEIIEQISEFSKRVILADANLDKVLSAYNKHRDKPIREQAENIIHLFTLTNLGAPAAFKYFDTTIDRKRYTSTKEVLDATLIHQSITGLYETRIDLSQLGGDGGGGSGGSGGSGGSGGTLNIEDEYRLHETSKEPDVSLGSTWLSDFPQAWAETGGMGLAVRQAPLIIPLKATSTPVSIKQYPMSQEARLGIKPHIQRLLDQGILVPCQSPWNTPLLPVKKPGTNDYRPVQDLREVNKRVEDIHPTVPNPYNLLSGLPPSHQWYTVLDLKDAFFCLRLHPTSQPLFAFEWRDPEMGISGQLTWTRLPQGFKNSPTLFNEALHRDLAGFRIQHPDLILLQYVDDLLLAATSELDCQQGTRALLQTLGDLGYRASAKKAQICQKQVKYLGYLLKEGQRWLTEARKETVMGQPIPKTPRQLREFLGTAGFCRLWIPGFAEMAAPLYPLTKPGTLFNWGPDQQKAFQEIKQALLTAPALGLPDLTKPFELFVDEKQGYAKGVLTQKLGPWRRPVAYLSKKLDPVAAGWPPCLRMVAAIAVLTKDAGKLTMGQPLVILAPHAVEALVKQPPDRWLSNARMTHYQALLLDTDRVQFGPVVALNPATLLPLPEEGLQHDCLDILAEAHGTRSDLMDQPLPDADHTWYTDGSSFLQEGQRKAGAAVTTETEVIWARALPAGTSAQRAELIALTQALKMAEGKKLNVYTDSRYAFATAHIHGEIYRRRGWLTSEGKEIKNKDEILALLKALFLPKRLSIIHCPGHQKGNSAEARGNRMADQAAREVATRETPETSTLLAGKRTADGSEFEKRTADGSEFESPKKKAKVE

SEQ ID NO: 2251 - protein, 2096 aa, synthetic construct
MPAAKRVKLDGGDKKYSIGLDIGTNSVGWAVITDEYKVPSKKFKVLGNTDRHSIKKNLIGALLFDSGETAEATRLKRTARRRYTRRKNRICYLQEIFSNEMAKVDDSFFHRLEESFLVEEDKKHERHPIFGNIVDEVAYHEKYPTIYHLRKKLVDSTDKADLRLIYLALAHMIKFRGHFLIEGDLNPDNSDVDKLFIQLVQTYNQLFEENPINASGVDAKAILSARLSKSRRLENLIAQLPGEKKNGLFGNLIALSLGLTPNFKSNFDLAEDAKLQLSKDTYDDDLDNLLAQIGDQYADLFLAAKNLSDAILLSDILRVNTEITKAPLSASMIKRYDEHHQDLTLLKALVRQQLPEKYKEIFFDQSKNGYAGYIDGGASQEEFYKFIKPILEKMDGTEELLVKLNREDLLRKQRTFDNGSIPHQIHLGELHAILRRQEDFYPFLKDNREKIEKILTFRIPYYVGPLARGNSRFAWMTRKSEETITPWNFEEVVDKGASAQSFIERMTNFDKNLPNEKVLPKHSLLYEYFTVYNELTKVKYVTEGMRKPAFLSGEQKKAIVDLLFKTNRKVTVKQLKEDYFKKIECFDSVEISGVEDRFNASLGTYHDLLKIIKDKDFLDNEENEDILEDIVLTLTLFEDREMIEERLKTYAHLFDDKVMKQLKRRRYTGWGRLSRKLINGIRDKQSGKTILDFLKSDGFANRNFMQLIHDDSLTFKEDIQKAQVSGQGDSLHEHIANLAGSPAIKKGILQTVKVVDELVKVMGRHKPENIVIEMARENQTTQKGQKNSRERMKRIEEGIKELGSQILKEHPVENTQLQNEKLYLYYLQNGRDMYVDQELDINRLSDYDVDHIVPQSFLKDDSIDNKVLTRSDKARGKSDNVPSEEVVKKMKNYWRQLLNAKLITQRKFDNLTKAERGGLSELDKAGFIKRQLVETRQITKHVAQILDSRMNTKYDENDKLIREVKVITLKSKLVSDFRKDFQFYKVREINNYHHAHDAYLNAVVGTALIKKYPKLESEFVYGDYKVYDVRKMIAKSEQEIGKATAKYFFYSNIMNFFKTEITLANGEIRKRPLIETNGETGEIVWDKGRDFATVRKVLSMPQVNIVKKTEVQTGGFSKESILPKRNSDKLIARKKDWDPKKYGGFDSPTVAYSVLVVAKVEKGKSKKLKSVKELLGITIMERSSFEKNPIDFLEAKGYKEVKKDLIIKLPKYSLFELENGRKRMLASAGELQKGNELALPSKYVNFLYLASHYEKLKGSPEDNEQKQLFVEQHKHYLDEIIEQISEFSKRVILADANLDKVLSAYNKHRDKPIREQAENIIHLFTLTNLGAPAAFKYFDTTIDRKRYTSTKEVLDATLIHQSITGLYETRIDLSQLGGDGGGGSEAAAKPAPGGTLNIEDEYRLHETSKEPDVSLGSTWLSDFPQAWAETGGMGLAVRQAPLIIPLKATSTPVSIKQYPMSQEARLGIKPHIQRLLDQGILVPCQSPWNTPLLPVKKPGTNDYRPVQDLREVNKRVEDIHPTVPNPYNLLSGLPPSHQWYTVLDLKDAFFCLRLHPTSQPLFAFEWRDPEMGISGQLTWTRLPQGFKNSPTLFNEALHRDLAGFRIQHPDLILLQYVDDLLLAATSELDCQQGTRALLQTLGDLGYRASAKKAQICQKQVKYLGYLLKEGQRWLTEARKETVMGQPIPKTPRQLREFLGTAGFCRLWIPGFAEMAAPLYPLTKPGTLFNWGPDQQKAFQEIKQALLTAPALGLPDLTKPFELFVDEKQGYAKGVLTQKLGPWRRPVAYLSKKLDPVAAGWPPCLRMVAAIAVLTKDAGKLTMGQPLVILAPHAVEALVKQPPDRWLSNARMTHYQALLLDTDRVQFGPVVALNPATLLPLPEEGLQHDCLDILAEAHGTRSDLMDQPLPDADHTWYTDGSSFLQEGQRKAGAAVTTETEVIWARALPAGTSAQRAELIALTQALKMAEGKKLNVYTDSRYAFATAHIHGEIYRRRGWLTSEGKEIKNKDEILALLKALFLPKRLSIIHCPGHQKGNSAEARGNRMADQAAREVATRETPETSTLLAGKRTADGSEFEKRTADGSEFESPKKKAKVE

SEQ ID NO: 2252 - protein, 2100 aa, synthetic construct
MPAAKRVKLDGGDKKYSIGLDIGTNSVGWAVITDEYKVPSKKFKVLGNTDRHSIKKNLIGALLFDSGETAEATRLKRTARRRYTRRKNRICYLQEIFSNEMAKVDDSFFHRLEESFLVEEDKKHERHPIFGNIVDEVAYHEKYPTIYHLRKKLVDSTDKADLRLIYLALAHMIKFRGHFLIEGDLNPDNSDVDKLFIQLVQTYNQLFEENPINASGVDAKAILSARLSKSRRLENLIAQLPGEKKNGLFGNLIALSLGLTPNFKSNFDLAEDAKLQLSKDTYDDDLDNLLAQIGDQYADLFLAAKNLSDAILLSDILRVNTEITKAPLSASMIKRYDEHHQDLTLLKALVRQQLPEKYKEIFFDQSKNGYAGYIDGGASQEEFYKFIKPILEKMDGTEELLVKLNREDLLRKQRTFDNGSIPHQIHLGELHAILRRQEDFYPFLKDNREKIEKILTFRIPYYVGPLARGNSRFAWMTRKSEETITPWNFEEVVDKGASAQSFIERMTNFDKNLPNEKVLPKHSLLYEYFTVYNELTKVKYVTEGMRKPAFLSGEQKKAIVDLLFKTNRKVTVKQLKEDYFKKIECFDSVEISGVEDRFNASLGTYHDLLKIIKDKDFLDNEENEDILEDIVLTLTLFEDREMIEERLKTYAHLFDDKVMKQLKRRRYTGWGRLSRKLINGIRDKQSGKTILDFLKSDGFANRNFMQLIHDDSLTFKEDIQKAQVSGQGDSLHEHIANLAGSPAIKKGILQTVKVVDELVKVMGRHKPENIVIEMARENQTTQKGQKNSRERMKRIEEGIKELGSQILKEHPVENTQLQNEKLYLYYLQNGRDMYVDQELDINRLSDYDVDHIVPQSFLKDDSIDNKVLTRSDKARGKSDNVPSEEVVKKMKNYWRQLLNAKLITQRKFDNLTKAERGGLSELDKAGFIKRQLVETRQITKHVAQILDSRMNTKYDENDKLIREVKVITLKSKLVSDFRKDFQFYKVREINNYHHAHDAYLNAVVGTALIKKYPKLESEFVYGDYKVYDVRKMIAKSEQEIGKATAKYFFYSNIMNFFKTEITLANGEIRKRPLIETNGETGEIVWDKGRDFATVRKVLSMPQVNIVKKTEVQTGGFSKESILPKRNSDKLIARKKDWDPKKYGGFDSPTVAYSVLVVAKVEKGKSKKLKSVKELLGITIMERSSFEKNPIDFLEAKGYKEVKKDLIIKLPKYSLFELENGRKRMLASAGELQKGNELALPSKYVNFLYLASHYEKLKGSPEDNEQKQLFVEQHKHYLDEIIEQISEFSKRVILADANLDKVLSAYNKHRDKPIREQAENIIHLFTLTNLGAPAAFKYFDTTIDRKRYTSTKEVLDATLIHQSITGLYETRIDLSQLGGDGGEAAAKEAAAKEAAAKGGTLNIEDEYRLHETSKEPDVSLGSTWLSDFPQAWAETGGMGLAVRQAPLIIPLKATSTPVSIKQYPMSQEARLGIKPHIQRLLDQGILVPCQSPWNTPLLPVKKPGTNDYRPVQDLREVNKRVEDIHPTVPNPYNLLSGLPPSHQWYTVLDLKDAFFCLRLHPTSQPLFAFEWRDPEMGISGQLTWTRLPQGFKNSPTLFNEALHRDLAGFRIQHPDLILLQYVDDLLLAATSELDCQQGTRALLQTLGDLGYRASAKKAQICQKQVKYLGYLLKEGQRWLTEARKETVMGQPIPKTPRQLREFLGTAGFCRLWIPGFAEMAAPLYPLTKPGTLFNWGPDQQKAFQEIKQALLTAPALGLPDLTKPFELFVDEKQGYAKGVLTQKLGPWRRPVAYLSKKLDPVAAGWPPCLRMVAAIAVLTKDAGKLTMGQPLVILAPHAVEALVKQPPDRWLSNARMTHYQALLLDTDRVQFGPVVALNPATLLPLPEEGLQHDCLDILAEAHGTRSDLMDQPLPDADHTWYTDGSSFLQEGQRKAGAAVTTETEVIWARALPAGTSAQRAELIALTQALKMAEGKKLNVYTDSRYAFATAHIHGEIYRRRGWLTSEGKEIKNKDEILALLKALFLPKRLSIIHCPGHQKGNSAEARGNRMADQAAREVATRETPETSTLLAGKRTADGSEFEKRTADGSEFESPKKKAKVE

SEQ ID NO: 2253 - protein, 2096 aa, synthetic construct
MPAAKRVKLDGGDKKYSIGLDIGTNSVGWAVITDEYKVPSKKFKVLGNTDRHSIKKNLIGALLFDSGETAEATRLKRTARRRYTRRKNRICYLQEIFSNEMAKVDDSFFHRLEESFLVEEDKKHERHPIFGNIVDEVAYHEKYPTIYHLRKKLVDSTDKADLRLIYLALAHMIKFRGHFLIEGDLNPDNSDVDKLFIQLVQTYNQLFEENPINASGVDAKAILSARLSKSRRLENLIAQLPGEKKNGLFGNLIALSLGLTPNFKSNFDLAEDAKLQLSKDTYDDDLDNLLAQIGDQYADLFLAAKNLSDAILLSDILRVNTEITKAPLSASMIKRYDEHHQDLTLLKALVRQQLPEKYKEIFFDQSKNGYAGYIDGGASQEEFYKFIKPILEKMDGTEELLVKLNREDLLRKQRTFDNGSIPHQIHLGELHAILRRQEDFYPFLKDNREKIEKILTFRIPYYVGPLARGNSRFAWMTRKSEETITPWNFEEVVDKGASAQSFIERMTNFDKNLPNEKVLPKHSLLYEYFTVYNELTKVKYVTEGMRKPAFLSGEQKKAIVDLLFKTNRKVTVKQLKEDYFKKIECFDSVEISGVEDRFNASLGTYHDLLKIIKDKDFLDNEENEDILEDIVLTLTLFEDREMIEERLKTYAHLFDDKVMKQLKRRRYTGWGRLSRKLINGIRDKQSGKTILDFLKSDGFANRNFMQLIHDDSLTFKEDIQKAQVSGQGDSLHEHIANLAGSPAIKKGILQTVKVVDELVKVMGRHKPENIVIEMARENQTTQKGQKNSRERMKRIEEGIKELGSQILKEHPVENTQLQNEKLYLYYLQNGRDMYVDQELDINRLSDYDVDHIVPQSFLKDDSIDNKVLTRSDKARGKSDNVPSEEVVKKMKNYWRQLLNAKLITQRKFDNLTKAERGGLSELDKAGFIKRQLVETRQITKHVAQILDSRMNTKYDENDKLIREVKVITLKSKLVSDFRKDFQFYKVREINNYHHAHDAYLNAVVGTALIKKYPKLESEFVYGDYKVYDVRKMIAKSEQEIGKATAKYFFYSNIMNFFKTEITLANGEIRKRPLIETNGETGEIVWDKGRDFATVRKVLSMPQVNIVKKTEVQTGGFSKESILPKRNSDKLIARKKDWDPKKYGGFDSPTVAYSVLVVAKVEKGKSKKLKSVKELLGITIMERSSFEKNPIDFLEAKGYKEVKKDLIIKLPKYSLFELENGRKRMLASAGELQKGNELALPSKYVNFLYLASHYEKLKGSPEDNEQKQLFVEQHKHYLDEIIEQISEFSKRVILADANLDKVLSAYNKHRDKPIREQAENIIHLFTLTNLGAPAAFKYFDTTIDRKRYTSTKEVLDATLIHQSITGLYETRIDLSQLGGDGGPAPEAAAKGSSGGTLNIEDEYRLHETSKEPDVSLGSTWLSDFPQAWAETGGMGLAVRQAPLIIPLKATSTPVSIKQYPMSQEARLGIKPHIQRLLDQGILVPCQSPWNTPLLPVKKPGTNDYRPVQDLREVNKRVEDIHPTVPNPYNLLSGLPPSHQWYTVLDLKDAFFCLRLHPTSQPLFAFEWRDPEMGISGQLTWTRLPQGFKNSPTLFNEALHRDLAGFRIQHPDLILLQYVDDLLLAATSELDCQQGTRALLQTLGDLGYRASAKKAQICQKQVKYLGYLLKEGQRWLTEARKETVMGQPIPKTPRQLREFLGTAGFCRLWIPGFAEMAAPLYPLTKPGTLFNWGPDQQKAFQEIKQALLTAPALGLPDLTKPFELFVDEKQGYAKGVLTQKLGPWRRPVAYLSKKLDPVAAGWPPCLRMVAAIAVLTKDAGKLTMGQPLVILAPHAVEALVKQPPDRWLSNARMTHYQALLLDTDRVQFGPVVALNPATLLPLPEEGLQHDCLDILAEAHGTRSDLMDQPLPDADHTWYTDGSSFLQEGQRKAGAAVTTETEVIWARALPAGTSAQRAELIALTQALKMAEGKKLNVYTDSRYAFATAHIHGEIYRRRGWLTSEGKEIKNKDEILALLKALFLPKRLSIIHCPGHQKGNSAEARGNRMADQAAREVATRETPETSTLLAGKRTADGSEFEKRTADGSEFESPKKKAKVE

SEQ ID NO: 2254 - protein, 2090 aa, synthetic construct
MPAAKRVKLDGGDKKYSIGLDIGTNSVGWAVITDEYKVPSKKFKVLGNTDRHSIKKNLIGALLFDSGETAEATRLKRTARRRYTRRKNRICYLQEIFSNEMAKVDDSFFHRLEESFLVEEDKKHERHPIFGNIVDEVAYHEKYPTIYHLRKKLVDSTDKADLRLIYLALAHMIKFRGHFLIEGDLNPDNSDVDKLFIQLVQTYNQLFEENPINASGVDAKAILSARLSKSRRLENLIAQLPGEKKNGLFGNLIALSLGLTPNFKSNFDLAEDAKLQLSKDTYDDDLDNLLAQIGDQYADLFLAAKNLSDAILLSDILRVNTEITKAPLSASMIKRYDEHHQDLTLLKALVRQQLPEKYKEIFFDQSKNGYAGYIDGGASQEEFYKFIKPILEKMDGTEELLVKLNREDLLRKQRTFDNGSIPHQIHLGELHAILRRQEDFYPFLKDNREKIEKILTFRIPYYVGPLARGNSRFAWMTRKSEETITPWNFEEVVDKGASAQSFIERMTNFDKNLPNEKVLPKHSLLYEYFTVYNELTKVKYVTEGMRKPAFLSGEQKKAIVDLLFKTNRKVTVKQLKEDYFKKIECFDSVEISGVEDRFNASLGTYHDLLKIIKDKDFLDNEENEDILEDIVLTLTLFEDREMIEERLKTYAHLFDDKVMKQLKRRRYTGWGRLSRKLINGIRDKQSGKTILDFLKSDGFANRNFMQLIHDDSLTFKEDIQKAQVSGQGDSLHEHIANLAGSPAIKKGILQTVKVVDELVKVMGRHKPENIVIEMARENQTTQKGQKNSRERMKRIEEGIKELGSQILKEHPVENTQLQNEKLYLYYLQNGRDMYVDQELDINRLSDYDVDHIVPQSFLKDDSIDNKVLTRSDKARGKSDNVPSEEVVKKMKNYWRQLLNAKLITQRKFDNLTKAERGGLSELDKAGFIKRQLVETRQITKHVAQILDSRMNTKYDENDKLIREVKVITLKSKLVSDFRKDFQFYKVREINNYHHAHDAYLNAVVGTALIKKYPKLESEFVYGDYKVYDVRKMIAKSEQEIGKATAKYFFYSNIMNFFKTEITLANGEIRKRPLIETNGETGEIVWDKGRDFATVRKVLSMPQVNIVKKTEVQTGGFSKESILPKRNSDKLIARKKDWDPKKYGGFDSPTVAYSVLVVAKVEKGKSKKLKSVKELLGITIMERSSFEKNPIDFLEAKGYKEVKKDLIIKLPKYSLFELENGRKRMLASAGELQKGNELALPSKYVNFLYLASHYEKLKGSPEDNEQKQLFVEQHKHYLDEIIEQISEFSKRVILADANLDKVLSAYNKHRDKPIREQAENIIHLFTLTNLGAPAAFKYFDTTIDRKRYTSTKEVLDATLIHQSITGLYETRIDLSQLGGDGGGGGGGGGTLNIEDEYRLHETSKEPDVSLGSTWLSDFPQAWAETGGMGLAVRQAPLIIPLKATSTPVSIKQYPMSQEARLGIKPHIQRLLDQGILVPCQSPWNTPLLPVKKPGTNDYRPVQDLREVNKRVEDIHPTVPNPYNLLSGLPPSHQWYTVLDLKDAFFCLRLHPTSQPLFAFEWRDPEMGISGQLTWTRLPQGFKNSPTLFNEALHRDLAGFRIQHPDLILLQYVDDLLLAATSELDCQQGTRALLQTLGDLGYRASAKKAQICQKQVKYLGYLLKEGQRWLTEARKETVMGQPIPKTPRQLREFLGTAGFCRLWIPGFAEMAAPLYPLTKPGTLFNWGPDQQKAFQEIKQALLTAPALGLPDLTKPFELFVDEKQGYAKGVLTQKLGPWRRPVAYLSKKLDPVAAGWPPCLRMVAAIAVLTKDAGKLTMGQPLVILAPHAVEALVKQPPDRWLSNARMTHYQALLLDTDRVQFGPVVALNPATLLPLPEEGLQHDCLDILAEAHGTRSDLMDQPLPDADHTWYTDGSSFLQEGQRKAGAAVTTETEVIWARALPAGTSAQRAELIALTQALKMAEGKKLNVYTDSRYAFATAHIHGEIYRRRGWLTSEGKEIKNKDEILALLKALFLPKRLSIIHCPGHQKGNSAEARGNRMADQAAREVATRETPETSTLLAGKRTADGSEFEKRTADGSEFESPKKKAKVE

SEQ ID NO: 2255 - protein, 2096 aa, synthetic construct
MPAAKRVKLDGGDKKYSIGLDIGTNSVGWAVITDEYKVPSKKFKVLGNTDRHSIKKNLIGALLFDSGETAEATRLKRTARRRYTRRKNRICYLQEIFSNEMAKVDDSFFHRLEESFLVEEDKKHERHPIFGNIVDEVAYHEKYPTIYHLRKKLVDSTDKADLRLIYLALAHMIKFRGHFLIEGDLNPDNSDVDKLFIQLVQTYNQLFEENPINASGVDAKAILSARLSKSRRLENLIAQLPGEKKNGLFGNLIALSLGLTPNFKSNFDLAEDAKLQLSKDTYDDDLDNLLAQIGDQYADLFLAAKNLSDAILLSDILRVNTEITKAPLSASMIKRYDEHHQDLTLLKALVRQQLPEKYKEIFFDQSKNGYAGYIDGGASQEEFYKFIKPILEKMDGTEELLVKLNREDLLRKQRTFDNGSIPHQIHLGELHAILRRQEDFYPFLKDNREKIEKILTFRIPYYVGPLARGNSRFAWMTRKSEETITPWNFEEVVDKGASAQSFIERMTNFDKNLPNEKVLPKHSLLYEYFTVYNELTKVKYVTEGMRKPAFLSGEQKKAIVDLLFKTNRKVTVKQLKEDYFKKIECFDSVEISGVEDRFNASLGTYHDLLKIIKDKDFLDNEENEDILEDIVLTLTLFEDREMIEERLKTYAHLFDDKVMKQLKRRRYTGWGRLSRKLINGIRDKQSGKTILDFLKSDGFANRNFMQLIHDDSLTFKEDIQKAQVSGQGDSLHEHIANLAGSPAIKKGILQTVKVVDELVKVMGRHKPENIVIEMARENQTTQKGQKNSRERMKRIEEGIKELGSQILKEHPVENTQLQNEKLYLYYLQNGRDMYVDQELDINRLSDYDVDHIVPQSFLKDDSIDNKVLTRSDKARGKSDNVPSEEVVKKMKNYWRQLLNAKLITQRKFDNLTKAERGGLSELDKAGFIKRQLVETRQITKHVAQILDSRMNTKYDENDKLIREVKVITLKSKLVSDFRKDFQFYKVREINNYHHAHDAYLNAVVGTALIKKYPKLESEFVYGDYKVYDVRKMIAKSEQEIGKATAKYFFYSNIMNFFKTEITLANGEIRKRPLIETNGETGEIVWDKGRDFATVRKVLSMPQVNIVKKTEVQTGGFSKESILPKRNSDKLIARKKDWDPKKYGGFDSPTVAYSVLVVAKVEKGKSKKLKSVKELLGITIMERSSFEKNPIDFLEAKGYKEVKKDLIIKLPKYSLFELENGRKRMLASAGELQKGNELALPSKYVNFLYLASHYEKLKGSPEDNEQKQLFVEQHKHYLDEIIEQISEFSKRVILADANLDKVLSAYNKHRDKPIREQAENIIHLFTLTNLGAPAAFKYFDTTIDRKRYTSTKEVLDATLIHQSITGLYETRIDLSQLGGDGGEAAAKPAPGSSGGTLNIEDEYRLHETSKEPDVSLGSTWLSDFPQAWAETGGMGLAVRQAPLIIPLKATSTPVSIKQYPMSQEARLGIKPHIQRLLDQGILVPCQSPWNTPLLPVKKPGTNDYRPVQDLREVNKRVEDIHPTVPNPYNLLSGLPPSHQWYTVLDLKDAFFCLRLHPTSQPLFAFEWRDPEMGISGQLTWTRLPQGFKNSPTLFNEALHRDLAGFRIQHPDLILLQYVDDLLLAATSELDCQQGTRALLQTLGDLGYRASAKKAQICQKQVKYLGYLLKEGQRWLTEARKETVMGQPIPKTPRQLREFLGTAGFCRLWIPGFAEMAAPLYPLTKPGTLFNWGPDQQKAFQEIKQALLTAPALGLPDLTKPFELFVDEKQGYAKGVLTQKLGPWRRPVAYLSKKLDPVAAGWPPCLRMVAAIAVLTKDAGKLTMGQPLVILAPHAVEALVKQPPDRWLSNARMTHYQALLLDTDRVQFGPVVALNPATLLPLPEEGLQHDCLDILAEAHGTRSDLMDQPLPDADHTWYTDGSSFLQEGQRKAGAAVTTETEVIWARALPAGTSAQRAELIALTQALKMAEGKKLNVYTDSRYAFATAHIHGEIYRRRGWLTSEGKEIKNKDEILALLKALFLPKRLSIIHCPGHQKGNSAEARGNRMADQAAREVATRETPETSTLLAGKRTADGSEFEKRTADGSEFESPKKKAKVE

SEQ ID NO: 2256 - protein, 2096 aa, synthetic construct
MPAAKRVKLDGGDKKYSIGLDIGTNSVGWAVITDEYKVPSKKFKVLGNTDRHSIKKNLIGALLFDSGETAEATRLKRTARRRYTRRKNRICYLQEIFSNEMAKVDDSFFHRLEESFLVEEDKKHERHPIFGNIVDEVAYHEKYPTIYHLRKKLVDSTDKADLRLIYLALAHMIKFRGHFLIEGDLNPDNSDVDKLFIQLVQTYNQLFEENPINASGVDAKAILSARLSKSRRLENLIAQLPGEKKNGLFGNLIALSLGLTPNFKSNFDLAEDAKLQLSKDTYDDDLDNLLAQIGDQYADLFLAAKNLSDAILLSDILRVNTEITKAPLSASMIKRYDEHHQDLTLLKALVRQQLPEKYKEIFFDQSKNGYAGYIDGGASQEEFYKFIKPILEKMDGTEELLVKLNREDLLRKQRTFDNGSIPHQIHLGELHAILRRQEDFYPFLKDNREKIEKILTFRIPYYVGPLARGNSRFAWMTRKSEETITPWNFEEVVDKGASAQSFIERMTNFDKNLPNEKVLPKHSLLYEYFTVYNELTKVKYVTEGMRKPAFLSGEQKKAIVDLLFKTNRKVTVKQLKEDYFKKIECFDSVEISGVEDRFNASLGTYHDLLKIIKDKDFLDNEENEDILEDIVLTLTLFEDREMIEERLKTYAHLFDDKVMKQLKRRRYTGWGRLSRKLINGIRDKQSGKTILDFLKSDGFANRNFMQLIHDDSLTFKEDIQKAQVSGQGDSLHEHIANLAGSPAIKKGILQTVKVVDELVKVMGRHKPENIVIEMARENQTTQKGQKNSRERMKRIEEGIKELGSQILKEHPVENTQLQNEKLYLYYLQNGRDMYVDQELDINRLSDYDVDHIVPQSFLKDDSIDNKVLTRSDKARGKSDNVPSEEVVKKMKNYWRQLLNAKLITQRKFDNLTKAERGGLSELDKAGFIKRQLVETRQITKHVAQILDSRMNTKYDENDKLIREVKVITLKSKLVSDFRKDFQFYKVREINNYHHAHDAYLNAVVGTALIKKYPKLESEFVYGDYKVYDVRKMIAKSEQEIGKATAKYFFYSNIMNFFKTEITLANGEIRKRPLIETNGETGEIVWDKGRDFATVRKVLSMPQVNIVKKTEVQTGGFSKESILPKRNSDKLIARKKDWDPKKYGGFDSPTVAYSVLVVAKVEKGKSKKLKSVKELLGITIMERSSFEKNPIDFLEAKGYKEVKKDLIIKLPKYSLFELENGRKRMLASAGELQKGNELALPSKYVNFLYLASHYEKLKGSPEDNEQKQLFVEQHKHYLDEIIEQISEFSKRVILADANLDKVLSAYNKHRDKPIREQAENIIHLFTLTNLGAPAAFKYFDTTIDRKRYTSTKEVLDATLIHQSITGLYETRIDLSQLGGDGGEAAAKGGGGGSGGTLNIEDEYRLHETSKEPDVSLGSTWLSDFPQAWAETGGMGLAVRQAPLIIPLKATSTPVSIKQYPMSQEARLGIKPHIQRLLDQGILVPCQSPWNTPLLPVKKPGTNDYRPVQDLREVNKRVEDIHPTVPNPYNLLSGLPPSHQWYTVLDLKDAFFCLRLHPTSQPLFAFEWRDPEMGISGQLTWTRLPQGFKNSPTLFNEALHRDLAGFRIQHPDLILLQYVDDLLLAATSELDCQQGTRALLQTLGDLGYRASAKKAQICQKQVKYLGYLLKEGQRWLTEARKETVMGQPIPKTPRQLREFLGTAGFCRLWIPGFAEMAAPLYPLTKPGTLFNWGPDQQKAFQEIKQALLTAPALGLPDLTKPFELFVDEKQGYAKGVLTQKLGPWRRPVAYLSKKLDPVAAGWPPCLRMVAAIAVLTKDAGKLTMGQPLVILAPHAVEALVKQPPDRWLSNARMTHYQALLLDTDRVQFGPVVALNPATLLPLPEEGLQHDCLDILAEAHGTRSDLMDQPLPDADHTWYTDGSSFLQEGQRKAGAAVTTETEVIWARALPAGTSAQRAELIALTQALKMAEGKKLNVYTDSRYAFATAHIHGEIYRRRGWLTSEGKEIKNKDEILALLKALFLPKRLSIIHCPGHQKGNSAEARGNRMADQAAREVATRETPETSTLLAGKRTADGSEFEKRTADGSEFESPKKKAKVE

SEQ ID NO: 2257 - protein, 2096 aa, synthetic construct
MPAAKRVKLDGGDKKYSIGLDIGTNSVGWAVITDEYKVPSKKFKVLGNTDRHSIKKNLIGALLFDSGETAEATRLKRTARRRYTRRKNRICYLQEIFSNEMAKVDDSFFHRLEESFLVEEDKKHERHPIFGNIVDEVAYHEKYPTIYHLRKKLVDSTDKADLRLIYLALAHMIKFRGHFLIEGDLNPDNSDVDKLFIQLVQTYNQLFEENPINASGVDAKAILSARLSKSRRLENLIAQLPGEKKNGLFGNLIALSLGLTPNFKSNFDLAEDAKLQLSKDTYDDDLDNLLAQIGDQYADLFLAAKNLSDAILLSDILRVNTEITKAPLSASMIKRYDEHHQDLTLLKALVRQQLPEKYKEIFFDQSKNGYAGYIDGGASQEEFYKFIKPILEKMDGTEELLVKLNREDLLRKQRTFDNGSIPHQIHLGELHAILRRQEDFYPFLKDNREKIEKILTFRIPYYVGPLARGNSRFAWMTRKSEETITPWNFEEVVDKGASAQSFIERMTNFDKNLPNEKVLPKHSLLYEYFTVYNELTKVKYVTEGMRKPAFLSGEQKKAIVDLLFKTNRKVTVKQLKEDYFKKIECFDSVEISGVEDRFNASLGTYHDLLKIIKDKDFLDNEENEDILEDIVLTLTLFEDREMIEERLKTYAHLFDDKVMKQLKRRRYTGWGRLSRKLINGIRDKQSGKTILDFLKSDGFANRNFMQLIHDDSLTFKEDIQKAQVSGQGDSLHEHIANLAGSPAIKKGILQTVKVVDELVKVMGRHKPENIVIEMARENQTTQKGQKNSRERMKRIEEGIKELGSQILKEHPVENTQLQNEKLYLYYLQNGRDMYVDQELDINRLSDYDVDHIVPQSFLKDDSIDNKVLTRSDKARGKSDNVPSEEVVKKMKNYWRQLLNAKLITQRKFDNLTKAERGGLSELDKAGFIKRQLVETRQITKHVAQILDSRMNTKYDENDKLIREVKVITLKSKLVSDFRKDFQFYKVREINNYHHAHDAYLNAVVGTALIKKYPKLESEFVYGDYKVYDVRKMIAKSEQEIGKATAKYFFYSNIMNFFKTEITLANGEIRKRPLIETNGETGEIVWDKGRDFATVRKVLSMPQVNIVKKTEVQTGGFSKESILPKRNSDKLIARKKDWDPKKYGGFDSPTVAYSVLVVAKVEKGKSKKLKSVKELLGITIMERSSFEKNPIDFLEAKGYKEVKKDLIIKLPKYSLFELENGRKRMLASAGELQKGNELALPSKYVNFLYLASHYEKLKGSPEDNEQKQLFVEQHKHYLDEIIEQISEFSKRVILADANLDKVLSAYNKHRDKPIREQAENIIHLFTLTNLGAPAAFKYFDTTIDRKRYTSTKEVLDATLIHQSITGLYETRIDLSQLGGDGGEAAAKGGSPAPGGTLNIEDEYRLHETSKEPDVSLGSTWLSDFPQAWAETGGMGLAVRQAPLIIPLKATSTPVSIKQYPMSQEARLGIKPHIQRLLDQGILVPCQSPWNTPLLPVKKPGTNDYRPVQDLREVNKRVEDIHPTVPNPYNLLSGLPPSHQWYTVLDLKDAFFCLRLHPTSQPLFAFEWRDPEMGISGQLTWTRLPQGFKNSPTLFNEALHRDLAGFRIQHPDLILLQYVDDLLLAATSELDCQQGTRALLQTLGDLGYRASAKKAQICQKQVKYLGYLLKEGQRWLTEARKETVMGQPIPKTPRQLREFLGTAGFCRLWIPGFAEMAAPLYPLTKPGTLFNWGPDQQKAFQEIKQALLTAPALGLPDLTKPFELFVDEKQGYAKGVLTQKLGPWRRPVAYLSKKLDPVAAGWPPCLRMVAAIAVLTKDAGKLTMGQPLVILAPHAVEALVKQPPDRWLSNARMTHYQALLLDTDRVQFGPVVALNPATLLPLPEEGLQHDCLDILAEAHGTRSDLMDQPLPDADHTWYTDGSSFLQEGQRKAGAAVTTETEVIWARALPAGTSAQRAELIALTQALKMAEGKKLNVYTDSRYAFATAHIHGEIYRRRGWLTSEGKEIKNKDEILALLKALFLPKRLSIIHCPGHQKGNSAEARGNRMADQAAREVATRETPETSTLLAGKRTADGSEFEKRTADGSEFESPKKKAKVE

SEQ ID NO: 2258 - protein, 2088 aa, synthetic construct
MPAAKRVKLDGGDKKYSIGLDIGTNSVGWAVITDEYKVPSKKFKVLGNTDRHSIKKNLIGALLFDSGETAEATRLKRTARRRYTRRKNRICYLQEIFSNEMAKVDDSFFHRLEESFLVEEDKKHERHPIFGNIVDEVAYHEKYPTIYHLRKKLVDSTDKADLRLIYLALAHMIKFRGHFLIEGDLNPDNSDVDKLFIQLVQTYNQLFEENPINASGVDAKAILSARLSKSRRLENLIAQLPGEKKNGLFGNLIALSLGLTPNFKSNFDLAEDAKLQLSKDTYDDDLDNLLAQIGDQYADLFLAAKNLSDAILLSDILRVNTEITKAPLSASMIKRYDEHHQDLTLLKALVRQQLPEKYKEIFFDQSKNGYAGYIDGGASQEEFYKFIKPILEKMDGTEELLVKLNREDLLRKQRTFDNGSIPHQIHLGELHAILRRQEDFYPFLKDNREKIEKILTFRIPYYVGPLARGNSRFAWMTRKSEETITPWNFEEVVDKGASAQSFIERMTNFDKNLPNEKVLPKHSLLYEYFTVYNELTKVKYVTEGMRKPAFLSGEQKKAIVDLLFKTNRKVTVKQLKEDYFKKIECFDSVEISGVEDRFNASLGTYHDLLKIIKDKDFLDNEENEDILEDIVLTLTLFEDREMIEERLKTYAHLFDDKVMKQLKRRRYTGWGRLSRKLINGIRDKQSGKTILDFLKSDGFANRNFMQLIHDDSLTFKEDIQKAQVSGQGDSLHEHIANLAGSPAIKKGILQTVKVVDELVKVMGRHKPENIVIEMARENQTTQKGQKNSRERMKRIEEGIKELGSQILKEHPVENTQLQNEKLYLYYLQNGRDMYVDQELDINRLSDYDVDHIVPQSFLKDDSIDNKVLTRSDKARGKSDNVPSEEVVKKMKNYWRQLLNAKLITQRKFDNLTKAERGGLSELDKAGFIKRQLVETRQITKHVAQILDSRMNTKYDENDKLIREVKVITLKSKLVSDFRKDFQFYKVREINNYHHAHDAYLNAVVGTALIKKYPKLESEFVYGDYKVYDVRKMIAKSEQEIGKATAKYFFYSNIMNFFKTEITLANGEIRKRPLIETNGETGEIVWDKGRDFATVRKVLSMPQVNIVKKTEVQTGGFSKESILPKRNSDKLIARKKDWDPKKYGGFDSPTVAYSVLVVAKVEKGKSKKLKSVKELLGITIMERSSFEKNPIDFLEAKGYKEVKKDLIIKLPKYSLFELENGRKRMLASAGELQKGNELALPSKYVNFLYLASHYEKLKGSPEDNEQKQLFVEQHKHYLDEIIEQISEFSKRVILADANLDKVLSAYNKHRDKPIREQAENIIHLFTLTNLGAPAAFKYFDTTIDRKRYTSTKEVLDATLIHQSITGLYETRIDLSQLGGDGGPAPGGTLNIEDEYRLHETSKEPDVSLGSTWLSDFPQAWAETGGMGLAVRQAPLIIPLKATSTPVSIKQYPMSQEARLGIKPHIQRLLDQGILVPCQSPWNTPLLPVKKPGTNDYRPVQDLREVNKRVEDIHPTVPNPYNLLSGLPPSHQWYTVLDLKDAFFCLRLHPTSQPLFAFEWRDPEMGISGQLTWTRLPQGFKNSPTLFNEALHRDLAGFRIQHPDLILLQYVDDLLLAATSELDCQQGTRALLQTLGDLGYRASAKKAQICQKQVKYLGYLLKEGQRWLTEARKETVMGQPIPKTPRQLREFLGTAGFCRLWIPGFAEMAAPLYPLTKPGTLFNWGPDQQKAFQEIKQALLTAPALGLPDLTKPFELFVDEKQGYAKGVLTQKLGPWRRPVAYLSKKLDPVAAGWPPCLRMVAAIAVLTKDAGKLTMGQPLVILAPHAVEALVKQPPDRWLSNARMTHYQALLLDTDRVQFGPVVALNPATLLPLPEEGLQHDCLDILAEAHGTRSDLMDQPLPDADHTWYTDGSSFLQEGQRKAGAAVTTETEVIWARALPAGTSAQRAELIALTQALKMAEGKKLNVYTDSRYAFATAHIHGEIYRRRGWLTSEGKEIKNKDEILALLKALFLPKRLSIIHCPGHQKGNSAEARGNRMADQAAREVATRETPETSTLLAGKRTADGSEFEKRTADGSEFESPKKKAKVE

SEQ ID NO: 2259 - protein, 2094 aa, synthetic construct
MPAAKRVKLDGGDKKYSIGLDIGTNSVGWAVITDEYKVPSKKFKVLGNTDRHSIKKNLIGALLFDSGETAEATRLKRTARRRYTRRKNRICYLQEIFSNEMAKVDDSFFHRLEESFLVEEDKKHERHPIFGNIVDEVAYHEKYPTIYHLRKKLVDSTDKADLRLIYLALAHMIKFRGHFLIEGDLNPDNSDVDKLFIQLVQTYNQLFEENPINASGVDAKAILSARLSKSRRLENLIAQLPGEKKNGLFGNLIALSLGLTPNFKSNFDLAEDAKLQLSKDTYDDDLDNLLAQIGDQYADLFLAAKNLSDAILLSDILRVNTEITKAPLSASMIKRYDEHHQDLTLLKALVRQQLPEKYKEIFFDQSKNGYAGYIDGGASQEEFYKFIKPILEKMDGTEELLVKLNREDLLRKQRTFDNGSIPHQIHLGELHAILRRQEDFYPFLKDNREKIEKILTFRIPYYVGPLARGNSRFAWMTRKSEETITPWNFEEVVDKGASAQSFIERMTNFDKNLPNEKVLPKHSLLYEYFTVYNELTKVKYVTEGMRKPAFLSGEQKKAIVDLLFKTNRKVTVKQLKEDYFKKIECFDSVEISGVEDRFNASLGTYHDLLKIIKDKDFLDNEENEDILEDIVLTLTLFEDREMIEERLKTYAHLFDDKVMKQLKRRRYTGWGRLSRKLINGIRDKQSGKTILDFLKSDGFANRNFMQLIHDDSLTFKEDIQKAQVSGQGDSLHEHIANLAGSPAIKKGILQTVKVVDELVKVMGRHKPENIVIEMARENQTTQKGQKNSRERMKRIEEGIKELGSQILKEHPVENTQLQNEKLYLYYLQNGRDMYVDQELDINRLSDYDVDHIVPQSFLKDDSIDNKVLTRSDKARGKSDNVPSEEVVKKMKNYWRQLLNAKLITQRKFDNLTKAERGGLSELDKAGFIKRQLVETRQITKHVAQILDSRMNTKYDENDKLIREVKVITLKSKLVSDFRKDFQFYKVREINNYHHAHDAYLNAVVGTALIKKYPKLESEFVYGDYKVYDVRKMIAKSEQEIGKATAKYFFYSNIMNFFKTEITLANGEIRKRPLIETNGETGEIVWDKGRDFATVRKVLSMPQVNIVKKTEVQTGGFSKESILPKRNSDKLIARKKDWDPKKYGGFDSPTVAYSVLVVAKVEKGKSKKLKSVKELLGITIMERSSFEKNPIDFLEAKGYKEVKKDLIIKLPKYSLFELENGRKRMLASAGELQKGNELALPSKYVNFLYLASHYEKLKGSPEDNEQKQLFVEQHKHYLDEIIEQISEFSKRVILADANLDKVLSAYNKHRDKPIREQAENIIHLFTLTNLGAPAAFKYFDTTIDRKRYTSTKEVLDATLIHQSITGLYETRIDLSQLGGDGGGGSGGGPAPGGTLNIEDEYRLHETSKEPDVSLGSTWLSDFPQAWAETGGMGLAVRQAPLIIPLKATSTPVSIKQYPMSQEARLGIKPHIQRLLDQGILVPCQSPWNTPLLPVKKPGTNDYRPVQDLREVNKRVEDIHPTVPNPYNLLSGLPPSHQWYTVLDLKDAFFCLRLHPTSQPLFAFEWRDPEMGISGQLTWTRLPQGFKNSPTLFNEALHRDLAGFRIQHPDLILLQYVDDLLLAATSELDCQQGTRALLQTLGDLGYRASAKKAQICQKQVKYLGYLLKEGQRWLTEARKETVMGQPIPKTPRQLREFLGTAGFCRLWIPGFAEMAAPLYPLTKPGTLFNWGPDQQKAFQEIKQALLTAPALGLPDLTKPFELFVDEKQGYAKGVLTQKLGPWRRPVAYLSKKLDPVAAGWPPCLRMVAAIAVLTKDAGKLTMGQPLVILAPHAVEALVKQPPDRWLSNARMTHYQALLLDTDRVQFGPVVALNPATLLPLPEEGLQHDCLDILAEAHGTRSDLMDQPLPDADHTWYTDGSSFLQEGQRKAGAAVTTETEVIWARALPAGTSAQRAELIALTQALKMAEGKKLNVYTDSRYAFATAHIHGEIYRRRGWLTSEGKEIKNKDEILALLKALFLPKRLSIIHCPGHQKGNSAEARGNRMADQAAREVATRETPETSTLLAGKRTADGSEFEKRTADGSEFESPKKKAKVE

SEQ ID NO: 2260 - protein, 2094 aa, synthetic construct
MPAAKRVKLDGGDKKYSIGLDIGTNSVGWAVITDEYKVPSKKFKVLGNTDRHSIKKNLIGALLFDSGETAEATRLKRTARRRYTRRKNRICYLQEIFSNEMAKVDDSFFHRLEESFLVEEDKKHERHPIFGNIVDEVAYHEKYPTIYHLRKKLVDSTDKADLRLIYLALAHMIKFRGHFLIEGDLNPDNSDVDKLFIQLVQTYNQLFEENPINASGVDAKAILSARLSKSRRLENLIAQLPGEKKNGLFGNLIALSLGLTPNFKSNFDLAEDAKLQLSKDTYDDDLDNLLAQIGDQYADLFLAAKNLSDAILLSDILRVNTEITKAPLSASMIKRYDEHHQDLTLLKALVRQQLPEKYKEIFFDQSKNGYAGYIDGGASQEEFYKFIKPILEKMDGTEELLVKLNREDLLRKQRTFDNGSIPHQIHLGELHAILRRQEDFYPFLKDNREKIEKILTFRIPYYVGPLARGNSRFAWMTRKSEETITPWNFEEVVDKGASAQSFIERMTNFDKNLPNEKVLPKHSLLYEYFTVYNELTKVKYVTEGMRKPAFLSGEQKKAIVDLLFKTNRKVTVKQLKEDYFKKIECFDSVEISGVEDRFNASLGTYHDLLKIIKDKDFLDNEENEDILEDIVLTLTLFEDREMIEERLKTYAHLFDDKVMKQLKRRRYTGWGRLSRKLINGIRDKQSGKTILDFLKSDGFANRNFMQLIHDDSLTFKEDIQKAQVSGQGDSLHEHIANLAGSPAIKKGILQTVKVVDELVKVMGRHKPENIVIEMARENQTTQKGQKNSRERMKRIEEGIKELGSQILKEHPVENTQLQNEKLYLYYLQNGRDMYVDQELDINRLSDYDVDHIVPQSFLKDDSIDNKVLTRSDKARGKSDNVPSEEVVKKMKNYWRQLLNAKLITQRKFDNLTKAERGGLSELDKAGFIKRQLVETRQITKHVAQILDSRMNTKYDENDKLIREVKVITLKSKLVSDFRKDFQFYKVREINNYHHAHDAYLNAVVGTALIKKYPKLESEFVYGDYKVYDVRKMIAKSEQEIGKATAKYFFYSNIMNFFKTEITLANGEIRKRPLIETNGETGEIVWDKGRDFATVRKVLSMPQVNIVKKTEVQTGGFSKESILPKRNSDKLIARKKDWDPKKYGGFDSPTVAYSVLVVAKVEKGKSKKLKSVKELLGITIMERSSFEKNPIDFLEAKGYKEVKKDLIIKLPKYSLFELENGRKRMLASAGELQKGNELALPSKYVNFLYLASHYEKLKGSPEDNEQKQLFVEQHKHYLDEIIEQISEFSKRVILADANLDKVLSAYNKHRDKPIREQAENIIHLFTLTNLGAPAAFKYFDTTIDRKRYTSTKEVLDATLIHQSITGLYETRIDLSQLGGDGGGGSPAPGSSGGTLNIEDEYRLHETSKEPDVSLGSTWLSDFPQAWAETGGMGLAVRQAPLIIPLKATSTPVSIKQYPMSQEARLGIKPHIQRLLDQGILVPCQSPWNTPLLPVKKPGTNDYRPVQDLREVNKRVEDIHPTVPNPYNLLSGLPPSHQWYTVLDLKDAFFCLRLHPTSQPLFAFEWRDPEMGISGQLTWTRLPQGFKNSPTLFNEALHRDLAGFRIQHPDLILLQYVDDLLLAATSELDCQQGTRALLQTLGDLGYRASAKKAQICQKQVKYLGYLLKEGQRWLTEARKETVMGQPIPKTPRQLREFLGTAGFCRLWIPGFAEMAAPLYPLTKPGTLFNWGPDQQKAFQEIKQALLTAPALGLPDLTKPFELFVDEKQGYAKGVLTQKLGPWRRPVAYLSKKLDPVAAGWPPCLRMVAAIAVLTKDAGKLTMGQPLVILAPHAVEALVKQPPDRWLSNARMTHYQALLLDTDRVQFGPVVALNPATLLPLPEEGLQHDCLDILAEAHGTRSDLMDQPLPDADHTWYTDGSSFLQEGQRKAGAAVTTETEVIWARALPAGTSAQRAELIALTQALKMAEGKKLNVYTDSRYAFATAHIHGEIYRRRGWLTSEGKEIKNKDEILALLKALFLPKRLSIIHCPGHQKGNSAEARGNRMADQAAREVATRETPETSTLLAGKRTADGSEFEKRTADGSEFESPKKKAKVE

SEQ ID NO: 2261 - protein, 2096 aa, synthetic construct
MPAAKRVKLDGGDKKYSIGLDIGTNSVGWAVITDEYKVPSKKFKVLGNTDRHSIKKNLIGALLFDSGETAEATRLKRTARRRYTRRKNRICYLQEIFSNEMAKVDDSFFHRLEESFLVEEDKKHERHPIFGNIVDEVAYHEKYPTIYHLRKKLVDSTDKADLRLIYLALAHMIKFRGHFLIEGDLNPDNSDVDKLFIQLVQTYNQLFEENPINASGVDAKAILSARLSKSRRLENLIAQLPGEKKNGLFGNLIALSLGLTPNFKSNFDLAEDAKLQLSKDTYDDDLDNLLAQIGDQYADLFLAAKNLSDAILLSDILRVNTEITKAPLSASMIKRYDEHHQDLTLLKALVRQQLPEKYKEIFFDQSKNGYAGYIDGGASQEEFYKFIKPILEKMDGTEELLVKLNREDLLRKQRTFDNGSIPHQIHLGELHAILRRQEDFYPFLKDNREKIEKILTFRIPYYVGPLARGNSRFAWMTRKSEETITPWNFEEVVDKGASAQSFIERMTNFDKNLPNEKVLPKHSLLYEYFTVYNELTKVKYVTEGMRKPAFLSGEQKKAIVDLLFKTNRKVTVKQLKEDYFKKIECFDSVEISGVEDRFNASLGTYHDLLKIIKDKDFLDNEENEDILEDIVLTLTLFEDREMIEERLKTYAHLFDDKVMKQLKRRRYTGWGRLSRKLINGIRDKQSGKTILDFLKSDGFANRNFMQLIHDDSLTFKEDIQKAQVSGQGDSLHEHIANLAGSPAIKKGILQTVKVVDELVKVMGRHKPENIVIEMARENQTTQKGQKNSRERMKRIEEGIKELGSQILKEHPVENTQLQNEKLYLYYLQNGRDMYVDQELDINRLSDYDVDHIVPQSFLKDDSIDNKVLTRSDKARGKSDNVPSEEVVKKMKNYWRQLLNAKLITQRKFDNLTKAERGGLSELDKAGFIKRQLVETRQITKHVAQILDSRMNTKYDENDKLIREVKVITLKSKLVSDFRKDFQFYKVREINNYHHAHDAYLNAVVGTALIKKYPKLESEFVYGDYKVYDVRKMIAKSEQEIGKATAKYFFYSNIMNFFKTEITLANGEIRKRPLIETNGETGEIVWDKGRDFATVRKVLSMPQVNIVKKTEVQTGGFSKESILPKRNSDKLIARKKDWDPKKYGGFDSPTVAYSVLVVAKVEKGKSKKLKSVKELLGITIMERSSFEKNPIDFLEAKGYKEVKKDLIIKLPKYSLFELENGRKRMLASAGELQKGNELALPSKYVNFLYLASHYEKLKGSPEDNEQKQLFVEQHKHYLDEIIEQISEFSKRVILADANLDKVLSAYNKHRDKPIREQAENIIHLFTLTNLGAPAAFKYFDTTIDRKRYTSTKEVLDATLIHQSITGLYETRIDLSQLGGDGGEAAAKGGGGSSGGTLNIEDEYRLHETSKEPDVSLGSTWLSDFPQAWAETGGMGLAVRQAPLIIPLKATSTPVSIKQYPMSQEARLGIKPHIQRLLDQGILVPCQSPWNTPLLPVKKPGTNDYRPVQDLREVNKRVEDIHPTVPNPYNLLSGLPPSHQWYTVLDLKDAFFCLRLHPTSQPLFAFEWRDPEMGISGQLTWTRLPQGFKNSPTLFNEALHRDLAGFRIQHPDLILLQYVDDLLLAATSELDCQQGTRALLQTLGDLGYRASAKKAQICQKQVKYLGYLLKEGQRWLTEARKETVMGQPIPKTPRQLREFLGTAGFCRLWIPGFAEMAAPLYPLTKPGTLFNWGPDQQKAFQEIKQALLTAPALGLPDLTKPFELFVDEKQGYAKGVLTQKLGPWRRPVAYLSKKLDPVAAGWPPCLRMVAAIAVLTKDAGKLTMGQPLVILAPHAVEALVKQPPDRWLSNARMTHYQALLLDTDRVQFGPVVALNPATLLPLPEEGLQHDCLDILAEAHGTRSDLMDQPLPDADHTWYTDGSSFLQEGQRKAGAAVTTETEVIWARALPAGTSAQRAELIALTQALKMAEGKKLNVYTDSRYAFATAHIHGEIYRRRGWLTSEGKEIKNKDEILALLKALFLPKRLSIIHCPGHQKGNSAEARGNRMADQAAREVATRETPETSTLLAGKRTADGSEFEKRTADGSEFESPKKKAKVE

SEQ ID NO: 2262 - protein, 2094 aa, synthetic construct
MPAAKRVKLDGGDKKYSIGLDIGTNSVGWAVITDEYKVPSKKFKVLGNTDRHSIKKNLIGALLFDSGETAEATRLKRTARRRYTRRKNRICYLQEIFSNEMAKVDDSFFHRLEESFLVEEDKKHERHPIFGNIVDEVAYHEKYPTIYHLRKKLVDSTDKADLRLIYLALAHMIKFRGHFLIEGDLNPDNSDVDKLFIQLVQTYNQLFEENPINASGVDAKAILSARLSKSRRLENLIAQLPGEKKNGLFGNLIALSLGLTPNFKSNFDLAEDAKLQLSKDTYDDDLDNLLAQIGDQYADLFLAAKNLSDAILLSDILRVNTEITKAPLSASMIKRYDEHHQDLTLLKALVRQQLPEKYKEIFFDQSKNGYAGYIDGGASQEEFYKFIKPILEKMDGTEELLVKLNREDLLRKQRTFDNGSIPHQIHLGELHAILRRQEDFYPFLKDNREKIEKILTFRIPYYVGPLARGNSRFAWMTRKSEETITPWNFEEVVDKGASAQSFIERMTNFDKNLPNEKVLPKHSLLYEYFTVYNELTKVKYVTEGMRKPAFLSGEQKKAIVDLLFKTNRKVTVKQLKEDYFKKIECFDSVEISGVEDRFNASLGTYHDLLKIIKDKDFLDNEENEDILEDIVLTLTLFEDREMIEERLKTYAHLFDDKVMKQLKRRRYTGWGRLSRKLINGIRDKQSGKTILDFLKSDGFANRNFMQLIHDDSLTFKEDIQKAQVSGQGDSLHEHIANLAGSPAIKKGILQTVKVVDELVKVMGRHKPENIVIEMARENQTTQKGQKNSRERMKRIEEGIKELGSQILKEHPVENTQLQNEKLYLYYLQNGRDMYVDQELDINRLSDYDVDHIVPQSFLKDDSIDNKVLTRSDKARGKSDNVPSEEVVKKMKNYWRQLLNAKLITQRKFDNLTKAERGGLSELDKAGFIKRQLVETRQITKHVAQILDSRMNTKYDENDKLIREVKVITLKSKLVSDFRKDFQFYKVREINNYHHAHDAYLNAVVGTALIKKYPKLESEFVYGDYKVYDVRKMIAKSEQEIGKATAKYFFYSNIMNFFKTEITLANGEIRKRPLIETNGETGEIVWDKGRDFATVRKVLSMPQVNIVKKTEVQTGGFSKESILPKRNSDKLIARKKDWDPKKYGGFDSPTVAYSVLVVAKVEKGKSKKLKSVKELLGITIMERSSFEKNPIDFLEAKGYKEVKKDLIIKLPKYSLFELENGRKRMLASAGELQKGNELALPSKYVNFLYLASHYEKLKGSPEDNEQKQLFVEQHKHYLDEIIEQISEFSKRVILADANLDKVLSAYNKHRDKPIREQAENIIHLFTLTNLGAPAAFKYFDTTIDRKRYTSTKEVLDATLIHQSITGLYETRIDLSQLGGDGGPAPGSSGGGGGTLNIEDEYRLHETSKEPDVSLGSTWLSDFPQAWAETGGMGLAVRQAPLIIPLKATSTPVSIKQYPMSQEARLGIKPHIQRLLDQGILVPCQSPWNTPLLPVKKPGTNDYRPVQDLREVNKRVEDIHPTVPNPYNLLSGLPPSHQWYTVLDLKDAFFCLRLHPTSQPLFAFEWRDPEMGISGQLTWTRLPQGFKNSPTLFNEALHRDLAGFRIQHPDLILLQYVDDLLLAATSELDCQQGTRALLQTLGDLGYRASAKKAQICQKQVKYLGYLLKEGQRWLTEARKETVMGQPIPKTPRQLREFLGTAGFCRLWIPGFAEMAAPLYPLTKPGTLFNWGPDQQKAFQEIKQALLTAPALGLPDLTKPFELFVDEKQGYAKGVLTQKLGPWRRPVAYLSKKLDPVAAGWPPCLRMVAAIAVLTKDAGKLTMGQPLVILAPHAVEALVKQPPDRWLSNARMTHYQALLLDTDRVQFGPVVALNPATLLPLPEEGLQHDCLDILAEAHGTRSDLMDQPLPDADHTWYTDGSSFLQEGQRKAGAAVTTETEVIWARALPAGTSAQRAELIALTQALKMAEGKKLNVYTDSRYAFATAHIHGEIYRRRGWLTSEGKEIKNKDEILALLKALFLPKRLSIIHCPGHQKGNSAEARGNRMADQAAREVATRETPETSTLLAGKRTADGSEFEKRTADGSEFESPKKKAKVE

SEQ ID NO: 2263 - protein, 2096 aa, synthetic construct
MPAAKRVKLDGGDKKYSIGLDIGTNSVGWAVITDEYKVPSKKFKVLGNTDRHSIKKNLIGALLFDSGETAEATRLKRTARRRYTRRKNRICYLQEIFSNEMAKVDDSFFHRLEESFLVEEDKKHERHPIFGNIVDEVAYHEKYPTIYHLRKKLVDSTDKADLRLIYLALAHMIKFRGHFLIEGDLNPDNSDVDKLFIQLVQTYNQLFEENPINASGVDAKAILSARLSKSRRLENLIAQLPGEKKNGLFGNLIALSLGLTPNFKSNFDLAEDAKLQLSKDTYDDDLDNLLAQIGDQYADLFLAAKNLSDAILLSDILRVNTEITKAPLSASMIKRYDEHHQDLTLLKALVRQQLPEKYKEIFFDQSKNGYAGYIDGGASQEEFYKFIKPILEKMDGTEELLVKLNREDLLRKQRTFDNGSIPHQIHLGELHAILRRQEDFYPFLKDNREKIEKILTFRIPYYVGPLARGNSRFAWMTRKSEETITPWNFEEVVDKGASAQSFIERMTNFDKNLPNEKVLPKHSLLYEYFTVYNELTKVKYVTEGMRKPAFLSGEQKKAIVDLLFKTNRKVTVKQLKEDYFKKIECFDSVEISGVEDRFNASLGTYHDLLKIIKDKDFLDNEENEDILEDIVLTLTLFEDREMIEERLKTYAHLFDDKVMKQLKRRRYTGWGRLSRKLINGIRDKQSGKTILDFLKSDGFANRNFMQLIHDDSLTFKEDIQKAQVSGQGDSLHEHIANLAGSPAIKKGILQTVKVVDELVKVMGRHKPENIVIEMARENQTTQKGQKNSRERMKRIEEGIKELGSQILKEHPVENTQLQNEKLYLYYLQNGRDMYVDQELDINRLSDYDVDHIVPQSFLKDDSIDNKVLTRSDKARGKSDNVPSEEVVKKMKNYWRQLLNAKLITQRKFDNLTKAERGGLSELDKAGFIKRQLVETRQITKHVAQILDSRMNTKYDENDKLIREVKVITLKSKLVSDFRKDFQFYKVREINNYHHAHDAYLNAVVGTALIKKYPKLESEFVYGDYKVYDVRKMIAKSEQEIGKATAKYFFYSNIMNFFKTEITLANGEIRKRPLIETNGETGEIVWDKGRDFATVRKVLSMPQVNIVKKTEVQTGGFSKESILPKRNSDKLIARKKDWDPKKYGGFDSPTVAYSVLVVAKVEKGKSKKLKSVKELLGITIMERSSFEKNPIDFLEAKGYKEVKKDLIIKLPKYSLFELENGRKRMLASAGELQKGNELALPSKYVNFLYLASHYEKLKGSPEDNEQKQLFVEQHKHYLDEIIEQISEFSKRVILADANLDKVLSAYNKHRDKPIREQAENIIHLFTLTNLGAPAAFKYFDTTIDRKRYTSTKEVLDATLIHQSITGLYETRIDLSQLGGDGGGGSGSSEAAAKGGTLNIEDEYRLHETSKEPDVSLGSTWLSDFPQAWAETGGMGLAVRQAPLIIPLKATSTPVSIKQYPMSQEARLGIKPHIQRLLDQGILVPCQSPWNTPLLPVKKPGTNDYRPVQDLREVNKRVEDIHPTVPNPYNLLSGLPPSHQWYTVLDLKDAFFCLRLHPTSQPLFAFEWRDPEMGISGQLTWTRLPQGFKNSPTLFNEALHRDLAGFRIQHPDLILLQYVDDLLLAATSELDCQQGTRALLQTLGDLGYRASAKKAQICQKQVKYLGYLLKEGQRWLTEARKETVMGQPIPKTPRQLREFLGTAGFCRLWIPGFAEMAAPLYPLTKPGTLFNWGPDQQKAFQEIKQALLTAPALGLPDLTKPFELFVDEKQGYAKGVLTQKLGPWRRPVAYLSKKLDPVAAGWPPCLRMVAAIAVLTKDAGKLTMGQPLVILAPHAVEALVKQPPDRWLSNARMTHYQALLLDTDRVQFGPVVALNPATLLPLPEEGLQHDCLDILAEAHGTRSDLMDQPLPDADHTWYTDGSSFLQEGQRKAGAAVTTETEVIWARALPAGTSAQRAELIALTQALKMAEGKKLNVYTDSRYAFATAHIHGEIYRRRGWLTSEGKEIKNKDEILALLKALFLPKRLSIIHCPGHQKGNSAEARGNRMADQAAREVATRETPETSTLLAGKRTADGSEFEKRTADGSEFESPKKKAKVE

SEQ ID NO: 2264 - protein, 2091 aa, synthetic construct
MPAAKRVKLDGGDKKYSIGLDIGTNSVGWAVITDEYKVPSKKFKVLGNTDRHSIKKNLIGALLFDSGETAEATRLKRTARRRYTRRKNRICYLQEIFSNEMAKVDDSFFHRLEESFLVEEDKKHERHPIFGNIVDEVAYHEKYPTIYHLRKKLVDSTDKADLRLIYLALAHMIKFRGHFLIEGDLNPDNSDVDKLFIQLVQTYNQLFEENPINASGVDAKAILSARLSKSRRLENLIAQLPGEKKNGLFGNLIALSLGLTPNFKSNFDLAEDAKLQLSKDTYDDDLDNLLAQIGDQYADLFLAAKNLSDAILLSDILRVNTEITKAPLSASMIKRYDEHHQDLTLLKALVRQQLPEKYKEIFFDQSKNGYAGYIDGGASQEEFYKFIKPILEKMDGTEELLVKLNREDLLRKQRTFDNGSIPHQIHLGELHAILRRQEDFYPFLKDNREKIEKILTFRIPYYVGPLARGNSRFAWMTRKSEETITPWNFEEVVDKGASAQSFIERMTNFDKNLPNEKVLPKHSLLYEYFTVYNELTKVKYVTEGMRKPAFLSGEQKKAIVDLLFKTNRKVTVKQLKEDYFKKIECFDSVEISGVEDRFNASLGTYHDLLKIIKDKDFLDNEENEDILEDIVLTLTLFEDREMIEERLKTYAHLFDDKVMKQLKRRRYTGWGRLSRKLINGIRDKQSGKTILDFLKSDGFANRNFMQLIHDDSLTFKEDIQKAQVSGQGDSLHEHIANLAGSPAIKKGILQTVKVVDELVKVMGRHKPENIVIEMARENQTTQKGQKNSRERMKRIEEGIKELGSQILKEHPVENTQLQNEKLYLYYLQNGRDMYVDQELDINRLSDYDVDHIVPQSFLKDDSIDNKVLTRSDKARGKSDNVPSEEVVKKMKNYWRQLLNAKLITQRKFDNLTKAERGGLSELDKAGFIKRQLVETRQITKHVAQILDSRMNTKYDENDKLIREVKVITLKSKLVSDFRKDFQFYKVREINNYHHAHDAYLNAVVGTALIKKYPKLESEFVYGDYKVYDVRKMIAKSEQEIGKATAKYFFYSNIMNFFKTEITLANGEIRKRPLIETNGETGEIVWDKGRDFATVRKVLSMPQVNIVKKTEVQTGGFSKESILPKRNSDKLIARKKDWDPKKYGGFDSPTVAYSVLVVAKVEKGKSKKLKSVKELLGITIMERSSFEKNPIDFLEAKGYKEVKKDLIIKLPKYSLFELENGRKRMLASAGELQKGNELALPSKYVNFLYLASHYEKLKGSPEDNEQKQLFVEQHKHYLDEIIEQISEFSKRVILADANLDKVLSAYNKHRDKPIREQAENIIHLFTLTNLGAPAAFKYFDTTIDRKRYTSTKEVLDATLIHQSITGLYETRIDLSQLGGDGGGSSGGGGGTLNIEDEYRLHETSKEPDVSLGSTWLSDFPQAWAETGGMGLAVRQAPLIIPLKATSTPVSIKQYPMSQEARLGIKPHIQRLLDQGILVPCQSPWNTPLLPVKKPGTNDYRPVQDLREVNKRVEDIHPTVPNPYNLLSGLPPSHQWYTVLDLKDAFFCLRLHPTSQPLFAFEWRDPEMGISGQLTWTRLPQGFKNSPTLFNEALHRDLAGFRIQHPDLILLQYVDDLLLAATSELDCQQGTRALLQTLGDLGYRASAKKAQICQKQVKYLGYLLKEGQRWLTEARKETVMGQPIPKTPRQLREFLGTAGFCRLWIPGFAEMAAPLYPLTKPGTLFNWGPDQQKAFQEIKQALLTAPALGLPDLTKPFELFVDEKQGYAKGVLTQKLGPWRRPVAYLSKKLDPVAAGWPPCLRMVAAIAVLTKDAGKLTMGQPLVILAPHAVEALVKQPPDRWLSNARMTHYQALLLDTDRVQFGPVVALNPATLLPLPEEGLQHDCLDILAEAHGTRSDLMDQPLPDADHTWYTDGSSFLQEGQRKAGAAVTTETEVIWARALPAGTSAQRAELIALTQALKMAEGKKLNVYTDSRYAFATAHIHGEIYRRRGWLTSEGKEIKNKDEILALLKALFLPKRLSIIHCPGHQKGNSAEARGNRMADQAAREVATRETPETSTLLAGKRTADGSEFEKRTADGSEFESPKKKAKVE

SEQ ID NO: 2265 - protein, 2094 aa, synthetic construct
MPAAKRVKLDGGDKKYSIGLDIGTNSVGWAVITDEYKVPSKKFKVLGNTDRHSIKKNLIGALLFDSGETAEATRLKRTARRRYTRRKNRICYLQEIFSNEMAKVDDSFFHRLEESFLVEEDKKHERHPIFGNIVDEVAYHEKYPTIYHLRKKLVDSTDKADLRLIYLALAHMIKFRGHFLIEGDLNPDNSDVDKLFIQLVQTYNQLFEENPINASGVDAKAILSARLSKSRRLENLIAQLPGEKKNGLFGNLIALSLGLTPNFKSNFDLAEDAKLQLSKDTYDDDLDNLLAQIGDQYADLFLAAKNLSDAILLSDILRVNTEITKAPLSASMIKRYDEHHQDLTLLKALVRQQLPEKYKEIFFDQSKNGYAGYIDGGASQEEFYKFIKPILEKMDGTEELLVKLNREDLLRKQRTFDNGSIPHQIHLGELHAILRRQEDFYPFLKDNREKIEKILTFRIPYYVGPLARGNSRFAWMTRKSEETITPWNFEEVVDKGASAQSFIERMTNFDKNLPNEKVLPKHSLLYEYFTVYNELTKVKYVTEGMRKPAFLSGEQKKAIVDLLFKTNRKVTVKQLKEDYFKKIECFDSVEISGVEDRFNASLGTYHDLLKIIKDKDFLDNEENEDILEDIVLTLTLFEDREMIEERLKTYAHLFDDKVMKQLKRRRYTGWGRLSRKLINGIRDKQSGKTILDFLKSDGFANRNFMQLIHDDSLTFKEDIQKAQVSGQGDSLHEHIANLAGSPAIKKGILQTVKVVDELVKVMGRHKPENIVIEMARENQTTQKGQKNSRERMKRIEEGIKELGSQILKEHPVENTQLQNEKLYLYYLQNGRDMYVDQELDINRLSDYDVDHIVPQSFLKDDSIDNKVLTRSDKARGKSDNVPSEEVVKKMKNYWRQLLNAKLITQRKFDNLTKAERGGLSELDKAGFIKRQLVETRQITKHVAQILDSRMNTKYDENDKLIREVKVITLKSKLVSDFRKDFQFYKVREINNYHHAHDAYLNAVVGTALIKKYPKLESEFVYGDYKVYDVRKMIAKSEQEIGKATAKYFFYSNIMNFFKTEITLANGEIRKRPLIETNGETGEIVWDKGRDFATVRKVLSMPQVNIVKKTEVQTGGFSKESILPKRNSDKLIARKKDWDPKKYGGFDSPTVAYSVLVVAKVEKGKSKKLKSVKELLGITIMERSSFEKNPIDFLEAKGYKEVKKDLIIKLPKYSLFELENGRKRMLASAGELQKGNELALPSKYVNFLYLASHYEKLKGSPEDNEQKQLFVEQHKHYLDEIIEQISEFSKRVILADANLDKVLSAYNKHRDKPIREQAENIIHLFTLTNLGAPAAFKYFDTTIDRKRYTSTKEVLDATLIHQSITGLYETRIDLSQLGGDGGGGSGSSPAPGGTLNIEDEYRLHETSKEPDVSLGSTWLSDFPQAWAETGGMGLAVRQAPLIIPLKATSTPVSIKQYPMSQEARLGIKPHIQRLLDQGILVPCQSPWNTPLLPVKKPGTNDYRPVQDLREVNKRVEDIHPTVPNPYNLLSGLPPSHQWYTVLDLKDAFFCLRLHPTSQPLFAFEWRDPEMGISGQLTWTRLPQGFKNSPTLFNEALHRDLAGFRIQHPDLILLQYVDDLLLAATSELDCQQGTRALLQTLGDLGYRASAKKAQICQKQVKYLGYLLKEGQRWLTEARKETVMGQPIPKTPRQLREFLGTAGFCRLWIPGFAEMAAPLYPLTKPGTLFNWGPDQQKAFQEIKQALLTAPALGLPDLTKPFELFVDEKQGYAKGVLTQKLGPWRRPVAYLSKKLDPVAAGWPPCLRMVAAIAVLTKDAGKLTMGQPLVILAPHAVEALVKQPPDRWLSNARMTHYQALLLDTDRVQFGPVVALNPATLLPLPEEGLQHDCLDILAEAHGTRSDLMDQPLPDADHTWYTDGSSFLQEGQRKAGAAVTTETEVIWARALPAGTSAQRAELIALTQALKMAEGKKLNVYTDSRYAFATAHIHGEIYRRRGWLTSEGKEIKNKDEILALLKALFLPKRLSIIHCPGHQKGNSAEARGNRMADQAAREVATRETPETSTLLAGKRTADGSEFEKRTADGSEFESPKKKAKVE

SEQ ID NO: 2266 - protein, 2096 aa, synthetic construct
MPAAKRVKLDGGDKKYSIGLDIGTNSVGWAVITDEYKVPSKKFKVLGNTDRHSIKKNLIGALLFDSGETAEATRLKRTARRRYTRRKNRICYLQEIFSNEMAKVDDSFFHRLEESFLVEEDKKHERHPIFGNIVDEVAYHEKYPTIYHLRKKLVDSTDKADLRLIYLALAHMIKFRGHFLIEGDLNPDNSDVDKLFIQLVQTYNQLFEENPINASGVDAKAILSARLSKSRRLENLIAQLPGEKKNGLFGNLIALSLGLTPNFKSNFDLAEDAKLQLSKDTYDDDLDNLLAQIGDQYADLFLAAKNLSDAILLSDILRVNTEITKAPLSASMIKRYDEHHQDLTLLKALVRQQLPEKYKEIFFDQSKNGYAGYIDGGASQEEFYKFIKPILEKMDGTEELLVKLNREDLLRKQRTFDNGSIPHQIHLGELHAILRRQEDFYPFLKDNREKIEKILTFRIPYYVGPLARGNSRFAWMTRKSEETITPWNFEEVVDKGASAQSFIERMTNFDKNLPNEKVLPKHSLLYEYFTVYNELTKVKYVTEGMRKPAFLSGEQKKAIVDLLFKTNRKVTVKQLKEDYFKKIECFDSVEISGVEDRFNASLGTYHDLLKIIKDKDFLDNEENEDILEDIVLTLTLFEDREMIEERLKTYAHLFDDKVMKQLKRRRYTGWGRLSRKLINGIRDKQSGKTILDFLKSDGFANRNFMQLIHDDSLTFKEDIQKAQVSGQGDSLHEHIANLAGSPAIKKGILQTVKVVDELVKVMGRHKPENIVIEMARENQTTQKGQKNSRERMKRIEEGIKELGSQILKEHPVENTQLQNEKLYLYYLQNGRDMYVDQELDINRLSDYDVDHIVPQSFLKDDSIDNKVLTRSDKARGKSDNVPSEEVVKKMKNYWRQLLNAKLITQRKFDNLTKAERGGLSELDKAGFIKRQLVETRQITKHVAQILDSRMNTKYDENDKLIREVKVITLKSKLVSDFRKDFQFYKVREINNYHHAHDAYLNAVVGTALIKKYPKLESEFVYGDYKVYDVRKMIAKSEQEIGKATAKYFFYSNIMNFFKTEITLANGEIRKRPLIETNGETGEIVWDKGRDFATVRKVLSMPQVNIVKKTEVQTGGFSKESILPKRNSDKLIARKKDWDPKKYGGFDSPTVAYSVLVVAKVEKGKSKKLKSVKELLGITIMERSSFEKNPIDFLEAKGYKEVKKDLIIKLPKYSLFELENGRKRMLASAGELQKGNELALPSKYVNFLYLASHYEKLKGSPEDNEQKQLFVEQHKHYLDEIIEQISEFSKRVILADANLDKVLSAYNKHRDKPIREQAENIIHLFTLTNLGAPAAFKYFDTTIDRKRYTSTKEVLDATLIHQSITGLYETRIDLSQLGGDGGGGSGGGEAAAKGGTLNIEDEYRLHETSKEPDVSLGSTWLSDFPQAWAETGGMGLAVRQAPLIIPLKATSTPVSIKQYPMSQEARLGIKPHIQRLLDQGILVPCQSPWNTPLLPVKKPGTNDYRPVQDLREVNKRVEDIHPTVPNPYNLLSGLPPSHQWYTVLDLKDAFFCLRLHPTSQPLFAFEWRDPEMGISGQLTWTRLPQGFKNSPTLFNEALHRDLAGFRIQHPDLILLQYVDDLLLAATSELDCQQGTRALLQTLGDLGYRASAKKAQICQKQVKYLGYLLKEGQRWLTEARKETVMGQPIPKTPRQLREFLGTAGFCRLWIPGFAEMAAPLYPLTKPGTLFNWGPDQQKAFQEIKQALLTAPALGLPDLTKPFELFVDEKQGYAKGVLTQKLGPWRRPVAYLSKKLDPVAAGWPPCLRMVAAIAVLTKDAGKLTMGQPLVILAPHAVEALVKQPPDRWLSNARMTHYQALLLDTDRVQFGPVVALNPATLLPLPEEGLQHDCLDILAEAHGTRSDLMDQPLPDADHTWYTDGSSFLQEGQRKAGAAVTTETEVIWARALPAGTSAQRAELIALTQALKMAEGKKLNVYTDSRYAFATAHIHGEIYRRRGWLTSEGKEIKNKDEILALLKALFLPKRLSIIHCPGHQKGNSAEARGNRMADQAAREVATRETPETSTLLAGKRTADGSEFEKRTADGSEFESPKKKAKVE

SEQ ID NO: 2267 - protein, 2092 aa, synthetic construct
MPAAKRVKLDGGDKKYSIGLDIGTNSVGWAVITDEYKVPSKKFKVLGNTDRHSIKKNLIGALLFDSGETAEATRLKRTARRRYTRRKNRICYLQEIFSNEMAKVDDSFFHRLEESFLVEEDKKHERHPIFGNIVDEVAYHEKYPTIYHLRKKLVDSTDKADLRLIYLALAHMIKFRGHFLIEGDLNPDNSDVDKLFIQLVQTYNQLFEENPINASGVDAKAILSARLSKSRRLENLIAQLPGEKKNGLFGNLIALSLGLTPNFKSNFDLAEDAKLQLSKDTYDDDLDNLLAQIGDQYADLFLAAKNLSDAILLSDILRVNTEITKAPLSASMIKRYDEHHQDLTLLKALVRQQLPEKYKEIFFDQSKNGYAGYIDGGASQEEFYKFIKPILEKMDGTEELLVKLNREDLLRKQRTFDNGSIPHQIHLGELHAILRRQEDFYPFLKDNREKIEKILTFRIPYYVGPLARGNSRFAWMTRKSEETITPWNFEEVVDKGASAQSFIERMTNFDKNLPNEKVLPKHSLLYEYFTVYNELTKVKYVTEGMRKPAFLSGEQKKAIVDLLFKTNRKVTVKQLKEDYFKKIECFDSVEISGVEDRFNASLGTYHDLLKIIKDKDFLDNEENEDILEDIVLTLTLFEDREMIEERLKTYAHLFDDKVMKQLKRRRYTGWGRLSRKLINGIRDKQSGKTILDFLKSDGFANRNFMQLIHDDSLTFKEDIQKAQVSGQGDSLHEHIANLAGSPAIKKGILQTVKVVDELVKVMGRHKPENIVIEMARENQTTQKGQKNSRERMKRIEEGIKELGSQILKEHPVENTQLQNEKLYLYYLQNGRDMYVDQELDINRLSDYDVDHIVPQSFLKDDSIDNKVLTRSDKARGKSDNVPSEEVVKKMKNYWRQLLNAKLITQRKFDNLTKAERGGLSELDKAGFIKRQLVETRQITKHVAQILDSRMNTKYDENDKLIREVKVITLKSKLVSDFRKDFQFYKVREINNYHHAHDAYLNAVVGTALIKKYPKLESEFVYGDYKVYDVRKMIAKSEQEIGKATAKYFFYSNIMNFFKTEITLANGEIRKRPLIETNGETGEIVWDKGRDFATVRKVLSMPQVNIVKKTEVQTGGFSKESILPKRNSDKLIARKKDWDPKKYGGFDSPTVAYSVLVVAKVEKGKSKKLKSVKELLGITIMERSSFEKNPIDFLEAKGYKEVKKDLIIKLPKYSLFELENGRKRMLASAGELQKGNELALPSKYVNFLYLASHYEKLKGSPEDNEQKQLFVEQHKHYLDEIIEQISEFSKRVILADANLDKVLSAYNKHRDKPIREQAENIIHLFTLTNLGAPAAFKYFDTTIDRKRYTSTKEVLDATLIHQSITGLYETRIDLSQLGGDGGGGGGGGGGGTLNIEDEYRLHETSKEPDVSLGSTWLSDFPQAWAETGGMGLAVRQAPLIIPLKATSTPVSIKQYPMSQEARLGIKPHIQRLLDQGILVPCQSPWNTPLLPVKKPGTNDYRPVQDLREVNKRVEDIHPTVPNPYNLLSGLPPSHQWYTVLDLKDAFFCLRLHPTSQPLFAFEWRDPEMGISGQLTWTRLPQGFKNSPTLFNEALHRDLAGFRIQHPDLILLQYVDDLLLAATSELDCQQGTRALLQTLGDLGYRASAKKAQICQKQVKYLGYLLKEGQRWLTEARKETVMGQPIPKTPRQLREFLGTAGFCRLWIPGFAEMAAPLYPLTKPGTLFNWGPDQQKAFQEIKQALLTAPALGLPDLTKPFELFVDEKQGYAKGVLTQKLGPWRRPVAYLSKKLDPVAAGWPPCLRMVAAIAVLTKDAGKLTMGQPLVILAPHAVEALVKQPPDRWLSNARMTHYQALLLDTDRVQFGPVVALNPATLLPLPEEGLQHDCLDILAEAHGTRSDLMDQPLPDADHTWYTDGSSFLQEGQRKAGAAVTTETEVIWARALPAGTSAQRAELIALTQALKMAEGKKLNVYTDSRYAFATAHIHGEIYRRRGWLTSEGKEIKNKDEILALLKALFLPKRLSIIHCPGHQKGNSAEARGNRMADQAAREVATRETPETSTLLAGKRTADGSEFEKRTADGSEFESPKKKAKVE

SEQ ID NO: 2268 - protein, 2089 aa, synthetic construct
MPAAKRVKLDGGDKKYSIGLDIGTNSVGWAVITDEYKVPSKKFKVLGNTDRHSIKKNLIGALLFDSGETAEATRLKRTARRRYTRRKNRICYLQEIFSNEMAKVDDSFFHRLEESFLVEEDKKHERHPIFGNIVDEVAYHEKYPTIYHLRKKLVDSTDKADLRLIYLALAHMIKFRGHFLIEGDLNPDNSDVDKLFIQLVQTYNQLFEENPINASGVDAKAILSARLSKSRRLENLIAQLPGEKKNGLFGNLIALSLGLTPNFKSNFDLAEDAKLQLSKDTYDDDLDNLLAQIGDQYADLFLAAKNLSDAILLSDILRVNTEITKAPLSASMIKRYDEHHQDLTLLKALVRQQLPEKYKEIFFDQSKNGYAGYIDGGASQEEFYKFIKPILEKMDGTEELLVKLNREDLLRKQRTFDNGSIPHQIHLGELHAILRRQEDFYPFLKDNREKIEKILTFRIPYYVGPLARGNSRFAWMTRKSEETITPWNFEEVVDKGASAQSFIERMTNFDKNLPNEKVLPKHSLLYEYFTVYNELTKVKYVTEGMRKPAFLSGEQKKAIVDLLFKTNRKVTVKQLKEDYFKKIECFDSVEISGVEDRFNASLGTYHDLLKIIKDKDFLDNEENEDILEDIVLTLTLFEDREMIEERLKTYAHLFDDKVMKQLKRRRYTGWGRLSRKLINGIRDKQSGKTILDFLKSDGFANRNFMQLIHDDSLTFKEDIQKAQVSGQGDSLHEHIANLAGSPAIKKGILQTVKVVDELVKVMGRHKPENIVIEMARENQTTQKGQKNSRERMKRIEEGIKELGSQILKEHPVENTQLQNEKLYLYYLQNGRDMYVDQELDINRLSDYDVDHIVPQSFLKDDSIDNKVLTRSDKARGKSDNVPSEEVVKKMKNYWRQLLNAKLITQRKFDNLTKAERGGLSELDKAGFIKRQLVETRQITKHVAQILDSRMNTKYDENDKLIREVKVITLKSKLVSDFRKDFQFYKVREINNYHHAHDAYLNAVVGTALIKKYPKLESEFVYGDYKVYDVRKMIAKSEQEIGKATAKYFFYSNIMNFFKTEITLANGEIRKRPLIETNGETGEIVWDKGRDFATVRKVLSMPQVNIVKKTEVQTGGFSKESILPKRNSDKLIARKKDWDPKKYGGFDSPTVAYSVLVVAKVEKGKSKKLKSVKELLGITIMERSSFEKNPIDFLEAKGYKEVKKDLIIKLPKYSLFELENGRKRMLASAGELQKGNELALPSKYVNFLYLASHYEKLKGSPEDNEQKQLFVEQHKHYLDEIIEQISEFSKRVILADANLDKVLSAYNKHRDKPIREQAENIIHLFTLTNLGAPAAFKYFDTTIDRKRYTSTKEVLDATLIHQSITGLYETRIDLSQLGGDGGGGGGGGTLNIEDEYRLHETSKEPDVSLGSTWLSDFPQAWAETGGMGLAVRQAPLIIPLKATSTPVSIKQYPMSQEARLGIKPHIQRLLDQGILVPCQSPWNTPLLPVKKPGTNDYRPVQDLREVNKRVEDIHPTVPNPYNLLSGLPPSHQWYTVLDLKDAFFCLRLHPTSQPLFAFEWRDPEMGISGQLTWTRLPQGFKNSPTLFNEALHRDLAGFRIQHPDLILLQYVDDLLLAATSELDCQQGTRALLQTLGDLGYRASAKKAQICQKQVKYLGYLLKEGQRWLTEARKETVMGQPIPKTPRQLREFLGTAGFCRLWIPGFAEMAAPLYPLTKPGTLFNWGPDQQKAFQEIKQALLTAPALGLPDLTKPFELFVDEKQGYAKGVLTQKLGPWRRPVAYLSKKLDPVAAGWPPCLRMVAAIAVLTKDAGKLTMGQPLVILAPHAVEALVKQPPDRWLSNARMTHYQALLLDTDRVQFGPVVALNPATLLPLPEEGLQHDCLDILAEAHGTRSDLMDQPLPDADHTWYTDGSSFLQEGQRKAGAAVTTETEVIWARALPAGTSAQRAELIALTQALKMAEGKKLNVYTDSRYAFATAHIHGEIYRRRGWLTSEGKEIKNKDEILALLKALFLPKRLSIIHCPGHQKGNSAEARGNRMADQAAREVATRETPETSTLLAGKRTADGSEFEKRTADGSEFESPKKKAKVE

SEQ ID NO: 2269 - protein, 2096 aa, synthetic construct
MPAAKRVKLDGGDKKYSIGLDIGTNSVGWAVITDEYKVPSKKFKVLGNTDRHSIKKNLIGALLFDSGETAEATRLKRTARRRYTRRKNRICYLQEIFSNEMAKVDDSFFHRLEESFLVEEDKKHERHPIFGNIVDEVAYHEKYPTIYHLRKKLVDSTDKADLRLIYLALAHMIKFRGHFLIEGDLNPDNSDVDKLFIQLVQTYNQLFEENPINASGVDAKAILSARLSKSRRLENLIAQLPGEKKNGLFGNLIALSLGLTPNFKSNFDLAEDAKLQLSKDTYDDDLDNLLAQIGDQYADLFLAAKNLSDAILLSDILRVNTEITKAPLSASMIKRYDEHHQDLTLLKALVRQQLPEKYKEIFFDQSKNGYAGYIDGGASQEEFYKFIKPILEKMDGTEELLVKLNREDLLRKQRTFDNGSIPHQIHLGELHAILRRQEDFYPFLKDNREKIEKILTFRIPYYVGPLARGNSRFAWMTRKSEETITPWNFEEVVDKGASAQSFIERMTNFDKNLPNEKVLPKHSLLYEYFTVYNELTKVKYVTEGMRKPAFLSGEQKKAIVDLLFKTNRKVTVKQLKEDYFKKIECFDSVEISGVEDRFNASLGTYHDLLKIIKDKDFLDNEENEDILEDIVLTLTLFEDREMIEERLKTYAHLFDDKVMKQLKRRRYTGWGRLSRKLINGIRDKQSGKTILDFLKSDGFANRNFMQLIHDDSLTFKEDIQKAQVSGQGDSLHEHIANLAGSPAIKKGILQTVKVVDELVKVMGRHKPENIVIEMARENQTTQKGQKNSRERMKRIEEGIKELGSQILKEHPVENTQLQNEKLYLYYLQNGRDMYVDQELDINRLSDYDVDHIVPQSFLKDDSIDNKVLTRSDKARGKSDNVPSEEVVKKMKNYWRQLLNAKLITQRKFDNLTKAERGGLSELDKAGFIKRQLVETRQITKHVAQILDSRMNTKYDENDKLIREVKVITLKSKLVSDFRKDFQFYKVREINNYHHAHDAYLNAVVGTALIKKYPKLESEFVYGDYKVYDVRKMIAKSEQEIGKATAKYFFYSNIMNFFKTEITLANGEIRKRPLIETNGETGEIVWDKGRDFATVRKVLSMPQVNIVKKTEVQTGGFSKESILPKRNSDKLIARKKDWDPKKYGGFDSPTVAYSVLVVAKVEKGKSKKLKSVKELLGITIMERSSFEKNPIDFLEAKGYKEVKKDLIIKLPKYSLFELENGRKRMLASAGELQKGNELALPSKYVNFLYLASHYEKLKGSPEDNEQKQLFVEQHKHYLDEIIEQISEFSKRVILADANLDKVLSAYNKHRDKPIREQAENIIHLFTLTNLGAPAAFKYFDTTIDRKRYTSTKEVLDATLIHQSITGLYETRIDLSQLGGDGGPAPEAAAKGGGGGTLNIEDEYRLHETSKEPDVSLGSTWLSDFPQAWAETGGMGLAVRQAPLIIPLKATSTPVSIKQYPMSQEARLGIKPHIQRLLDQGILVPCQSPWNTPLLPVKKPGTNDYRPVQDLREVNKRVEDIHPTVPNPYNLLSGLPPSHQWYTVLDLKDAFFCLRLHPTSQPLFAFEWRDPEMGISGQLTWTRLPQGFKNSPTLFNEALHRDLAGFRIQHPDLILLQYVDDLLLAATSELDCQQGTRALLQTLGDLGYRASAKKAQICQKQVKYLGYLLKEGQRWLTEARKETVMGQPIPKTPRQLREFLGTAGFCRLWIPGFAEMAAPLYPLTKPGTLFNWGPDQQKAFQEIKQALLTAPALGLPDLTKPFELFVDEKQGYAKGVLTQKLGPWRRPVAYLSKKLDPVAAGWPPCLRMVAAIAVLTKDAGKLTMGQPLVILAPHAVEALVKQPPDRWLSNARMTHYQALLLDTDRVQFGPVVALNPATLLPLPEEGLQHDCLDILAEAHGTRSDLMDQPLPDADHTWYTDGSSFLQEGQRKAGAAVTTETEVIWARALPAGTSAQRAELIALTQALKMAEGKKLNVYTDSRYAFATAHIHGEIYRRRGWLTSEGKEIKNKDEILALLKALFLPKRLSIIHCPGHQKGNSAEARGNRMADQAAREVATRETPETSTLLAGKRTADGSEFEKRTADGSEFESPKKKAKVE

SEQ ID NO: 2270 - protein, 2091 aa, synthetic construct
MPAAKRVKLDGGDKKYSIGLDIGTNSVGWAVITDEYKVPSKKFKVLGNTDRHSIKKNLIGALLFDSGETAEATRLKRTARRRYTRRKNRICYLQEIFSNEMAKVDDSFFHRLEESFLVEEDKKHERHPIFGNIVDEVAYHEKYPTIYHLRKKLVDSTDKADLRLIYLALAHMIKFRGHFLIEGDLNPDNSDVDKLFIQLVQTYNQLFEENPINASGVDAKAILSARLSKSRRLENLIAQLPGEKKNGLFGNLIALSLGLTPNFKSNFDLAEDAKLQLSKDTYDDDLDNLLAQIGDQYADLFLAAKNLSDAILLSDILRVNTEITKAPLSASMIKRYDEHHQDLTLLKALVRQQLPEKYKEIFFDQSKNGYAGYIDGGASQEEFYKFIKPILEKMDGTEELLVKLNREDLLRKQRTFDNGSIPHQIHLGELHAILRRQEDFYPFLKDNREKIEKILTFRIPYYVGPLARGNSRFAWMTRKSEETITPWNFEEVVDKGASAQSFIERMTNFDKNLPNEKVLPKHSLLYEYFTVYNELTKVKYVTEGMRKPAFLSGEQKKAIVDLLFKTNRKVTVKQLKEDYFKKIECFDSVEISGVEDRFNASLGTYHDLLKIIKDKDFLDNEENEDILEDIVLTLTLFEDREMIEERLKTYAHLFDDKVMKQLKRRRYTGWGRLSRKLINGIRDKQSGKTILDFLKSDGFANRNFMQLIHDDSLTFKEDIQKAQVSGQGDSLHEHIANLAGSPAIKKGILQTVKVVDELVKVMGRHKPENIVIEMARENQTTQKGQKNSRERMKRIEEGIKELGSQILKEHPVENTQLQNEKLYLYYLQNGRDMYVDQELDINRLSDYDVDHIVPQSFLKDDSIDNKVLTRSDKARGKSDNVPSEEVVKKMKNYWRQLLNAKLITQRKFDNLTKAERGGLSELDKAGFIKRQLVETRQITKHVAQILDSRMNTKYDENDKLIREVKVITLKSKLVSDFRKDFQFYKVREINNYHHAHDAYLNAVVGTALIKKYPKLESEFVYGDYKVYDVRKMIAKSEQEIGKATAKYFFYSNIMNFFKTEITLANGEIRKRPLIETNGETGEIVWDKGRDFATVRKVLSMPQVNIVKKTEVQTGGFSKESILPKRNSDKLIARKKDWDPKKYGGFDSPTVAYSVLVVAKVEKGKSKKLKSVKELLGITIMERSSFEKNPIDFLEAKGYKEVKKDLIIKLPKYSLFELENGRKRMLASAGELQKGNELALPSKYVNFLYLASHYEKLKGSPEDNEQKQLFVEQHKHYLDEIIEQISEFSKRVILADANLDKVLSAYNKHRDKPIREQAENIIHLFTLTNLGAPAAFKYFDTTIDRKRYTSTKEVLDATLIHQSITGLYETRIDLSQLGGDGGGGSGSSGGTLNIEDEYRLHETSKEPDVSLGSTWLSDFPQAWAETGGMGLAVRQAPLIIPLKATSTPVSIKQYPMSQEARLGIKPHIQRLLDQGILVPCQSPWNTPLLPVKKPGTNDYRPVQDLREVNKRVEDIHPTVPNPYNLLSGLPPSHQWYTVLDLKDAFFCLRLHPTSQPLFAFEWRDPEMGISGQLTWTRLPQGFKNSPTLFNEALHRDLAGFRIQHPDLILLQYVDDLLLAATSELDCQQGTRALLQTLGDLGYRASAKKAQICQKQVKYLGYLLKEGQRWLTEARKETVMGQPIPKTPRQLREFLGTAGFCRLWIPGFAEMAAPLYPLTKPGTLFNWGPDQQKAFQEIKQALLTAPALGLPDLTKPFELFVDEKQGYAKGVLTQKLGPWRRPVAYLSKKLDPVAAGWPPCLRMVAAIAVLTKDAGKLTMGQPLVILAPHAVEALVKQPPDRWLSNARMTHYQALLLDTDRVQFGPVVALNPATLLPLPEEGLQHDCLDILAEAHGTRSDLMDQPLPDADHTWYTDGSSFLQEGQRKAGAAVTTETEVIWARALPAGTSAQRAELIALTQALKMAEGKKLNVYTDSRYAFATAHIHGEIYRRRGWLTSEGKEIKNKDEILALLKALFLPKRLSIIHCPGHQKGNSAEARGNRMADQAAREVATRETPETSTLLAGKRTADGSEFEKRTADGSEFESPKKKAKVE

SEQ ID NO: 2271 - protein, 2091 aa, synthetic construct
MPAAKRVKLDGGDKKYSIGLDIGTNSVGWAVITDEYKVPSKKFKVLGNTDRHSIKKNLIGALLFDSGETAEATRLKRTARRRYTRRKNRICYLQEIFSNEMAKVDDSFFHRLEESFLVEEDKKHERHPIFGNIVDEVAYHEKYPTIYHLRKKLVDSTDKADLRLIYLALAHMIKFRGHFLIEGDLNPDNSDVDKLFIQLVQTYNQLFEENPINASGVDAKAILSARLSKSRRLENLIAQLPGEKKNGLFGNLIALSLGLTPNFKSNFDLAEDAKLQLSKDTYDDDLDNLLAQIGDQYADLFLAAKNLSDAILLSDILRVNTEITKAPLSASMIKRYDEHHQDLTLLKALVRQQLPEKYKEIFFDQSKNGYAGYIDGGASQEEFYKFIKPILEKMDGTEELLVKLNREDLLRKQRTFDNGSIPHQIHLGELHAILRRQEDFYPFLKDNREKIEKILTFRIPYYVGPLARGNSRFAWMTRKSEETITPWNFEEVVDKGASAQSFIERMTNFDKNLPNEKVLPKHSLLYEYFTVYNELTKVKYVTEGMRKPAFLSGEQKKAIVDLLFKTNRKVTVKQLKEDYFKKIECFDSVEISGVEDRFNASLGTYHDLLKIIKDKDFLDNEENEDILEDIVLTLTLFEDREMIEERLKTYAHLFDDKVMKQLKRRRYTGWGRLSRKLINGIRDKQSGKTILDFLKSDGFANRNFMQLIHDDSLTFKEDIQKAQVSGQGDSLHEHIANLAGSPAIKKGILQTVKVVDELVKVMGRHKPENIVIEMARENQTTQKGQKNSRERMKRIEEGIKELGSQILKEHPVENTQLQNEKLYLYYLQNGRDMYVDQELDINRLSDYDVDHIVPQSFLKDDSIDNKVLTRSDKARGKSDNVPSEEVVKKMKNYWRQLLNAKLITQRKFDNLTKAERGGLSELDKAGFIKRQLVETRQITKHVAQILDSRMNTKYDENDKLIREVKVITLKSKLVSDFRKDFQFYKVREINNYHHAHDAYLNAVVGTALIKKYPKLESEFVYGDYKVYDVRKMIAKSEQEIGKATAKYFFYSNIMNFFKTEITLANGEIRKRPLIETNGETGEIVWDKGRDFATVRKVLSMPQVNIVKKTEVQTGGFSKESILPKRNSDKLIARKKDWDPKKYGGFDSPTVAYSVLVVAKVEKGKSKKLKSVKELLGITIMERSSFEKNPIDFLEAKGYKEVKKDLIIKLPKYSLFELENGRKRMLASAGELQKGNELALPSKYVNFLYLASHYEKLKGSPEDNEQKQLFVEQHKHYLDEIIEQISEFSKRVILADANLDKVLSAYNKHRDKPIREQAENIIHLFTLTNLGAPAAFKYFDTTIDRKRYTSTKEVLDATLIHQSITGLYETRIDLSQLGGDGGPAPGSSGGTLNIEDEYRLHETSKEPDVSLGSTWLSDFPQAWAETGGMGLAVRQAPLIIPLKATSTPVSIKQYPMSQEARLGIKPHIQRLLDQGILVPCQSPWNTPLLPVKKPGTNDYRPVQDLREVNKRVEDIHPTVPNPYNLLSGLPPSHQWYTVLDLKDAFFCLRLHPTSQPLFAFEWRDPEMGISGQLTWTRLPQGFKNSPTLFNEALHRDLAGFRIQHPDLILLQYVDDLLLAATSELDCQQGTRALLQTLGDLGYRASAKKAQICQKQVKYLGYLLKEGQRWLTEARKETVMGQPIPKTPRQLREFLGTAGFCRLWIPGFAEMAAPLYPLTKPGTLFNWGPDQQKAFQEIKQALLTAPALGLPDLTKPFELFVDEKQGYAKGVLTQKLGPWRRPVAYLSKKLDPVAAGWPPCLRMVAAIAVLTKDAGKLTMGQPLVILAPHAVEALVKQPPDRWLSNARMTHYQALLLDTDRVQFGPVVALNPATLLPLPEEGLQHDCLDILAEAHGTRSDLMDQPLPDADHTWYTDGSSFLQEGQRKAGAAVTTETEVIWARALPAGTSAQRAELIALTQALKMAEGKKLNVYTDSRYAFATAHIHGEIYRRRGWLTSEGKEIKNKDEILALLKALFLPKRLSIIHCPGHQKGNSAEARGNRMADQAAREVATRETPETSTLLAGKRTADGSEFEKRTADGSEFESPKKKAKVE

SEQ ID NO: 2272 - protein, 2094 aa, synthetic construct
MPAAKRVKLDGGDKKYSIGLDIGTNSVGWAVITDEYKVPSKKFKVLGNTDRHSIKKNLIGALLFDSGETAEATRLKRTARRRYTRRKNRICYLQEIFSNEMAKVDDSFFHRLEESFLVEEDKKHERHPIFGNIVDEVAYHEKYPTIYHLRKKLVDSTDKADLRLIYLALAHMIKFRGHFLIEGDLNPDNSDVDKLFIQLVQTYNQLFEENPINASGVDAKAILSARLSKSRRLENLIAQLPGEKKNGLFGNLIALSLGLTPNFKSNFDLAEDAKLQLSKDTYDDDLDNLLAQIGDQYADLFLAAKNLSDAILLSDILRVNTEITKAPLSASMIKRYDEHHQDLTLLKALVRQQLPEKYKEIFFDQSKNGYAGYIDGGASQEEFYKFIKPILEKMDGTEELLVKLNREDLLRKQRTFDNGSIPHQIHLGELHAILRRQEDFYPFLKDNREKIEKILTFRIPYYVGPLARGNSRFAWMTRKSEETITPWNFEEVVDKGASAQSFIERMTNFDKNLPNEKVLPKHSLLYEYFTVYNELTKVKYVTEGMRKPAFLSGEQKKAIVDLLFKTNRKVTVKQLKEDYFKKIECFDSVEISGVEDRFNASLGTYHDLLKIIKDKDFLDNEENEDILEDIVLTLTLFEDREMIEERLKTYAHLFDDKVMKQLKRRRYTGWGRLSRKLINGIRDKQSGKTILDFLKSDGFANRNFMQLIHDDSLTFKEDIQKAQVSGQGDSLHEHIANLAGSPAIKKGILQTVKVVDELVKVMGRHKPENIVIEMARENQTTQKGQKNSRERMKRIEEGIKELGSQILKEHPVENTQLQNEKLYLYYLQNGRDMYVDQELDINRLSDYDVDHIVPQSFLKDDSIDNKVLTRSDKARGKSDNVPSEEVVKKMKNYWRQLLNAKLITQRKFDNLTKAERGGLSELDKAGFIKRQLVETRQITKHVAQILDSRMNTKYDENDKLIREVKVITLKSKLVSDFRKDFQFYKVREINNYHHAHDAYLNAVVGTALIKKYPKLESEFVYGDYKVYDVRKMIAKSEQEIGKATAKYFFYSNIMNFFKTEITLANGEIRKRPLIETNGETGEIVWDKGRDFATVRKVLSMPQVNIVKKTEVQTGGFSKESILPKRNSDKLIARKKDWDPKKYGGFDSPTVAYSVLVVAKVEKGKSKKLKSVKELLGITIMERSSFEKNPIDFLEAKGYKEVKKDLIIKLPKYSLFELENGRKRMLASAGELQKGNELALPSKYVNFLYLASHYEKLKGSPEDNEQKQLFVEQHKHYLDEIIEQISEFSKRVILADANLDKVLSAYNKHRDKPIREQAENIIHLFTLTNLGAPAAFKYFDTTIDRKRYTSTKEVLDATLIHQSITGLYETRIDLSQLGGDGGGGSPAPGGGGGTLNIEDEYRLHETSKEPDVSLGSTWLSDFPQAWAETGGMGLAVRQAPLIIPLKATSTPVSIKQYPMSQEARLGIKPHIQRLLDQGILVPCQSPWNTPLLPVKKPGTNDYRPVQDLREVNKRVEDIHPTVPNPYNLLSGLPPSHQWYTVLDLKDAFFCLRLHPTSQPLFAFEWRDPEMGISGQLTWTRLPQGFKNSPTLFNEALHRDLAGFRIQHPDLILLQYVDDLLLAATSELDCQQGTRALLQTLGDLGYRASAKKAQICQKQVKYLGYLLKEGQRWLTEARKETVMGQPIPKTPRQLREFLGTAGFCRLWIPGFAEMAAPLYPLTKPGTLFNWGPDQQKAFQEIKQALLTAPALGLPDLTKPFELFVDEKQGYAKGVLTQKLGPWRRPVAYLSKKLDPVAAGWPPCLRMVAAIAVLTKDAGKLTMGQPLVILAPHAVEALVKQPPDRWLSNARMTHYQALLLDTDRVQFGPVVALNPATLLPLPEEGLQHDCLDILAEAHGTRSDLMDQPLPDADHTWYTDGSSFLQEGQRKAGAAVTTETEVIWARALPAGTSAQRAELIALTQALKMAEGKKLNVYTDSRYAFATAHIHGEIYRRRGWLTSEGKEIKNKDEILALLKALFLPKRLSIIHCPGHQKGNSAEARGNRMADQAAREVATRETPETSTLLAGKRTADGSEFEKRTADGSEFESPKKKAKVE

SEQ ID NO: 2273 - protein, 2096 aa, synthetic construct
MPAAKRVKLDGGDKKYSIGLDIGTNSVGWAVITDEYKVPSKKFKVLGNTDRHSIKKNLIGALLFDSGETAEATRLKRTARRRYTRRKNRICYLQEIFSNEMAKVDDSFFHRLEESFLVEEDKKHERHPIFGNIVDEVAYHEKYPTIYHLRKKLVDSTDKADLRLIYLALAHMIKFRGHFLIEGDLNPDNSDVDKLFIQLVQTYNQLFEENPINASGVDAKAILSARLSKSRRLENLIAQLPGEKKNGLFGNLIALSLGLTPNFKSNFDLAEDAKLQLSKDTYDDDLDNLLAQIGDQYADLFLAAKNLSDAILLSDILRVNTEITKAPLSASMIKRYDEHHQDLTLLKALVRQQLPEKYKEIFFDQSKNGYAGYIDGGASQEEFYKFIKPILEKMDGTEELLVKLNREDLLRKQRTFDNGSIPHQIHLGELHAILRRQEDFYPFLKDNREKIEKILTFRIPYYVGPLARGNSRFAWMTRKSEETITPWNFEEVVDKGASAQSFIERMTNFDKNLPNEKVLPKHSLLYEYFTVYNELTKVKYVTEGMRKPAFLSGEQKKAIVDLLFKTNRKVTVKQLKEDYFKKIECFDSVEISGVEDRFNASLGTYHDLLKIIKDKDFLDNEENEDILEDIVLTLTLFEDREMIEERLKTYAHLFDDKVMKQLKRRRYTGWGRLSRKLINGIRDKQSGKTILDFLKSDGFANRNFMQLIHDDSLTFKEDIQKAQVSGQGDSLHEHIANLAGSPAIKKGILQTVKVVDELVKVMGRHKPENIVIEMARENQTTQKGQKNSRERMKRIEEGIKELGSQILKEHPVENTQLQNEKLYLYYLQNGRDMYVDQELDINRLSDYDVDHIVPQSFLKDDSIDNKVLTRSDKARGKSDNVPSEEVVKKMKNYWRQLLNAKLITQRKFDNLTKAERGGLSELDKAGFIKRQLVETRQITKHVAQILDSRMNTKYDENDKLIREVKVITLKSKLVSDFRKDFQFYKVREINNYHHAHDAYLNAVVGTALIKKYPKLESEFVYGDYKVYDVRKMIAKSEQEIGKATAKYFFYSNIMNFFKTEITLANGEIRKRPLIETNGETGEIVWDKGRDFATVRKVLSMPQVNIVKKTEVQTGGFSKESILPKRNSDKLIARKKDWDPKKYGGFDSPTVAYSVLVVAKVEKGKSKKLKSVKELLGITIMERSSFEKNPIDFLEAKGYKEVKKDLIIKLPKYSLFELENGRKRMLASAGELQKGNELALPSKYVNFLYLASHYEKLKGSPEDNEQKQLFVEQHKHYLDEIIEQISEFSKRVILADANLDKVLSAYNKHRDKPIREQAENIIHLFTLTNLGAPAAFKYFDTTIDRKRYTSTKEVLDATLIHQSITGLYETRIDLSQLGGDGGGSSGGSEAAAKGGTLNIEDEYRLHETSKEPDVSLGSTWLSDFPQAWAETGGMGLAVRQAPLIIPLKATSTPVSIKQYPMSQEARLGIKPHIQRLLDQGILVPCQSPWNTPLLPVKKPGTNDYRPVQDLREVNKRVEDIHPTVPNPYNLLSGLPPSHQWYTVLDLKDAFFCLRLHPTSQPLFAFEWRDPEMGISGQLTWTRLPQGFKNSPTLFNEALHRDLAGFRIQHPDLILLQYVDDLLLAATSELDCQQGTRALLQTLGDLGYRASAKKAQICQKQVKYLGYLLKEGQRWLTEARKETVMGQPIPKTPRQLREFLGTAGFCRLWIPGFAEMAAPLYPLTKPGTLFNWGPDQQKAFQEIKQALLTAPALGLPDLTKPFELFVDEKQGYAKGVLTQKLGPWRRPVAYLSKKLDPVAAGWPPCLRMVAAIAVLTKDAGKLTMGQPLVILAPHAVEALVKQPPDRWLSNARMTHYQALLLDTDRVQFGPVVALNPATLLPLPEEGLQHDCLDILAEAHGTRSDLMDQPLPDADHTWYTDGSSFLQEGQRKAGAAVTTETEVIWARALPAGTSAQRAELIALTQALKMAEGKKLNVYTDSRYAFATAHIHGEIYRRRGWLTSEGKEIKNKDEILALLKALFLPKRLSIIHCPGHQKGNSAEARGNRMADQAAREVATRETPETSTLLAGKRTADGSEFEKRTADGSEFESPKKKAKVE

SEQ ID NO: 2274 - protein, 2094 aa, synthetic construct
MPAAKRVKLDGGDKKYSIGLDIGTNSVGWAVITDEYKVPSKKFKVLGNTDRHSIKKNLIGALLFDSGETAEATRLKRTARRRYTRRKNRICYLQEIFSNEMAKVDDSFFHRLEESFLVEEDKKHERHPIFGNIVDEVAYHEKYPTIYHLRKKLVDSTDKADLRLIYLALAHMIKFRGHFLIEGDLNPDNSDVDKLFIQLVQTYNQLFEENPINASGVDAKAILSARLSKSRRLENLIAQLPGEKKNGLFGNLIALSLGLTPNFKSNFDLAEDAKLQLSKDTYDDDLDNLLAQIGDQYADLFLAAKNLSDAILLSDILRVNTEITKAPLSASMIKRYDEHHQDLTLLKALVRQQLPEKYKEIFFDQSKNGYAGYIDGGASQEEFYKFIKPILEKMDGTEELLVKLNREDLLRKQRTFDNGSIPHQIHLGELHAILRRQEDFYPFLKDNREKIEKILTFRIPYYVGPLARGNSRFAWMTRKSEETITPWNFEEVVDKGASAQSFIERMTNFDKNLPNEKVLPKHSLLYEYFTVYNELTKVKYVTEGMRKPAFLSGEQKKAIVDLLFKTNRKVTVKQLKEDYFKKIECFDSVEISGVEDRFNASLGTYHDLLKIIKDKDFLDNEENEDILEDIVLTLTLFEDREMIEERLKTYAHLFDDKVMKQLKRRRYTGWGRLSRKLINGIRDKQSGKTILDFLKSDGFANRNFMQLIHDDSLTFKEDIQKAQVSGQGDSLHEHIANLAGSPAIKKGILQTVKVVDELVKVMGRHKPENIVIEMARENQTTQKGQKNSRERMKRIEEGIKELGSQILKEHPVENTQLQNEKLYLYYLQNGRDMYVDQELDINRLSDYDVDHIVPQSFLKDDSIDNKVLTRSDKARGKSDNVPSEEVVKKMKNYWRQLLNAKLITQRKFDNLTKAERGGLSELDKAGFIKRQLVETRQITKHVAQILDSRMNTKYDENDKLIREVKVITLKSKLVSDFRKDFQFYKVREINNYHHAHDAYLNAVVGTALIKKYPKLESEFVYGDYKVYDVRKMIAKSEQEIGKATAKYFFYSNIMNFFKTEITLANGEIRKRPLIETNGETGEIVWDKGRDFATVRKVLSMPQVNIVKKTEVQTGGFSKESILPKRNSDKLIARKKDWDPKKYGGFDSPTVAYSVLVVAKVEKGKSKKLKSVKELLGITIMERSSFEKNPIDFLEAKGYKEVKKDLIIKLPKYSLFELENGRKRMLASAGELQKGNELALPSKYVNFLYLASHYEKLKGSPEDNEQKQLFVEQHKHYLDEIIEQISEFSKRVILADANLDKVLSAYNKHRDKPIREQAENIIHLFTLTNLGAPAAFKYFDTTIDRKRYTSTKEVLDATLIHQSITGLYETRIDLSQLGGDGGGGSGGSGGSGGTLNIEDEYRLHETSKEPDVSLGSTWLSDFPQAWAETGGMGLAVRQAPLIIPLKATSTPVSIKQYPMSQEARLGIKPHIQRLLDQGILVPCQSPWNTPLLPVKKPGTNDYRPVQDLREVNKRVEDIHPTVPNPYNLLSGLPPSHQWYTVLDLKDAFFCLRLHPTSQPLFAFEWRDPEMGISGQLTWTRLPQGFKNSPTLFNEALHRDLAGFRIQHPDLILLQYVDDLLLAATSELDCQQGTRALLQTLGDLGYRASAKKAQICQKQVKYLGYLLKEGQRWLTEARKETVMGQPIPKTPRQLREFLGTAGFCRLWIPGFAEMAAPLYPLTKPGTLFNWGPDQQKAFQEIKQALLTAPALGLPDLTKPFELFVDEKQGYAKGVLTQKLGPWRRPVAYLSKKLDPVAAGWPPCLRMVAAIAVLTKDAGKLTMGQPLVILAPHAVEALVKQPPDRWLSNARMTHYQALLLDTDRVQFGPVVALNPATLLPLPEEGLQHDCLDILAEAHGTRSDLMDQPLPDADHTWYTDGSSFLQEGQRKAGAAVTTETEVIWARALPAGTSAQRAELIALTQALKMAEGKKLNVYTDSRYAFATAHIHGEIYRRRGWLTSEGKEIKNKDEILALLKALFLPKRLSIIHCPGHQKGNSAEARGNRMADQAAREVATRETPETSTLLAGKRTADGSEFEKRTADGSEFESPKKKAKVE

SEQ ID NO: 2275 - protein, 2096 aa, synthetic construct
MPAAKRVKLDGGDKKYSIGLDIGTNSVGWAVITDEYKVPSKKFKVLGNTDRHSIKKNLIGALLFDSGETAEATRLKRTARRRYTRRKNRICYLQEIFSNEMAKVDDSFFHRLEESFLVEEDKKHERHPIFGNIVDEVAYHEKYPTIYHLRKKLVDSTDKADLRLIYLALAHMIKFRGHFLIEGDLNPDNSDVDKLFIQLVQTYNQLFEENPINASGVDAKAILSARLSKSRRLENLIAQLPGEKKNGLFGNLIALSLGLTPNFKSNFDLAEDAKLQLSKDTYDDDLDNLLAQIGDQYADLFLAAKNLSDAILLSDILRVNTEITKAPLSASMIKRYDEHHQDLTLLKALVRQQLPEKYKEIFFDQSKNGYAGYIDGGASQEEFYKFIKPILEKMDGTEELLVKLNREDLLRKQRTFDNGSIPHQIHLGELHAILRRQEDFYPFLKDNREKIEKILTFRIPYYVGPLARGNSRFAWMTRKSEETITPWNFEEVVDKGASAQSFIERMTNFDKNLPNEKVLPKHSLLYEYFTVYNELTKVKYVTEGMRKPAFLSGEQKKAIVDLLFKTNRKVTVKQLKEDYFKKIECFDSVEISGVEDRFNASLGTYHDLLKIIKDKDFLDNEENEDILEDIVLTLTLFEDREMIEERLKTYAHLFDDKVMKQLKRRRYTGWGRLSRKLINGIRDKQSGKTILDFLKSDGFANRNFMQLIHDDSLTFKEDIQKAQVSGQGDSLHEHIANLAGSPAIKKGILQTVKVVDELVKVMGRHKPENIVIEMARENQTTQKGQKNSRERMKRIEEGIKELGSQILKEHPVENTQLQNEKLYLYYLQNGRDMYVDQELDINRLSDYDVDHIVPQSFLKDDSIDNKVLTRSDKARGKSDNVPSEEVVKKMKNYWRQLLNAKLITQRKFDNLTKAERGGLSELDKAGFIKRQLVETRQITKHVAQILDSRMNTKYDENDKLIREVKVITLKSKLVSDFRKDFQFYKVREINNYHHAHDAYLNAVVGTALIKKYPKLESEFVYGDYKVYDVRKMIAKSEQEIGKATAKYFFYSNIMNFFKTEITLANGEIRKRPLIETNGETGEIVWDKGRDFATVRKVLSMPQVNIVKKTEVQTGGFSKESILPKRNSDKLIARKKDWDPKKYGGFDSPTVAYSVLVVAKVEKGKSKKLKSVKELLGITIMERSSFEKNPIDFLEAKGYKEVKKDLIIKLPKYSLFELENGRKRMLASAGELQKGNELALPSKYVNFLYLASHYEKLKGSPEDNEQKQLFVEQHKHYLDEIIEQISEFSKRVILADANLDKVLSAYNKHRDKPIREQAENIIHLFTLTNLGAPAAFKYFDTTIDRKRYTSTKEVLDATLIHQSITGLYETRIDLSQLGGDGGGGGEAAAKGGSGGTLNIEDEYRLHETSKEPDVSLGSTWLSDFPQAWAETGGMGLAVRQAPLIIPLKATSTPVSIKQYPMSQEARLGIKPHIQRLLDQGILVPCQSPWNTPLLPVKKPGTNDYRPVQDLREVNKRVEDIHPTVPNPYNLLSGLPPSHQWYTVLDLKDAFFCLRLHPTSQPLFAFEWRDPEMGISGQLTWTRLPQGFKNSPTLFNEALHRDLAGFRIQHPDLILLQYVDDLLLAATSELDCQQGTRALLQTLGDLGYRASAKKAQICQKQVKYLGYLLKEGQRWLTEARKETVMGQPIPKTPRQLREFLGTAGFCRLWIPGFAEMAAPLYPLTKPGTLFNWGPDQQKAFQEIKQALLTAPALGLPDLTKPFELFVDEKQGYAKGVLTQKLGPWRRPVAYLSKKLDPVAAGWPPCLRMVAAIAVLTKDAGKLTMGQPLVILAPHAVEALVKQPPDRWLSNARMTHYQALLLDTDRVQFGPVVALNPATLLPLPEEGLQHDCLDILAEAHGTRSDLMDQPLPDADHTWYTDGSSFLQEGQRKAGAAVTTETEVIWARALPAGTSAQRAELIALTQALKMAEGKKLNVYTDSRYAFATAHIHGEIYRRRGWLTSEGKEIKNKDEILALLKALFLPKRLSIIHCPGHQKGNSAEARGNRMADQAAREVATRETPETSTLLAGKRTADGSEFEKRTADGSEFESPKKKAKVE

SEQ ID NO: 2276 - protein, 2095 aa, synthetic construct
MPAAKRVKLDGGDKKYSIGLDIGTNSVGWAVITDEYKVPSKKFKVLGNTDRHSIKKNLIGALLFDSGETAEATRLKRTARRRYTRRKNRICYLQEIFSNEMAKVDDSFFHRLEESFLVEEDKKHERHPIFGNIVDEVAYHEKYPTIYHLRKKLVDSTDKADLRLIYLALAHMIKFRGHFLIEGDLNPDNSDVDKLFIQLVQTYNQLFEENPINASGVDAKAILSARLSKSRRLENLIAQLPGEKKNGLFGNLIALSLGLTPNFKSNFDLAEDAKLQLSKDTYDDDLDNLLAQIGDQYADLFLAAKNLSDAILLSDILRVNTEITKAPLSASMIKRYDEHHQDLTLLKALVRQQLPEKYKEIFFDQSKNGYAGYIDGGASQEEFYKFIKPILEKMDGTEELLVKLNREDLLRKQRTFDNGSIPHQIHLGELHAILRRQEDFYPFLKDNREKIEKILTFRIPYYVGPLARGNSRFAWMTRKSEETITPWNFEEVVDKGASAQSFIERMTNFDKNLPNEKVLPKHSLLYEYFTVYNELTKVKYVTEGMRKPAFLSGEQKKAIVDLLFKTNRKVTVKQLKEDYFKKIECFDSVEISGVEDRFNASLGTYHDLLKIIKDKDFLDNEENEDILEDIVLTLTLFEDREMIEERLKTYAHLFDDKVMKQLKRRRYTGWGRLSRKLINGIRDKQSGKTILDFLKSDGFANRNFMQLIHDDSLTFKEDIQKAQVSGQGDSLHEHIANLAGSPAIKKGILQTVKVVDELVKVMGRHKPENIVIEMARENQTTQKGQKNSRERMKRIEEGIKELGSQILKEHPVENTQLQNEKLYLYYLQNGRDMYVDQELDINRLSDYDVDHIVPQSFLKDDSIDNKVLTRSDKARGKSDNVPSEEVVKKMKNYWRQLLNAKLITQRKFDNLTKAERGGLSELDKAGFIKRQLVETRQITKHVAQILDSRMNTKYDENDKLIREVKVITLKSKLVSDFRKDFQFYKVREINNYHHAHDAYLNAVVGTALIKKYPKLESEFVYGDYKVYDVRKMIAKSEQEIGKATAKYFFYSNIMNFFKTEITLANGEIRKRPLIETNGETGEIVWDKGRDFATVRKVLSMPQVNIVKKTEVQTGGFSKESILPKRNSDKLIARKKDWDPKKYGGFDSPTVAYSVLVVAKVEKGKSKKLKSVKELLGITIMERSSFEKNPIDFLEAKGYKEVKKDLIIKLPKYSLFELENGRKRMLASAGELQKGNELALPSKYVNFLYLASHYEKLKGSPEDNEQKQLFVEQHKHYLDEIIEQISEFSKRVILADANLDKVLSAYNKHRDKPIREQAENIIHLFTLTNLGAPAAFKYFDTTIDRKRYTSTKEVLDATLIHQSITGLYETRIDLSQLGGDGGGGGGSGGGGSGGTLNIEDEYRLHETSKEPDVSLGSTWLSDFPQAWAETGGMGLAVRQAPLIIPLKATSTPVSIKQYPMSQEARLGIKPHIQRLLDQGILVPCQSPWNTPLLPVKKPGTNDYRPVQDLREVNKRVEDIHPTVPNPYNLLSGLPPSHQWYTVLDLKDAFFCLRLHPTSQPLFAFEWRDPEMGISGQLTWTRLPQGFKNSPTLFNEALHRDLAGFRIQHPDLILLQYVDDLLLAATSELDCQQGTRALLQTLGDLGYRASAKKAQICQKQVKYLGYLLKEGQRWLTEARKETVMGQPIPKTPRQLREFLGTAGFCRLWIPGFAEMAAPLYPLTKPGTLFNWGPDQQKAFQEIKQALLTAPALGLPDLTKPFELFVDEKQGYAKGVLTQKLGPWRRPVAYLSKKLDPVAAGWPPCLRMVAAIAVLTKDAGKLTMGQPLVILAPHAVEALVKQPPDRWLSNARMTHYQALLLDTDRVQFGPVVALNPATLLPLPEEGLQHDCLDILAEAHGTRSDLMDQPLPDADHTWYTDGSSFLQEGQRKAGAAVTTETEVIWARALPAGTSAQRAELIALTQALKMAEGKKLNVYTDSRYAFATAHIHGEIYRRRGWLTSEGKEIKNKDEILALLKALFLPKRLSIIHCPGHQKGNSAEARGNRMADQAAREVATRETPETSTLLAGKRTADGSEFEKRTADGSEFESPKKKAKVE

SEQ ID NO: 2277 - protein, 2096 aa, synthetic construct
MPAAKRVKLDGGDKKYSIGLDIGTNSVGWAVITDEYKVPSKKFKVLGNTDRHSIKKNLIGALLFDSGETAEATRLKRTARRRYTRRKNRICYLQEIFSNEMAKVDDSFFHRLEESFLVEEDKKHERHPIFGNIVDEVAYHEKYPTIYHLRKKLVDSTDKADLRLIYLALAHMIKFRGHFLIEGDLNPDNSDVDKLFIQLVQTYNQLFEENPINASGVDAKAILSARLSKSRRLENLIAQLPGEKKNGLFGNLIALSLGLTPNFKSNFDLAEDAKLQLSKDTYDDDLDNLLAQIGDQYADLFLAAKNLSDAILLSDILRVNTEITKAPLSASMIKRYDEHHQDLTLLKALVRQQLPEKYKEIFFDQSKNGYAGYIDGGASQEEFYKFIKPILEKMDGTEELLVKLNREDLLRKQRTFDNGSIPHQIHLGELHAILRRQEDFYPFLKDNREKIEKILTFRIPYYVGPLARGNSRFAWMTRKSEETITPWNFEEVVDKGASAQSFIERMTNFDKNLPNEKVLPKHSLLYEYFTVYNELTKVKYVTEGMRKPAFLSGEQKKAIVDLLFKTNRKVTVKQLKEDYFKKIECFDSVEISGVEDRFNASLGTYHDLLKIIKDKDFLDNEENEDILEDIVLTLTLFEDREMIEERLKTYAHLFDDKVMKQLKRRRYTGWGRLSRKLINGIRDKQSGKTILDFLKSDGFANRNFMQLIHDDSLTFKEDIQKAQVSGQGDSLHEHIANLAGSPAIKKGILQTVKVVDELVKVMGRHKPENIVIEMARENQTTQKGQKNSRERMKRIEEGIKELGSQILKEHPVENTQLQNEKLYLYYLQNGRDMYVDQELDINRLSDYDVDHIVPQSFLKDDSIDNKVLTRSDKARGKSDNVPSEEVVKKMKNYWRQLLNAKLITQRKFDNLTKAERGGLSELDKAGFIKRQLVETRQITKHVAQILDSRMNTKYDENDKLIREVKVITLKSKLVSDFRKDFQFYKVREINNYHHAHDAYLNAVVGTALIKKYPKLESEFVYGDYKVYDVRKMIAKSEQEIGKATAKYFFYSNIMNFFKTEITLANGEIRKRPLIETNGETGEIVWDKGRDFATVRKVLSMPQVNIVKKTEVQTGGFSKESILPKRNSDKLIARKKDWDPKKYGGFDSPTVAYSVLVVAKVEKGKSKKLKSVKELLGITIMERSSFEKNPIDFLEAKGYKEVKKDLIIKLPKYSLFELENGRKRMLASAGELQKGNELALPSKYVNFLYLASHYEKLKGSPEDNEQKQLFVEQHKHYLDEIIEQISEFSKRVILADANLDKVLSAYNKHRDKPIREQAENIIHLFTLTNLGAPAAFKYFDTTIDRKRYTSTKEVLDATLIHQSITGLYETRIDLSQLGGDGGEAAAKPAPGGSGGTLNIEDEYRLHETSKEPDVSLGSTWLSDFPQAWAETGGMGLAVRQAPLIIPLKATSTPVSIKQYPMSQEARLGIKPHIQRLLDQGILVPCQSPWNTPLLPVKKPGTNDYRPVQDLREVNKRVEDIHPTVPNPYNLLSGLPPSHQWYTVLDLKDAFFCLRLHPTSQPLFAFEWRDPEMGISGQLTWTRLPQGFKNSPTLFNEALHRDLAGFRIQHPDLILLQYVDDLLLAATSELDCQQGTRALLQTLGDLGYRASAKKAQICQKQVKYLGYLLKEGQRWLTEARKETVMGQPIPKTPRQLREFLGTAGFCRLWIPGFAEMAAPLYPLTKPGTLFNWGPDQQKAFQEIKQALLTAPALGLPDLTKPFELFVDEKQGYAKGVLTQKLGPWRRPVAYLSKKLDPVAAGWPPCLRMVAAIAVLTKDAGKLTMGQPLVILAPHAVEALVKQPPDRWLSNARMTHYQALLLDTDRVQFGPVVALNPATLLPLPEEGLQHDCLDILAEAHGTRSDLMDQPLPDADHTWYTDGSSFLQEGQRKAGAAVTTETEVIWARALPAGTSAQRAELIALTQALKMAEGKKLNVYTDSRYAFATAHIHGEIYRRRGWLTSEGKEIKNKDEILALLKALFLPKRLSIIHCPGHQKGNSAEARGNRMADQAAREVATRETPETSTLLAGKRTADGSEFEKRTADGSEFESPKKKAKVE

SEQ ID NO: 2278 - protein, 2096 aa, synthetic construct
MPAAKRVKLDGGDKKYSIGLDIGTNSVGWAVITDEYKVPSKKFKVLGNTDRHSIKKNLIGALLFDSGETAEATRLKRTARRRYTRRKNRICYLQEIFSNEMAKVDDSFFHRLEESFLVEEDKKHERHPIFGNIVDEVAYHEKYPTIYHLRKKLVDSTDKADLRLIYLALAHMIKFRGHFLIEGDLNPDNSDVDKLFIQLVQTYNQLFEENPINASGVDAKAILSARLSKSRRLENLIAQLPGEKKNGLFGNLIALSLGLTPNFKSNFDLAEDAKLQLSKDTYDDDLDNLLAQIGDQYADLFLAAKNLSDAILLSDILRVNTEITKAPLSASMIKRYDEHHQDLTLLKALVRQQLPEKYKEIFFDQSKNGYAGYIDGGASQEEFYKFIKPILEKMDGTEELLVKLNREDLLRKQRTFDNGSIPHQIHLGELHAILRRQEDFYPFLKDNREKIEKILTFRIPYYVGPLARGNSRFAWMTRKSEETITPWNFEEVVDKGASAQSFIERMTNFDKNLPNEKVLPKHSLLYEYFTVYNELTKVKYVTEGMRKPAFLSGEQKKAIVDLLFKTNRKVTVKQLKEDYFKKIECFDSVEISGVEDRFNASLGTYHDLLKIIKDKDFLDNEENEDILEDIVLTLTLFEDREMIEERLKTYAHLFDDKVMKQLKRRRYTGWGRLSRKLINGIRDKQSGKTILDFLKSDGFANRNFMQLIHDDSLTFKEDIQKAQVSGQGDSLHEHIANLAGSPAIKKGILQTVKVVDELVKVMGRHKPENIVIEMARENQTTQKGQKNSRERMKRIEEGIKELGSQILKEHPVENTQLQNEKLYLYYLQNGRDMYVDQELDINRLSDYDVDHIVPQSFLKDDSIDNKVLTRSDKARGKSDNVPSEEVVKKMKNYWRQLLNAKLITQRKFDNLTKAERGGLSELDKAGFIKRQLVETRQITKHVAQILDSRMNTKYDENDKLIREVKVITLKSKLVSDFRKDFQFYKVREINNYHHAHDAYLNAVVGTALIKKYPKLESEFVYGDYKVYDVRKMIAKSEQEIGKATAKYFFYSNIMNFFKTEITLANGEIRKRPLIETNGETGEIVWDKGRDFATVRKVLSMPQVNIVKKTEVQTGGFSKESILPKRNSDKLIARKKDWDPKKYGGFDSPTVAYSVLVVAKVEKGKSKKLKSVKELLGITIMERSSFEKNPIDFLEAKGYKEVKKDLIIKLPKYSLFELENGRKRMLASAGELQKGNELALPSKYVNFLYLASHYEKLKGSPEDNEQKQLFVEQHKHYLDEIIEQISEFSKRVILADANLDKVLSAYNKHRDKPIREQAENIIHLFTLTNLGAPAAFKYFDTTIDRKRYTSTKEVLDATLIHQSITGLYETRIDLSQLGGDGGEAAAKGGGPAPGGTLNIEDEYRLHETSKEPDVSLGSTWLSDFPQAWAETGGMGLAVRQAPLIIPLKATSTPVSIKQYPMSQEARLGIKPHIQRLLDQGILVPCQSPWNTPLLPVKKPGTNDYRPVQDLREVNKRVEDIHPTVPNPYNLLSGLPPSHQWYTVLDLKDAFFCLRLHPTSQPLFAFEWRDPEMGISGQLTWTRLPQGFKNSPTLFNEALHRDLAGFRIQHPDLILLQYVDDLLLAATSELDCQQGTRALLQTLGDLGYRASAKKAQICQKQVKYLGYLLKEGQRWLTEARKETVMGQPIPKTPRQLREFLGTAGFCRLWIPGFAEMAAPLYPLTKPGTLFNWGPDQQKAFQEIKQALLTAPALGLPDLTKPFELFVDEKQGYAKGVLTQKLGPWRRPVAYLSKKLDPVAAGWPPCLRMVAAIAVLTKDAGKLTMGQPLVILAPHAVEALVKQPPDRWLSNARMTHYQALLLDTDRVQFGPVVALNPATLLPLPEEGLQHDCLDILAEAHGTRSDLMDQPLPDADHTWYTDGSSFLQEGQRKAGAAVTTETEVIWARALPAGTSAQRAELIALTQALKMAEGKKLNVYTDSRYAFATAHIHGEIYRRRGWLTSEGKEIKNKDEILALLKALFLPKRLSIIHCPGHQKGNSAEARGNRMADQAAREVATRETPETSTLLAGKRTADGSEFEKRTADGSEFESPKKKAKVE

SEQ ID NO: 2279 - protein, 2096 aa, synthetic construct
MPAAKRVKLDGGDKKYSIGLDIGTNSVGWAVITDEYKVPSKKFKVLGNTDRHSIKKNLIGALLFDSGETAEATRLKRTARRRYTRRKNRICYLQEIFSNEMAKVDDSFFHRLEESFLVEEDKKHERHPIFGNIVDEVAYHEKYPTIYHLRKKLVDSTDKADLRLIYLALAHMIKFRGHFLIEGDLNPDNSDVDKLFIQLVQTYNQLFEENPINASGVDAKAILSARLSKSRRLENLIAQLPGEKKNGLFGNLIALSLGLTPNFKSNFDLAEDAKLQLSKDTYDDDLDNLLAQIGDQYADLFLAAKNLSDAILLSDILRVNTEITKAPLSASMIKRYDEHHQDLTLLKALVRQQLPEKYKEIFFDQSKNGYAGYIDGGASQEEFYKFIKPILEKMDGTEELLVKLNREDLLRKQRTFDNGSIPHQIHLGELHAILRRQEDFYPFLKDNREKIEKILTFRIPYYVGPLARGNSRFAWMTRKSEETITPWNFEEVVDKGASAQSFIERMTNFDKNLPNEKVLPKHSLLYEYFTVYNELTKVKYVTEGMRKPAFLSGEQKKAIVDLLFKTNRKVTVKQLKEDYFKKIECFDSVEISGVEDRFNASLGTYHDLLKIIKDKDFLDNEENEDILEDIVLTLTLFEDREMIEERLKTYAHLFDDKVMKQLKRRRYTGWGRLSRKLINGIRDKQSGKTILDFLKSDGFANRNFMQLIHDDSLTFKEDIQKAQVSGQGDSLHEHIANLAGSPAIKKGILQTVKVVDELVKVMGRHKPENIVIEMARENQTTQKGQKNSRERMKRIEEGIKELGSQILKEHPVENTQLQNEKLYLYYLQNGRDMYVDQELDINRLSDYDVDHIVPQSFLKDDSIDNKVLTRSDKARGKSDNVPSEEVVKKMKNYWRQLLNAKLITQRKFDNLTKAERGGLSELDKAGFIKRQLVETRQITKHVAQILDSRMNTKYDENDKLIREVKVITLKSKLVSDFRKDFQFYKVREINNYHHAHDAYLNAVVGTALIKKYPKLESEFVYGDYKVYDVRKMIAKSEQEIGKATAKYFFYSNIMNFFKTEITLANGEIRKRPLIETNGETGEIVWDKGRDFATVRKVLSMPQVNIVKKTEVQTGGFSKESILPKRNSDKLIARKKDWDPKKYGGFDSPTVAYSVLVVAKVEKGKSKKLKSVKELLGITIMERSSFEKNPIDFLEAKGYKEVKKDLIIKLPKYSLFELENGRKRMLASAGELQKGNELALPSKYVNFLYLASHYEKLKGSPEDNEQKQLFVEQHKHYLDEIIEQISEFSKRVILADANLDKVLSAYNKHRDKPIREQAENIIHLFTLTNLGAPAAFKYFDTTIDRKRYTSTKEVLDATLIHQSITGLYETRIDLSQLGGDGGGGGEAAAKPAPGGTLNIEDEYRLHETSKEPDVSLGSTWLSDFPQAWAETGGMGLAVRQAPLIIPLKATSTPVSIKQYPMSQEARLGIKPHIQRLLDQGILVPCQSPWNTPLLPVKKPGTNDYRPVQDLREVNKRVEDIHPTVPNPYNLLSGLPPSHQWYTVLDLKDAFFCLRLHPTSQPLFAFEWRDPEMGISGQLTWTRLPQGFKNSPTLFNEALHRDLAGFRIQHPDLILLQYVDDLLLAATSELDCQQGTRALLQTLGDLGYRASAKKAQICQKQVKYLGYLLKEGQRWLTEARKETVMGQPIPKTPRQLREFLGTAGFCRLWIPGFAEMAAPLYPLTKPGTLFNWGPDQQKAFQEIKQALLTAPALGLPDLTKPFELFVDEKQGYAKGVLTQKLGPWRRPVAYLSKKLDPVAAGWPPCLRMVAAIAVLTKDAGKLTMGQPLVILAPHAVEALVKQPPDRWLSNARMTHYQALLLDTDRVQFGPVVALNPATLLPLPEEGLQHDCLDILAEAHGTRSDLMDQPLPDADHTWYTDGSSFLQEGQRKAGAAVTTETEVIWARALPAGTSAQRAELIALTQALKMAEGKKLNVYTDSRYAFATAHIHGEIYRRRGWLTSEGKEIKNKDEILALLKALFLPKRLSIIHCPGHQKGNSAEARGNRMADQAAREVATRETPETSTLLAGKRTADGSEFEKRTADGSEFESPKKKAKVE

SEQ ID NO: 2280 - protein, 2100 aa, synthetic construct
MPAAKRVKLDGGDKKYSIGLDIGTNSVGWAVITDEYKVPSKKFKVLGNTDRHSIKKNLIGALLFDSGETAEATRLKRTARRRYTRRKNRICYLQEIFSNEMAKVDDSFFHRLEESFLVEEDKKHERHPIFGNIVDEVAYHEKYPTIYHLRKKLVDSTDKADLRLIYLALAHMIKFRGHFLIEGDLNPDNSDVDKLFIQLVQTYNQLFEENPINASGVDAKAILSARLSKSRRLENLIAQLPGEKKNGLFGNLIALSLGLTPNFKSNFDLAEDAKLQLSKDTYDDDLDNLLAQIGDQYADLFLAAKNLSDAILLSDILRVNTEITKAPLSASMIKRYDEHHQDLTLLKALVRQQLPEKYKEIFFDQSKNGYAGYIDGGASQEEFYKFIKPILEKMDGTEELLVKLNREDLLRKQRTFDNGSIPHQIHLGELHAILRRQEDFYPFLKDNREKIEKILTFRIPYYVGPLARGNSRFAWMTRKSEETITPWNFEEVVDKGASAQSFIERMTNFDKNLPNEKVLPKHSLLYEYFTVYNELTKVKYVTEGMRKPAFLSGEQKKAIVDLLFKTNRKVTVKQLKEDYFKKIECFDSVEISGVEDRFNASLGTYHDLLKIIKDKDFLDNEENEDILEDIVLTLTLFEDREMIEERLKTYAHLFDDKVMKQLKRRRYTGWGRLSRKLINGIRDKQSGKTILDFLKSDGFANRNFMQLIHDDSLTFKEDIQKAQVSGQGDSLHEHIANLAGSPAIKKGILQTVKVVDELVKVMGRHKPENIVIEMARENQTTQKGQKNSRERMKRIEEGIKELGSQILKEHPVENTQLQNEKLYLYYLQNGRDMYVDQELDINRLSDYDVDHIVPQSFLKDDSIDNKVLTRSDKARGKSDNVPSEEVVKKMKNYWRQLLNAKLITQRKFDNLTKAERGGLSELDKAGFIKRQLVETRQITKHVAQILDSRMNTKYDENDKLIREVKVITLKSKLVSDFRKDFQFYKVREINNYHHAHDAYLNAVVGTALIKKYPKLESEFVYGDYKVYDVRKMIAKSEQEIGKATAKYFFYSNIMNFFKTEITLANGEIRKRPLIETNGETGEIVWDKGRDFATVRKVLSMPQVNIVKKTEVQTGGFSKESILPKRNSDKLIARKKDWDPKKYGGFDSPTVAYSVLVVAKVEKGKSKKLKSVKELLGITIMERSSFEKNPIDFLEAKGYKEVKKDLIIKLPKYSLFELENGRKRMLASAGELQKGNELALPSKYVNFLYLASHYEKLKGSPEDNEQKQLFVEQHKHYLDEIIEQISEFSKRVILADANLDKVLSAYNKHRDKPIREQAENIIHLFTLTNLGAPAAFKYFDTTIDRKRYTSTKEVLDATLIHQSITGLYETRIDLSQLGGDGGGSSGSSGSSGSSGSSGGTLNIEDEYRLHETSKEPDVSLGSTWLSDFPQAWAETGGMGLAVRQAPLIIPLKATSTPVSIKQYPMSQEARLGIKPHIQRLLDQGILVPCQSPWNTPLLPVKKPGTNDYRPVQDLREVNKRVEDIHPTVPNPYNLLSGLPPSHQWYTVLDLKDAFFCLRLHPTSQPLFAFEWRDPEMGISGQLTWTRLPQGFKNSPTLFNEALHRDLAGFRIQHPDLILLQYVDDLLLAATSELDCQQGTRALLQTLGDLGYRASAKKAQICQKQVKYLGYLLKEGQRWLTEARKETVMGQPIPKTPRQLREFLGTAGFCRLWIPGFAEMAAPLYPLTKPGTLFNWGPDQQKAFQEIKQALLTAPALGLPDLTKPFELFVDEKQGYAKGVLTQKLGPWRRPVAYLSKKLDPVAAGWPPCLRMVAAIAVLTKDAGKLTMGQPLVILAPHAVEALVKQPPDRWLSNARMTHYQALLLDTDRVQFGPVVALNPATLLPLPEEGLQHDCLDILAEAHGTRSDLMDQPLPDADHTWYTDGSSFLQEGQRKAGAAVTTETEVIWARALPAGTSAQRAELIALTQALKMAEGKKLNVYTDSRYAFATAHIHGEIYRRRGWLTSEGKEIKNKDEILALLKALFLPKRLSIIHCPGHQKGNSAEARGNRMADQAAREVATRETPETSTLLAGKRTADGSEFEKRTADGSEFESPKKKAKVE

SEQ ID NO: 2281 - protein, 2093 aa, synthetic construct
MPAAKRVKLDGGDKKYSIGLDIGTNSVGWAVITDEYKVPSKKFKVLGNTDRHSIKKNLIGALLFDSGETAEATRLKRTARRRYTRRKNRICYLQEIFSNEMAKVDDSFFHRLEESFLVEEDKKHERHPIFGNIVDEVAYHEKYPTIYHLRKKLVDSTDKADLRLIYLALAHMIKFRGHFLIEGDLNPDNSDVDKLFIQLVQTYNQLFEENPINASGVDAKAILSARLSKSRRLENLIAQLPGEKKNGLFGNLIALSLGLTPNFKSNFDLAEDAKLQLSKDTYDDDLDNLLAQIGDQYADLFLAAKNLSDAILLSDILRVNTEITKAPLSASMIKRYDEHHQDLTLLKALVRQQLPEKYKEIFFDQSKNGYAGYIDGGASQEEFYKFIKPILEKMDGTEELLVKLNREDLLRKQRTFDNGSIPHQIHLGELHAILRRQEDFYPFLKDNREKIEKILTFRIPYYVGPLARGNSRFAWMTRKSEETITPWNFEEVVDKGASAQSFIERMTNFDKNLPNEKVLPKHSLLYEYFTVYNELTKVKYVTEGMRKPAFLSGEQKKAIVDLLFKTNRKVTVKQLKEDYFKKIECFDSVEISGVEDRFNASLGTYHDLLKIIKDKDFLDNEENEDILEDIVLTLTLFEDREMIEERLKTYAHLFDDKVMKQLKRRRYTGWGRLSRKLINGIRDKQSGKTILDFLKSDGFANRNFMQLIHDDSLTFKEDIQKAQVSGQGDSLHEHIANLAGSPAIKKGILQTVKVVDELVKVMGRHKPENIVIEMARENQTTQKGQKNSRERMKRIEEGIKELGSQILKEHPVENTQLQNEKLYLYYLQNGRDMYVDQELDINRLSDYDVDHIVPQSFLKDDSIDNKVLTRSDKARGKSDNVPSEEVVKKMKNYWRQLLNAKLITQRKFDNLTKAERGGLSELDKAGFIKRQLVETRQITKHVAQILDSRMNTKYDENDKLIREVKVITLKSKLVSDFRKDFQFYKVREINNYHHAHDAYLNAVVGTALIKKYPKLESEFVYGDYKVYDVRKMIAKSEQEIGKATAKYFFYSNIMNFFKTEITLANGEIRKRPLIETNGETGEIVWDKGRDFATVRKVLSMPQVNIVKKTEVQTGGFSKESILPKRNSDKLIARKKDWDPKKYGGFDSPTVAYSVLVVAKVEKGKSKKLKSVKELLGITIMERSSFEKNPIDFLEAKGYKEVKKDLIIKLPKYSLFELENGRKRMLASAGELQKGNELALPSKYVNFLYLASHYEKLKGSPEDNEQKQLFVEQHKHYLDEIIEQISEFSKRVILADANLDKVLSAYNKHRDKPIREQAENIIHLFTLTNLGAPAAFKYFDTTIDRKRYTSTKEVLDATLIHQSITGLYETRIDLSQLGGDGGEAAAKGGGGGTLNIEDEYRLHETSKEPDVSLGSTWLSDFPQAWAETGGMGLAVRQAPLIIPLKATSTPVSIKQYPMSQEARLGIKPHIQRLLDQGILVPCQSPWNTPLLPVKKPGTNDYRPVQDLREVNKRVEDIHPTVPNPYNLLSGLPPSHQWYTVLDLKDAFFCLRLHPTSQPLFAFEWRDPEMGISGQLTWTRLPQGFKNSPTLFNEALHRDLAGFRIQHPDLILLQYVDDLLLAATSELDCQQGTRALLQTLGDLGYRASAKKAQICQKQVKYLGYLLKEGQRWLTEARKETVMGQPIPKTPRQLREFLGTAGFCRLWIPGFAEMAAPLYPLTKPGTLFNWGPDQQKAFQEIKQALLTAPALGLPDLTKPFELFVDEKQGYAKGVLTQKLGPWRRPVAYLSKKLDPVAAGWPPCLRMVAAIAVLTKDAGKLTMGQPLVILAPHAVEALVKQPPDRWLSNARMTHYQALLLDTDRVQFGPVVALNPATLLPLPEEGLQHDCLDILAEAHGTRSDLMDQPLPDADHTWYTDGSSFLQEGQRKAGAAVTTETEVIWARALPAGTSAQRAELIALTQALKMAEGKKLNVYTDSRYAFATAHIHGEIYRRRGWLTSEGKEIKNKDEILALLKALFLPKRLSIIHCPGHQKGNSAEARGNRMADQAAREVATRETPETSTLLAGKRTADGSEFEKRTADGSEFESPKKKAKVE

SEQ ID NO: 2282 - protein, 2096 aa, synthetic construct
MPAAKRVKLDGGDKKYSIGLDIGTNSVGWAVITDEYKVPSKKFKVLGNTDRHSIKKNLIGALLFDSGETAEATRLKRTARRRYTRRKNRICYLQEIFSNEMAKVDDSFFHRLEESFLVEEDKKHERHPIFGNIVDEVAYHEKYPTIYHLRKKLVDSTDKADLRLIYLALAHMIKFRGHFLIEGDLNPDNSDVDKLFIQLVQTYNQLFEENPINASGVDAKAILSARLSKSRRLENLIAQLPGEKKNGLFGNLIALSLGLTPNFKSNFDLAEDAKLQLSKDTYDDDLDNLLAQIGDQYADLFLAAKNLSDAILLSDILRVNTEITKAPLSASMIKRYDEHHQDLTLLKALVRQQLPEKYKEIFFDQSKNGYAGYIDGGASQEEFYKFIKPILEKMDGTEELLVKLNREDLLRKQRTFDNGSIPHQIHLGELHAILRRQEDFYPFLKDNREKIEKILTFRIPYYVGPLARGNSRFAWMTRKSEETITPWNFEEVVDKGASAQSFIERMTNFDKNLPNEKVLPKHSLLYEYFTVYNELTKVKYVTEGMRKPAFLSGEQKKAIVDLLFKTNRKVTVKQLKEDYFKKIECFDSVEISGVEDRFNASLGTYHDLLKIIKDKDFLDNEENEDILEDIVLTLTLFEDREMIEERLKTYAHLFDDKVMKQLKRRRYTGWGRLSRKLINGIRDKQSGKTILDFLKSDGFANRNFMQLIHDDSLTFKEDIQKAQVSGQGDSLHEHIANLAGSPAIKKGILQTVKVVDELVKVMGRHKPENIVIEMARENQTTQKGQKNSRERMKRIEEGIKELGSQILKEHPVENTQLQNEKLYLYYLQNGRDMYVDQELDINRLSDYDVDHIVPQSFLKDDSIDNKVLTRSDKARGKSDNVPSEEVVKKMKNYWRQLLNAKLITQRKFDNLTKAERGGLSELDKAGFIKRQLVETRQITKHVAQILDSRMNTKYDENDKLIREVKVITLKSKLVSDFRKDFQFYKVREINNYHHAHDAYLNAVVGTALIKKYPKLESEFVYGDYKVYDVRKMIAKSEQEIGKATAKYFFYSNIMNFFKTEITLANGEIRKRPLIETNGETGEIVWDKGRDFATVRKVLSMPQVNIVKKTEVQTGGFSKESILPKRNSDKLIARKKDWDPKKYGGFDSPTVAYSVLVVAKVEKGKSKKLKSVKELLGITIMERSSFEKNPIDFLEAKGYKEVKKDLIIKLPKYSLFELENGRKRMLASAGELQKGNELALPSKYVNFLYLASHYEKLKGSPEDNEQKQLFVEQHKHYLDEIIEQISEFSKRVILADANLDKVLSAYNKHRDKPIREQAENIIHLFTLTNLGAPAAFKYFDTTIDRKRYTSTKEVLDATLIHQSITGLYETRIDLSQLGGDGGGSSPAPEAAAKGGTLNIEDEYRLHETSKEPDVSLGSTWLSDFPQAWAETGGMGLAVRQAPLIIPLKATSTPVSIKQYPMSQEARLGIKPHIQRLLDQGILVPCQSPWNTPLLPVKKPGTNDYRPVQDLREVNKRVEDIHPTVPNPYNLLSGLPPSHQWYTVLDLKDAFFCLRLHPTSQPLFAFEWRDPEMGISGQLTWTRLPQGFKNSPTLFNEALHRDLAGFRIQHPDLILLQYVDDLLLAATSELDCQQGTRALLQTLGDLGYRASAKKAQICQKQVKYLGYLLKEGQRWLTEARKETVMGQPIPKTPRQLREFLGTAGFCRLWIPGFAEMAAPLYPLTKPGTLFNWGPDQQKAFQEIKQALLTAPALGLPDLTKPFELFVDEKQGYAKGVLTQKLGPWRRPVAYLSKKLDPVAAGWPPCLRMVAAIAVLTKDAGKLTMGQPLVILAPHAVEALVKQPPDRWLSNARMTHYQALLLDTDRVQFGPVVALNPATLLPLPEEGLQHDCLDILAEAHGTRSDLMDQPLPDADHTWYTDGSSFLQEGQRKAGAAVTTETEVIWARALPAGTSAQRAELIALTQALKMAEGKKLNVYTDSRYAFATAHIHGEIYRRRGWLTSEGKEIKNKDEILALLKALFLPKRLSIIHCPGHQKGNSAEARGNRMADQAAREVATRETPETSTLLAGKRTADGSEFEKRTADGSEFESPKKKAKVE

SEQ ID NO: 2283 - protein, 2094 aa, synthetic construct
MPAAKRVKLDGGDKKYSIGLDIGTNSVGWAVITDEYKVPSKKFKVLGNTDRHSIKKNLIGALLFDSGETAEATRLKRTARRRYTRRKNRICYLQEIFSNEMAKVDDSFFHRLEESFLVEEDKKHERHPIFGNIVDEVAYHEKYPTIYHLRKKLVDSTDKADLRLIYLALAHMIKFRGHFLIEGDLNPDNSDVDKLFIQLVQTYNQLFEENPINASGVDAKAILSARLSKSRRLENLIAQLPGEKKNGLFGNLIALSLGLTPNFKSNFDLAEDAKLQLSKDTYDDDLDNLLAQIGDQYADLFLAAKNLSDAILLSDILRVNTEITKAPLSASMIKRYDEHHQDLTLLKALVRQQLPEKYKEIFFDQSKNGYAGYIDGGASQEEFYKFIKPILEKMDGTEELLVKLNREDLLRKQRTFDNGSIPHQIHLGELHAILRRQEDFYPFLKDNREKIEKILTFRIPYYVGPLARGNSRFAWMTRKSEETITPWNFEEVVDKGASAQSFIERMTNFDKNLPNEKVLPKHSLLYEYFTVYNELTKVKYVTEGMRKPAFLSGEQKKAIVDLLFKTNRKVTVKQLKEDYFKKIECFDSVEISGVEDRFNASLGTYHDLLKIIKDKDFLDNEENEDILEDIVLTLTLFEDREMIEERLKTYAHLFDDKVMKQLKRRRYTGWGRLSRKLINGIRDKQSGKTILDFLKSDGFANRNFMQLIHDDSLTFKEDIQKAQVSGQGDSLHEHIANLAGSPAIKKGILQTVKVVDELVKVMGRHKPENIVIEMARENQTTQKGQKNSRERMKRIEEGIKELGSQILKEHPVENTQLQNEKLYLYYLQNGRDMYVDQELDINRLSDYDVDHIVPQSFLKDDSIDNKVLTRSDKARGKSDNVPSEEVVKKMKNYWRQLLNAKLITQRKFDNLTKAERGGLSELDKAGFIKRQLVETRQITKHVAQILDSRMNTKYDENDKLIREVKVITLKSKLVSDFRKDFQFYKVREINNYHHAHDAYLNAVVGTALIKKYPKLESEFVYGDYKVYDVRKMIAKSEQEIGKATAKYFFYSNIMNFFKTEITLANGEIRKRPLIETNGETGEIVWDKGRDFATVRKVLSMPQVNIVKKTEVQTGGFSKESILPKRNSDKLIARKKDWDPKKYGGFDSPTVAYSVLVVAKVEKGKSKKLKSVKELLGITIMERSSFEKNPIDFLEAKGYKEVKKDLIIKLPKYSLFELENGRKRMLASAGELQKGNELALPSKYVNFLYLASHYEKLKGSPEDNEQKQLFVEQHKHYLDEIIEQISEFSKRVILADANLDKVLSAYNKHRDKPIREQAENIIHLFTLTNLGAPAAFKYFDTTIDRKRYTSTKEVLDATLIHQSITGLYETRIDLSQLGGDGGGSSPAPGGGGGTLNIEDEYRLHETSKEPDVSLGSTWLSDFPQAWAETGGMGLAVRQAPLIIPLKATSTPVSIKQYPMSQEARLGIKPHIQRLLDQGILVPCQSPWNTPLLPVKKPGTNDYRPVQDLREVNKRVEDIHPTVPNPYNLLSGLPPSHQWYTVLDLKDAFFCLRLHPTSQPLFAFEWRDPEMGISGQLTWTRLPQGFKNSPTLFNEALHRDLAGFRIQHPDLILLQYVDDLLLAATSELDCQQGTRALLQTLGDLGYRASAKKAQICQKQVKYLGYLLKEGQRWLTEARKETVMGQPIPKTPRQLREFLGTAGFCRLWIPGFAEMAAPLYPLTKPGTLFNWGPDQQKAFQEIKQALLTAPALGLPDLTKPFELFVDEKQGYAKGVLTQKLGPWRRPVAYLSKKLDPVAAGWPPCLRMVAAIAVLTKDAGKLTMGQPLVILAPHAVEALVKQPPDRWLSNARMTHYQALLLDTDRVQFGPVVALNPATLLPLPEEGLQHDCLDILAEAHGTRSDLMDQPLPDADHTWYTDGSSFLQEGQRKAGAAVTTETEVIWARALPAGTSAQRAELIALTQALKMAEGKKLNVYTDSRYAFATAHIHGEIYRRRGWLTSEGKEIKNKDEILALLKALFLPKRLSIIHCPGHQKGNSAEARGNRMADQAAREVATRETPETSTLLAGKRTADGSEFEKRTADGSEFESPKKKAKVE

SEQ ID NO: 2284 - protein, 2090 aa, synthetic construct
MPAAKRVKLDGGDKKYSIGLDIGTNSVGWAVITDEYKVPSKKFKVLGNTDRHSIKKNLIGALLFDSGETAEATRLKRTARRRYTRRKNRICYLQEIFSNEMAKVDDSFFHRLEESFLVEEDKKHERHPIFGNIVDEVAYHEKYPTIYHLRKKLVDSTDKADLRLIYLALAHMIKFRGHFLIEGDLNPDNSDVDKLFIQLVQTYNQLFEENPINASGVDAKAILSARLSKSRRLENLIAQLPGEKKNGLFGNLIALSLGLTPNFKSNFDLAEDAKLQLSKDTYDDDLDNLLAQIGDQYADLFLAAKNLSDAILLSDILRVNTEITKAPLSASMIKRYDEHHQDLTLLKALVRQQLPEKYKEIFFDQSKNGYAGYIDGGASQEEFYKFIKPILEKMDGTEELLVKLNREDLLRKQRTFDNGSIPHQIHLGELHAILRRQEDFYPFLKDNREKIEKILTFRIPYYVGPLARGNSRFAWMTRKSEETITPWNFEEVVDKGASAQSFIERMTNFDKNLPNEKVLPKHSLLYEYFTVYNELTKVKYVTEGMRKPAFLSGEQKKAIVDLLFKTNRKVTVKQLKEDYFKKIECFDSVEISGVEDRFNASLGTYHDLLKIIKDKDFLDNEENEDILEDIVLTLTLFEDREMIEERLKTYAHLFDDKVMKQLKRRRYTGWGRLSRKLINGIRDKQSGKTILDFLKSDGFANRNFMQLIHDDSLTFKEDIQKAQVSGQGDSLHEHIANLAGSPAIKKGILQTVKVVDELVKVMGRHKPENIVIEMARENQTTQKGQKNSRERMKRIEEGIKELGSQILKEHPVENTQLQNEKLYLYYLQNGRDMYVDQELDINRLSDYDVDHIVPQSFLKDDSIDNKVLTRSDKARGKSDNVPSEEVVKKMKNYWRQLLNAKLITQRKFDNLTKAERGGLSELDKAGFIKRQLVETRQITKHVAQILDSRMNTKYDENDKLIREVKVITLKSKLVSDFRKDFQFYKVREINNYHHAHDAYLNAVVGTALIKKYPKLESEFVYGDYKVYDVRKMIAKSEQEIGKATAKYFFYSNIMNFFKTEITLANGEIRKRPLIETNGETGEIVWDKGRDFATVRKVLSMPQVNIVKKTEVQTGGFSKESILPKRNSDKLIARKKDWDPKKYGGFDSPTVAYSVLVVAKVEKGKSKKLKSVKELLGITIMERSSFEKNPIDFLEAKGYKEVKKDLIIKLPKYSLFELENGRKRMLASAGELQKGNELALPSKYVNFLYLASHYEKLKGSPEDNEQKQLFVEQHKHYLDEIIEQISEFSKRVILADANLDKVLSAYNKHRDKPIREQAENIIHLFTLTNLGAPAAFKYFDTTIDRKRYTSTKEVLDATLIHQSITGLYETRIDLSQLGGDGGEAAAKGGTLNIEDEYRLHETSKEPDVSLGSTWLSDFPQAWAETGGMGLAVRQAPLIIPLKATSTPVSIKQYPMSQEARLGIKPHIQRLLDQGILVPCQSPWNTPLLPVKKPGTNDYRPVQDLREVNKRVEDIHPTVPNPYNLLSGLPPSHQWYTVLDLKDAFFCLRLHPTSQPLFAFEWRDPEMGISGQLTWTRLPQGFKNSPTLFNEALHRDLAGFRIQHPDLILLQYVDDLLLAATSELDCQQGTRALLQTLGDLGYRASAKKAQICQKQVKYLGYLLKEGQRWLTEARKETVMGQPIPKTPRQLREFLGTAGFCRLWIPGFAEMAAPLYPLTKPGTLFNWGPDQQKAFQEIKQALLTAPALGLPDLTKPFELFVDEKQGYAKGVLTQKLGPWRRPVAYLSKKLDPVAAGWPPCLRMVAAIAVLTKDAGKLTMGQPLVILAPHAVEALVKQPPDRWLSNARMTHYQALLLDTDRVQFGPVVALNPATLLPLPEEGLQHDCLDILAEAHGTRSDLMDQPLPDADHTWYTDGSSFLQEGQRKAGAAVTTETEVIWARALPAGTSAQRAELIALTQALKMAEGKKLNVYTDSRYAFATAHIHGEIYRRRGWLTSEGKEIKNKDEILALLKALFLPKRLSIIHCPGHQKGNSAEARGNRMADQAAREVATRETPETSTLLAGKRTADGSEFEKRTADGSEFESPKKKAKVE

SEQ ID NO: 2285 - protein, 2091 aa, synthetic construct
MPAAKRVKLDGGDKKYSIGLDIGTNSVGWAVITDEYKVPSKKFKVLGNTDRHSIKKNLIGALLFDSGETAEATRLKRTARRRYTRRKNRICYLQEIFSNEMAKVDDSFFHRLEESFLVEEDKKHERHPIFGNIVDEVAYHEKYPTIYHLRKKLVDSTDKADLRLIYLALAHMIKFRGHFLIEGDLNPDNSDVDKLFIQLVQTYNQLFEENPINASGVDAKAILSARLSKSRRLENLIAQLPGEKKNGLFGNLIALSLGLTPNFKSNFDLAEDAKLQLSKDTYDDDLDNLLAQIGDQYADLFLAAKNLSDAILLSDILRVNTEITKAPLSASMIKRYDEHHQDLTLLKALVRQQLPEKYKEIFFDQSKNGYAGYIDGGASQEEFYKFIKPILEKMDGTEELLVKLNREDLLRKQRTFDNGSIPHQIHLGELHAILRRQEDFYPFLKDNREKIEKILTFRIPYYVGPLARGNSRFAWMTRKSEETITPWNFEEVVDKGASAQSFIERMTNFDKNLPNEKVLPKHSLLYEYFTVYNELTKVKYVTEGMRKPAFLSGEQKKAIVDLLFKTNRKVTVKQLKEDYFKKIECFDSVEISGVEDRFNASLGTYHDLLKIIKDKDFLDNEENEDILEDIVLTLTLFEDREMIEERLKTYAHLFDDKVMKQLKRRRYTGWGRLSRKLINGIRDKQSGKTILDFLKSDGFANRNFMQLIHDDSLTFKEDIQKAQVSGQGDSLHEHIANLAGSPAIKKGILQTVKVVDELVKVMGRHKPENIVIEMARENQTTQKGQKNSRERMKRIEEGIKELGSQILKEHPVENTQLQNEKLYLYYLQNGRDMYVDQELDINRLSDYDVDHIVPQSFLKDDSIDNKVLTRSDKARGKSDNVPSEEVVKKMKNYWRQLLNAKLITQRKFDNLTKAERGGLSELDKAGFIKRQLVETRQITKHVAQILDSRMNTKYDENDKLIREVKVITLKSKLVSDFRKDFQFYKVREINNYHHAHDAYLNAVVGTALIKKYPKLESEFVYGDYKVYDVRKMIAKSEQEIGKATAKYFFYSNIMNFFKTEITLANGEIRKRPLIETNGETGEIVWDKGRDFATVRKVLSMPQVNIVKKTEVQTGGFSKESILPKRNSDKLIARKKDWDPKKYGGFDSPTVAYSVLVVAKVEKGKSKKLKSVKELLGITIMERSSFEKNPIDFLEAKGYKEVKKDLIIKLPKYSLFELENGRKRMLASAGELQKGNELALPSKYVNFLYLASHYEKLKGSPEDNEQKQLFVEQHKHYLDEIIEQISEFSKRVILADANLDKVLSAYNKHRDKPIREQAENIIHLFTLTNLGAPAAFKYFDTTIDRKRYTSTKEVLDATLIHQSITGLYETRIDLSQLGGDGGGSSPAPGGTLNIEDEYRLHETSKEPDVSLGSTWLSDFPQAWAETGGMGLAVRQAPLIIPLKATSTPVSIKQYPMSQEARLGIKPHIQRLLDQGILVPCQSPWNTPLLPVKKPGTNDYRPVQDLREVNKRVEDIHPTVPNPYNLLSGLPPSHQWYTVLDLKDAFFCLRLHPTSQPLFAFEWRDPEMGISGQLTWTRLPQGFKNSPTLFNEALHRDLAGFRIQHPDLILLQYVDDLLLAATSELDCQQGTRALLQTLGDLGYRASAKKAQICQKQVKYLGYLLKEGQRWLTEARKETVMGQPIPKTPRQLREFLGTAGFCRLWIPGFAEMAAPLYPLTKPGTLFNWGPDQQKAFQEIKQALLTAPALGLPDLTKPFELFVDEKQGYAKGVLTQKLGPWRRPVAYLSKKLDPVAAGWPPCLRMVAAIAVLTKDAGKLTMGQPLVILAPHAVEALVKQPPDRWLSNARMTHYQALLLDTDRVQFGPVVALNPATLLPLPEEGLQHDCLDILAEAHGTRSDLMDQPLPDADHTWYTDGSSFLQEGQRKAGAAVTTETEVIWARALPAGTSAQRAELIALTQALKMAEGKKLNVYTDSRYAFATAHIHGEIYRRRGWLTSEGKEIKNKDEILALLKALFLPKRLSIIHCPGHQKGNSAEARGNRMADQAAREVATRETPETSTLLAGKRTADGSEFEKRTADGSEFESPKKKAKVE

SEQ ID NO: 2286 - protein, 2096 aa, synthetic construct
MPAAKRVKLDGGDKKYSIGLDIGTNSVGWAVITDEYKVPSKKFKVLGNTDRHSIKKNLIGALLFDSGETAEATRLKRTARRRYTRRKNRICYLQEIFSNEMAKVDDSFFHRLEESFLVEEDKKHERHPIFGNIVDEVAYHEKYPTIYHLRKKLVDSTDKADLRLIYLALAHMIKFRGHFLIEGDLNPDNSDVDKLFIQLVQTYNQLFEENPINASGVDAKAILSARLSKSRRLENLIAQLPGEKKNGLFGNLIALSLGLTPNFKSNFDLAEDAKLQLSKDTYDDDLDNLLAQIGDQYADLFLAAKNLSDAILLSDILRVNTEITKAPLSASMIKRYDEHHQDLTLLKALVRQQLPEKYKEIFFDQSKNGYAGYIDGGASQEEFYKFIKPILEKMDGTEELLVKLNREDLLRKQRTFDNGSIPHQIHLGELHAILRRQEDFYPFLKDNREKIEKILTFRIPYYVGPLARGNSRFAWMTRKSEETITPWNFEEVVDKGASAQSFIERMTNFDKNLPNEKVLPKHSLLYEYFTVYNELTKVKYVTEGMRKPAFLSGEQKKAIVDLLFKTNRKVTVKQLKEDYFKKIECFDSVEISGVEDRFNASLGTYHDLLKIIKDKDFLDNEENEDILEDIVLTLTLFEDREMIEERLKTYAHLFDDKVMKQLKRRRYTGWGRLSRKLINGIRDKQSGKTILDFLKSDGFANRNFMQLIHDDSLTFKEDIQKAQVSGQGDSLHEHIANLAGSPAIKKGILQTVKVVDELVKVMGRHKPENIVIEMARENQTTQKGQKNSRERMKRIEEGIKELGSQILKEHPVENTQLQNEKLYLYYLQNGRDMYVDQELDINRLSDYDVDHIVPQSFLKDDSIDNKVLTRSDKARGKSDNVPSEEVVKKMKNYWRQLLNAKLITQRKFDNLTKAERGGLSELDKAGFIKRQLVETRQITKHVAQILDSRMNTKYDENDKLIREVKVITLKSKLVSDFRKDFQFYKVREINNYHHAHDAYLNAVVGTALIKKYPKLESEFVYGDYKVYDVRKMIAKSEQEIGKATAKYFFYSNIMNFFKTEITLANGEIRKRPLIETNGETGEIVWDKGRDFATVRKVLSMPQVNIVKKTEVQTGGFSKESILPKRNSDKLIARKKDWDPKKYGGFDSPTVAYSVLVVAKVEKGKSKKLKSVKELLGITIMERSSFEKNPIDFLEAKGYKEVKKDLIIKLPKYSLFELENGRKRMLASAGELQKGNELALPSKYVNFLYLASHYEKLKGSPEDNEQKQLFVEQHKHYLDEIIEQISEFSKRVILADANLDKVLSAYNKHRDKPIREQAENIIHLFTLTNLGAPAAFKYFDTTIDRKRYTSTKEVLDATLIHQSITGLYETRIDLSQLGGDGGGGSPAPEAAAKGGTLNIEDEYRLHETSKEPDVSLGSTWLSDFPQAWAETGGMGLAVRQAPLIIPLKATSTPVSIKQYPMSQEARLGIKPHIQRLLDQGILVPCQSPWNTPLLPVKKPGTNDYRPVQDLREVNKRVEDIHPTVPNPYNLLSGLPPSHQWYTVLDLKDAFFCLRLHPTSQPLFAFEWRDPEMGISGQLTWTRLPQGFKNSPTLFNEALHRDLAGFRIQHPDLILLQYVDDLLLAATSELDCQQGTRALLQTLGDLGYRASAKKAQICQKQVKYLGYLLKEGQRWLTEARKETVMGQPIPKTPRQLREFLGTAGFCRLWIPGFAEMAAPLYPLTKPGTLFNWGPDQQKAFQEIKQALLTAPALGLPDLTKPFELFVDEKQGYAKGVLTQKLGPWRRPVAYLSKKLDPVAAGWPPCLRMVAAIAVLTKDAGKLTMGQPLVILAPHAVEALVKQPPDRWLSNARMTHYQALLLDTDRVQFGPVVALNPATLLPLPEEGLQHDCLDILAEAHGTRSDLMDQPLPDADHTWYTDGSSFLQEGQRKAGAAVTTETEVIWARALPAGTSAQRAELIALTQALKMAEGKKLNVYTDSRYAFATAHIHGEIYRRRGWLTSEGKEIKNKDEILALLKALFLPKRLSIIHCPGHQKGNSAEARGNRMADQAAREVATRETPETSTLLAGKRTADGSEFEKRTADGSEFESPKKKAKVE

SEQ ID NO: 2287 - protein, 2096 aa, synthetic construct
MPAAKRVKLDGGDKKYSIGLDIGTNSVGWAVITDEYKVPSKKFKVLGNTDRHSIKKNLIGALLFDSGETAEATRLKRTARRRYTRRKNRICYLQEIFSNEMAKVDDSFFHRLEESFLVEEDKKHERHPIFGNIVDEVAYHEKYPTIYHLRKKLVDSTDKADLRLIYLALAHMIKFRGHFLIEGDLNPDNSDVDKLFIQLVQTYNQLFEENPINASGVDAKAILSARLSKSRRLENLIAQLPGEKKNGLFGNLIALSLGLTPNFKSNFDLAEDAKLQLSKDTYDDDLDNLLAQIGDQYADLFLAAKNLSDAILLSDILRVNTEITKAPLSASMIKRYDEHHQDLTLLKALVRQQLPEKYKEIFFDQSKNGYAGYIDGGASQEEFYKFIKPILEKMDGTEELLVKLNREDLLRKQRTFDNGSIPHQIHLGELHAILRRQEDFYPFLKDNREKIEKILTFRIPYYVGPLARGNSRFAWMTRKSEETITPWNFEEVVDKGASAQSFIERMTNFDKNLPNEKVLPKHSLLYEYFTVYNELTKVKYVTEGMRKPAFLSGEQKKAIVDLLFKTNRKVTVKQLKEDYFKKIECFDSVEISGVEDRFNASLGTYHDLLKIIKDKDFLDNEENEDILEDIVLTLTLFEDREMIEERLKTYAHLFDDKVMKQLKRRRYTGWGRLSRKLINGIRDKQSGKTILDFLKSDGFANRNFMQLIHDDSLTFKEDIQKAQVSGQGDSLHEHIANLAGSPAIKKGILQTVKVVDELVKVMGRHKPENIVIEMARENQTTQKGQKNSRERMKRIEEGIKELGSQILKEHPVENTQLQNEKLYLYYLQNGRDMYVDQELDINRLSDYDVDHIVPQSFLKDDSIDNKVLTRSDKARGKSDNVPSEEVVKKMKNYWRQLLNAKLITQRKFDNLTKAERGGLSELDKAGFIKRQLVETRQITKHVAQILDSRMNTKYDENDKLIREVKVITLKSKLVSDFRKDFQFYKVREINNYHHAHDAYLNAVVGTALIKKYPKLESEFVYGDYKVYDVRKMIAKSEQEIGKATAKYFFYSNIMNFFKTEITLANGEIRKRPLIETNGETGEIVWDKGRDFATVRKVLSMPQVNIVKKTEVQTGGFSKESILPKRNSDKLIARKKDWDPKKYGGFDSPTVAYSVLVVAKVEKGKSKKLKSVKELLGITIMERSSFEKNPIDFLEAKGYKEVKKDLIIKLPKYSLFELENGRKRMLASAGELQKGNELALPSKYVNFLYLASHYEKLKGSPEDNEQKQLFVEQHKHYLDEIIEQISEFSKRVILADANLDKVLSAYNKHRDKPIREQAENIIHLFTLTNLGAPAAFKYFDTTIDRKRYTSTKEVLDATLIHQSITGLYETRIDLSQLGGDGGGGSEAAAKGGGGGTLNIEDEYRLHETSKEPDVSLGSTWLSDFPQAWAETGGMGLAVRQAPLIIPLKATSTPVSIKQYPMSQEARLGIKPHIQRLLDQGILVPCQSPWNTPLLPVKKPGTNDYRPVQDLREVNKRVEDIHPTVPNPYNLLSGLPPSHQWYTVLDLKDAFFCLRLHPTSQPLFAFEWRDPEMGISGQLTWTRLPQGFKNSPTLFNEALHRDLAGFRIQHPDLILLQYVDDLLLAATSELDCQQGTRALLQTLGDLGYRASAKKAQICQKQVKYLGYLLKEGQRWLTEARKETVMGQPIPKTPRQLREFLGTAGFCRLWIPGFAEMAAPLYPLTKPGTLFNWGPDQQKAFQEIKQALLTAPALGLPDLTKPFELFVDEKQGYAKGVLTQKLGPWRRPVAYLSKKLDPVAAGWPPCLRMVAAIAVLTKDAGKLTMGQPLVILAPHAVEALVKQPPDRWLSNARMTHYQALLLDTDRVQFGPVVALNPATLLPLPEEGLQHDCLDILAEAHGTRSDLMDQPLPDADHTWYTDGSSFLQEGQRKAGAAVTTETEVIWARALPAGTSAQRAELIALTQALKMAEGKKLNVYTDSRYAFATAHIHGEIYRRRGWLTSEGKEIKNKDEILALLKALFLPKRLSIIHCPGHQKGNSAEARGNRMADQAAREVATRETPETSTLLAGKRTADGSEFEKRTADGSEFESPKKKAKVE

SEQ ID NO: 2288 - protein, 2094 aa, synthetic construct
MPAAKRVKLDGGDKKYSIGLDIGTNSVGWAVITDEYKVPSKKFKVLGNTDRHSIKKNLIGALLFDSGETAEATRLKRTARRRYTRRKNRICYLQEIFSNEMAKVDDSFFHRLEESFLVEEDKKHERHPIFGNIVDEVAYHEKYPTIYHLRKKLVDSTDKADLRLIYLALAHMIKFRGHFLIEGDLNPDNSDVDKLFIQLVQTYNQLFEENPINASGVDAKAILSARLSKSRRLENLIAQLPGEKKNGLFGNLIALSLGLTPNFKSNFDLAEDAKLQLSKDTYDDDLDNLLAQIGDQYADLFLAAKNLSDAILLSDILRVNTEITKAPLSASMIKRYDEHHQDLTLLKALVRQQLPEKYKEIFFDQSKNGYAGYIDGGASQEEFYKFIKPILEKMDGTEELLVKLNREDLLRKQRTFDNGSIPHQIHLGELHAILRRQEDFYPFLKDNREKIEKILTFRIPYYVGPLARGNSRFAWMTRKSEETITPWNFEEVVDKGASAQSFIERMTNFDKNLPNEKVLPKHSLLYEYFTVYNELTKVKYVTEGMRKPAFLSGEQKKAIVDLLFKTNRKVTVKQLKEDYFKKIECFDSVEISGVEDRFNASLGTYHDLLKIIKDKDFLDNEENEDILEDIVLTLTLFEDREMIEERLKTYAHLFDDKVMKQLKRRRYTGWGRLSRKLINGIRDKQSGKTILDFLKSDGFANRNFMQLIHDDSLTFKEDIQKAQVSGQGDSLHEHIANLAGSPAIKKGILQTVKVVDELVKVMGRHKPENIVIEMARENQTTQKGQKNSRERMKRIEEGIKELGSQILKEHPVENTQLQNEKLYLYYLQNGRDMYVDQELDINRLSDYDVDHIVPQSFLKDDSIDNKVLTRSDKARGKSDNVPSEEVVKKMKNYWRQLLNAKLITQRKFDNLTKAERGGLSELDKAGFIKRQLVETRQITKHVAQILDSRMNTKYDENDKLIREVKVITLKSKLVSDFRKDFQFYKVREINNYHHAHDAYLNAVVGTALIKKYPKLESEFVYGDYKVYDVRKMIAKSEQEIGKATAKYFFYSNIMNFFKTEITLANGEIRKRPLIETNGETGEIVWDKGRDFATVRKVLSMPQVNIVKKTEVQTGGFSKESILPKRNSDKLIARKKDWDPKKYGGFDSPTVAYSVLVVAKVEKGKSKKLKSVKELLGITIMERSSFEKNPIDFLEAKGYKEVKKDLIIKLPKYSLFELENGRKRMLASAGELQKGNELALPSKYVNFLYLASHYEKLKGSPEDNEQKQLFVEQHKHYLDEIIEQISEFSKRVILADANLDKVLSAYNKHRDKPIREQAENIIHLFTLTNLGAPAAFKYFDTTIDRKRYTSTKEVLDATLIHQSITGLYETRIDLSQLGGDGGGSSPAPGGSGGTLNIEDEYRLHETSKEPDVSLGSTWLSDFPQAWAETGGMGLAVRQAPLIIPLKATSTPVSIKQYPMSQEARLGIKPHIQRLLDQGILVPCQSPWNTPLLPVKKPGTNDYRPVQDLREVNKRVEDIHPTVPNPYNLLSGLPPSHQWYTVLDLKDAFFCLRLHPTSQPLFAFEWRDPEMGISGQLTWTRLPQGFKNSPTLFNEALHRDLAGFRIQHPDLILLQYVDDLLLAATSELDCQQGTRALLQTLGDLGYRASAKKAQICQKQVKYLGYLLKEGQRWLTEARKETVMGQPIPKTPRQLREFLGTAGFCRLWIPGFAEMAAPLYPLTKPGTLFNWGPDQQKAFQEIKQALLTAPALGLPDLTKPFELFVDEKQGYAKGVLTQKLGPWRRPVAYLSKKLDPVAAGWPPCLRMVAAIAVLTKDAGKLTMGQPLVILAPHAVEALVKQPPDRWLSNARMTHYQALLLDTDRVQFGPVVALNPATLLPLPEEGLQHDCLDILAEAHGTRSDLMDQPLPDADHTWYTDGSSFLQEGQRKAGAAVTTETEVIWARALPAGTSAQRAELIALTQALKMAEGKKLNVYTDSRYAFATAHIHGEIYRRRGWLTSEGKEIKNKDEILALLKALFLPKRLSIIHCPGHQKGNSAEARGNRMADQAAREVATRETPETSTLLAGKRTADGSEFEKRTADGSEFESPKKKAKVE

SEQ ID NO: 2289 - protein, 2096 aa, synthetic construct
MPAAKRVKLDGGDKKYSIGLDIGTNSVGWAVITDEYKVPSKKFKVLGNTDRHSIKKNLIGALLFDSGETAEATRLKRTARRRYTRRKNRICYLQEIFSNEMAKVDDSFFHRLEESFLVEEDKKHERHPIFGNIVDEVAYHEKYPTIYHLRKKLVDSTDKADLRLIYLALAHMIKFRGHFLIEGDLNPDNSDVDKLFIQLVQTYNQLFEENPINASGVDAKAILSARLSKSRRLENLIAQLPGEKKNGLFGNLIALSLGLTPNFKSNFDLAEDAKLQLSKDTYDDDLDNLLAQIGDQYADLFLAAKNLSDAILLSDILRVNTEITKAPLSASMIKRYDEHHQDLTLLKALVRQQLPEKYKEIFFDQSKNGYAGYIDGGASQEEFYKFIKPILEKMDGTEELLVKLNREDLLRKQRTFDNGSIPHQIHLGELHAILRRQEDFYPFLKDNREKIEKILTFRIPYYVGPLARGNSRFAWMTRKSEETITPWNFEEVVDKGASAQSFIERMTNFDKNLPNEKVLPKHSLLYEYFTVYNELTKVKYVTEGMRKPAFLSGEQKKAIVDLLFKTNRKVTVKQLKEDYFKKIECFDSVEISGVEDRFNASLGTYHDLLKIIKDKDFLDNEENEDILEDIVLTLTLFEDREMIEERLKTYAHLFDDKVMKQLKRRRYTGWGRLSRKLINGIRDKQSGKTILDFLKSDGFANRNFMQLIHDDSLTFKEDIQKAQVSGQGDSLHEHIANLAGSPAIKKGILQTVKVVDELVKVMGRHKPENIVIEMARENQTTQKGQKNSRERMKRIEEGIKELGSQILKEHPVENTQLQNEKLYLYYLQNGRDMYVDQELDINRLSDYDVDHIVPQSFLKDDSIDNKVLTRSDKARGKSDNVPSEEVVKKMKNYWRQLLNAKLITQRKFDNLTKAERGGLSELDKAGFIKRQLVETRQITKHVAQILDSRMNTKYDENDKLIREVKVITLKSKLVSDFRKDFQFYKVREINNYHHAHDAYLNAVVGTALIKKYPKLESEFVYGDYKVYDVRKMIAKSEQEIGKATAKYFFYSNIMNFFKTEITLANGEIRKRPLIETNGETGEIVWDKGRDFATVRKVLSMPQVNIVKKTEVQTGGFSKESILPKRNSDKLIARKKDWDPKKYGGFDSPTVAYSVLVVAKVEKGKSKKLKSVKELLGITIMERSSFEKNPIDFLEAKGYKEVKKDLIIKLPKYSLFELENGRKRMLASAGELQKGNELALPSKYVNFLYLASHYEKLKGSPEDNEQKQLFVEQHKHYLDEIIEQISEFSKRVILADANLDKVLSAYNKHRDKPIREQAENIIHLFTLTNLGAPAAFKYFDTTIDRKRYTSTKEVLDATLIHQSITGLYETRIDLSQLGGDGGGSSEAAAKGGGGGTLNIEDEYRLHETSKEPDVSLGSTWLSDFPQAWAETGGMGLAVRQAPLIIPLKATSTPVSIKQYPMSQEARLGIKPHIQRLLDQGILVPCQSPWNTPLLPVKKPGTNDYRPVQDLREVNKRVEDIHPTVPNPYNLLSGLPPSHQWYTVLDLKDAFFCLRLHPTSQPLFAFEWRDPEMGISGQLTWTRLPQGFKNSPTLFNEALHRDLAGFRIQHPDLILLQYVDDLLLAATSELDCQQGTRALLQTLGDLGYRASAKKAQICQKQVKYLGYLLKEGQRWLTEARKETVMGQPIPKTPRQLREFLGTAGFCRLWIPGFAEMAAPLYPLTKPGTLFNWGPDQQKAFQEIKQALLTAPALGLPDLTKPFELFVDEKQGYAKGVLTQKLGPWRRPVAYLSKKLDPVAAGWPPCLRMVAAIAVLTKDAGKLTMGQPLVILAPHAVEALVKQPPDRWLSNARMTHYQALLLDTDRVQFGPVVALNPATLLPLPEEGLQHDCLDILAEAHGTRSDLMDQPLPDADHTWYTDGSSFLQEGQRKAGAAVTTETEVIWARALPAGTSAQRAELIALTQALKMAEGKKLNVYTDSRYAFATAHIHGEIYRRRGWLTSEGKEIKNKDEILALLKALFLPKRLSIIHCPGHQKGNSAEARGNRMADQAAREVATRETPETSTLLAGKRTADGSEFEKRTADGSEFESPKKKAKVE

SEQ ID NO: 2290 - protein, 2094 aa, synthetic construct
MPAAKRVKLDGGDKKYSIGLDIGTNSVGWAVITDEYKVPSKKFKVLGNTDRHSIKKNLIGALLFDSGETAEATRLKRTARRRYTRRKNRICYLQEIFSNEMAKVDDSFFHRLEESFLVEEDKKHERHPIFGNIVDEVAYHEKYPTIYHLRKKLVDSTDKADLRLIYLALAHMIKFRGHFLIEGDLNPDNSDVDKLFIQLVQTYNQLFEENPINASGVDAKAILSARLSKSRRLENLIAQLPGEKKNGLFGNLIALSLGLTPNFKSNFDLAEDAKLQLSKDTYDDDLDNLLAQIGDQYADLFLAAKNLSDAILLSDILRVNTEITKAPLSASMIKRYDEHHQDLTLLKALVRQQLPEKYKEIFFDQSKNGYAGYIDGGASQEEFYKFIKPILEKMDGTEELLVKLNREDLLRKQRTFDNGSIPHQIHLGELHAILRRQEDFYPFLKDNREKIEKILTFRIPYYVGPLARGNSRFAWMTRKSEETITPWNFEEVVDKGASAQSFIERMTNFDKNLPNEKVLPKHSLLYEYFTVYNELTKVKYVTEGMRKPAFLSGEQKKAIVDLLFKTNRKVTVKQLKEDYFKKIECFDSVEISGVEDRFNASLGTYHDLLKIIKDKDFLDNEENEDILEDIVLTLTLFEDREMIEERLKTYAHLFDDKVMKQLKRRRYTGWGRLSRKLINGIRDKQSGKTILDFLKSDGFANRNFMQLIHDDSLTFKEDIQKAQVSGQGDSLHEHIANLAGSPAIKKGILQTVKVVDELVKVMGRHKPENIVIEMARENQTTQKGQKNSRERMKRIEEGIKELGSQILKEHPVENTQLQNEKLYLYYLQNGRDMYVDQELDINRLSDYDVDHIVPQSFLKDDSIDNKVLTRSDKARGKSDNVPSEEVVKKMKNYWRQLLNAKLITQRKFDNLTKAERGGLSELDKAGFIKRQLVETRQITKHVAQILDSRMNTKYDENDKLIREVKVITLKSKLVSDFRKDFQFYKVREINNYHHAHDAYLNAVVGTALIKKYPKLESEFVYGDYKVYDVRKMIAKSEQEIGKATAKYFFYSNIMNFFKTEITLANGEIRKRPLIETNGETGEIVWDKGRDFATVRKVLSMPQVNIVKKTEVQTGGFSKESILPKRNSDKLIARKKDWDPKKYGGFDSPTVAYSVLVVAKVEKGKSKKLKSVKELLGITIMERSSFEKNPIDFLEAKGYKEVKKDLIIKLPKYSLFELENGRKRMLASAGELQKGNELALPSKYVNFLYLASHYEKLKGSPEDNEQKQLFVEQHKHYLDEIIEQISEFSKRVILADANLDKVLSAYNKHRDKPIREQAENIIHLFTLTNLGAPAAFKYFDTTIDRKRYTSTKEVLDATLIHQSITGLYETRIDLSQLGGDGGGGGPAPGGSGGTLNIEDEYRLHETSKEPDVSLGSTWLSDFPQAWAETGGMGLAVRQAPLIIPLKATSTPVSIKQYPMSQEARLGIKPHIQRLLDQGILVPCQSPWNTPLLPVKKPGTNDYRPVQDLREVNKRVEDIHPTVPNPYNLLSGLPPSHQWYTVLDLKDAFFCLRLHPTSQPLFAFEWRDPEMGISGQLTWTRLPQGFKNSPTLFNEALHRDLAGFRIQHPDLILLQYVDDLLLAATSELDCQQGTRALLQTLGDLGYRASAKKAQICQKQVKYLGYLLKEGQRWLTEARKETVMGQPIPKTPRQLREFLGTAGFCRLWIPGFAEMAAPLYPLTKPGTLFNWGPDQQKAFQEIKQALLTAPALGLPDLTKPFELFVDEKQGYAKGVLTQKLGPWRRPVAYLSKKLDPVAAGWPPCLRMVAAIAVLTKDAGKLTMGQPLVILAPHAVEALVKQPPDRWLSNARMTHYQALLLDTDRVQFGPVVALNPATLLPLPEEGLQHDCLDILAEAHGTRSDLMDQPLPDADHTWYTDGSSFLQEGQRKAGAAVTTETEVIWARALPAGTSAQRAELIALTQALKMAEGKKLNVYTDSRYAFATAHIHGEIYRRRGWLTSEGKEIKNKDEILALLKALFLPKRLSIIHCPGHQKGNSAEARGNRMADQAAREVATRETPETSTLLAGKRTADGSEFEKRTADGSEFESPKKKAKVE

SEQ ID NO: 2291 - protein, 2097 aa, synthetic construct
MPAAKRVKLDGGDKKYSIGLDIGTNSVGWAVITDEYKVPSKKFKVLGNTDRHSIKKNLIGALLFDSGETAEATRLKRTARRRYTRRKNRICYLQEIFSNEMAKVDDSFFHRLEESFLVEEDKKHERHPIFGNIVDEVAYHEKYPTIYHLRKKLVDSTDKADLRLIYLALAHMIKFRGHFLIEGDLNPDNSDVDKLFIQLVQTYNQLFEENPINASGVDAKAILSARLSKSRRLENLIAQLPGEKKNGLFGNLIALSLGLTPNFKSNFDLAEDAKLQLSKDTYDDDLDNLLAQIGDQYADLFLAAKNLSDAILLSDILRVNTEITKAPLSASMIKRYDEHHQDLTLLKALVRQQLPEKYKEIFFDQSKNGYAGYIDGGASQEEFYKFIKPILEKMDGTEELLVKLNREDLLRKQRTFDNGSIPHQIHLGELHAILRRQEDFYPFLKDNREKIEKILTFRIPYYVGPLARGNSRFAWMTRKSEETITPWNFEEVVDKGASAQSFIERMTNFDKNLPNEKVLPKHSLLYEYFTVYNELTKVKYVTEGMRKPAFLSGEQKKAIVDLLFKTNRKVTVKQLKEDYFKKIECFDSVEISGVEDRFNASLGTYHDLLKIIKDKDFLDNEENEDILEDIVLTLTLFEDREMIEERLKTYAHLFDDKVMKQLKRRRYTGWGRLSRKLINGIRDKQSGKTILDFLKSDGFANRNFMQLIHDDSLTFKEDIQKAQVSGQGDSLHEHIANLAGSPAIKKGILQTVKVVDELVKVMGRHKPENIVIEMARENQTTQKGQKNSRERMKRIEEGIKELGSQILKEHPVENTQLQNEKLYLYYLQNGRDMYVDQELDINRLSDYDVDHIVPQSFLKDDSIDNKVLTRSDKARGKSDNVPSEEVVKKMKNYWRQLLNAKLITQRKFDNLTKAERGGLSELDKAGFIKRQLVETRQITKHVAQILDSRMNTKYDENDKLIREVKVITLKSKLVSDFRKDFQFYKVREINNYHHAHDAYLNAVVGTALIKKYPKLESEFVYGDYKVYDVRKMIAKSEQEIGKATAKYFFYSNIMNFFKTEITLANGEIRKRPLIETNGETGEIVWDKGRDFATVRKVLSMPQVNIVKKTEVQTGGFSKESILPKRNSDKLIARKKDWDPKKYGGFDSPTVAYSVLVVAKVEKGKSKKLKSVKELLGITIMERSSFEKNPIDFLEAKGYKEVKKDLIIKLPKYSLFELENGRKRMLASAGELQKGNELALPSKYVNFLYLASHYEKLKGSPEDNEQKQLFVEQHKHYLDEIIEQISEFSKRVILADANLDKVLSAYNKHRDKPIREQAENIIHLFTLTNLGAPAAFKYFDTTIDRKRYTSTKEVLDATLIHQSITGLYETRIDLSQLGGDGGGSSGSSGSSGSSGGTLNIEDEYRLHETSKEPDVSLGSTWLSDFPQAWAETGGMGLAVRQAPLIIPLKATSTPVSIKQYPMSQEARLGIKPHIQRLLDQGILVPCQSPWNTPLLPVKKPGTNDYRPVQDLREVNKRVEDIHPTVPNPYNLLSGLPPSHQWYTVLDLKDAFFCLRLHPTSQPLFAFEWRDPEMGISGQLTWTRLPQGFKNSPTLFNEALHRDLAGFRIQHPDLILLQYVDDLLLAATSELDCQQGTRALLQTLGDLGYRASAKKAQICQKQVKYLGYLLKEGQRWLTEARKETVMGQPIPKTPRQLREFLGTAGFCRLWIPGFAEMAAPLYPLTKPGTLFNWGPDQQKAFQEIKQALLTAPALGLPDLTKPFELFVDEKQGYAKGVLTQKLGPWRRPVAYLSKKLDPVAAGWPPCLRMVAAIAVLTKDAGKLTMGQPLVILAPHAVEALVKQPPDRWLSNARMTHYQALLLDTDRVQFGPVVALNPATLLPLPEEGLQHDCLDILAEAHGTRSDLMDQPLPDADHTWYTDGSSFLQEGQRKAGAAVTTETEVIWARALPAGTSAQRAELIALTQALKMAEGKKLNVYTDSRYAFATAHIHGEIYRRRGWLTSEGKEIKNKDEILALLKALFLPKRLSIIHCPGHQKGNSAEARGNRMADQAAREVATRETPETSTLLAGKRTADGSEFEKRTADGSEFESPKKKAKVE

SEQ ID NO: 2292 - protein, 2096 aa, synthetic construct
MPAAKRVKLDGGDKKYSIGLDIGTNSVGWAVITDEYKVPSKKFKVLGNTDRHSIKKNLIGALLFDSGETAEATRLKRTARRRYTRRKNRICYLQEIFSNEMAKVDDSFFHRLEESFLVEEDKKHERHPIFGNIVDEVAYHEKYPTIYHLRKKLVDSTDKADLRLIYLALAHMIKFRGHFLIEGDLNPDNSDVDKLFIQLVQTYNQLFEENPINASGVDAKAILSARLSKSRRLENLIAQLPGEKKNGLFGNLIALSLGLTPNFKSNFDLAEDAKLQLSKDTYDDDLDNLLAQIGDQYADLFLAAKNLSDAILLSDILRVNTEITKAPLSASMIKRYDEHHQDLTLLKALVRQQLPEKYKEIFFDQSKNGYAGYIDGGASQEEFYKFIKPILEKMDGTEELLVKLNREDLLRKQRTFDNGSIPHQIHLGELHAILRRQEDFYPFLKDNREKIEKILTFRIPYYVGPLARGNSRFAWMTRKSEETITPWNFEEVVDKGASAQSFIERMTNFDKNLPNEKVLPKHSLLYEYFTVYNELTKVKYVTEGMRKPAFLSGEQKKAIVDLLFKTNRKVTVKQLKEDYFKKIECFDSVEISGVEDRFNASLGTYHDLLKIIKDKDFLDNEENEDILEDIVLTLTLFEDREMIEERLKTYAHLFDDKVMKQLKRRRYTGWGRLSRKLINGIRDKQSGKTILDFLKSDGFANRNFMQLIHDDSLTFKEDIQKAQVSGQGDSLHEHIANLAGSPAIKKGILQTVKVVDELVKVMGRHKPENIVIEMARENQTTQKGQKNSRERMKRIEEGIKELGSQILKEHPVENTQLQNEKLYLYYLQNGRDMYVDQELDINRLSDYDVDHIVPQSFLKDDSIDNKVLTRSDKARGKSDNVPSEEVVKKMKNYWRQLLNAKLITQRKFDNLTKAERGGLSELDKAGFIKRQLVETRQITKHVAQILDSRMNTKYDENDKLIREVKVITLKSKLVSDFRKDFQFYKVREINNYHHAHDAYLNAVVGTALIKKYPKLESEFVYGDYKVYDVRKMIAKSEQEIGKATAKYFFYSNIMNFFKTEITLANGEIRKRPLIETNGETGEIVWDKGRDFATVRKVLSMPQVNIVKKTEVQTGGFSKESILPKRNSDKLIARKKDWDPKKYGGFDSPTVAYSVLVVAKVEKGKSKKLKSVKELLGITIMERSSFEKNPIDFLEAKGYKEVKKDLIIKLPKYSLFELENGRKRMLASAGELQKGNELALPSKYVNFLYLASHYEKLKGSPEDNEQKQLFVEQHKHYLDEIIEQISEFSKRVILADANLDKVLSAYNKHRDKPIREQAENIIHLFTLTNLGAPAAFKYFDTTIDRKRYTSTKEVLDATLIHQSITGLYETRIDLSQLGGDGGGSSGGGEAAAKGGTLNIEDEYRLHETSKEPDVSLGSTWLSDFPQAWAETGGMGLAVRQAPLIIPLKATSTPVSIKQYPMSQEARLGIKPHIQRLLDQGILVPCQSPWNTPLLPVKKPGTNDYRPVQDLREVNKRVEDIHPTVPNPYNLLSGLPPSHQWYTVLDLKDAFFCLRLHPTSQPLFAFEWRDPEMGISGQLTWTRLPQGFKNSPTLFNEALHRDLAGFRIQHPDLILLQYVDDLLLAATSELDCQQGTRALLQTLGDLGYRASAKKAQICQKQVKYLGYLLKEGQRWLTEARKETVMGQPIPKTPRQLREFLGTAGFCRLWIPGFAEMAAPLYPLTKPGTLFNWGPDQQKAFQEIKQALLTAPALGLPDLTKPFELFVDEKQGYAKGVLTQKLGPWRRPVAYLSKKLDPVAAGWPPCLRMVAAIAVLTKDAGKLTMGQPLVILAPHAVEALVKQPPDRWLSNARMTHYQALLLDTDRVQFGPVVALNPATLLPLPEEGLQHDCLDILAEAHGTRSDLMDQPLPDADHTWYTDGSSFLQEGQRKAGAAVTTETEVIWARALPAGTSAQRAELIALTQALKMAEGKKLNVYTDSRYAFATAHIHGEIYRRRGWLTSEGKEIKNKDEILALLKALFLPKRLSIIHCPGHQKGNSAEARGNRMADQAAREVATRETPETSTLLAGKRTADGSEFEKRTADGSEFESPKKKAKVE

SEQ ID NO: 2293 - protein, 2094 aa, synthetic construct
MPAAKRVKLDGGDKKYSIGLDIGTNSVGWAVITDEYKVPSKKFKVLGNTDRHSIKKNLIGALLFDSGETAEATRLKRTARRRYTRRKNRICYLQEIFSNEMAKVDDSFFHRLEESFLVEEDKKHERHPIFGNIVDEVAYHEKYPTIYHLRKKLVDSTDKADLRLIYLALAHMIKFRGHFLIEGDLNPDNSDVDKLFIQLVQTYNQLFEENPINASGVDAKAILSARLSKSRRLENLIAQLPGEKKNGLFGNLIALSLGLTPNFKSNFDLAEDAKLQLSKDTYDDDLDNLLAQIGDQYADLFLAAKNLSDAILLSDILRVNTEITKAPLSASMIKRYDEHHQDLTLLKALVRQQLPEKYKEIFFDQSKNGYAGYIDGGASQEEFYKFIKPILEKMDGTEELLVKLNREDLLRKQRTFDNGSIPHQIHLGELHAILRRQEDFYPFLKDNREKIEKILTFRIPYYVGPLARGNSRFAWMTRKSEETITPWNFEEVVDKGASAQSFIERMTNFDKNLPNEKVLPKHSLLYEYFTVYNELTKVKYVTEGMRKPAFLSGEQKKAIVDLLFKTNRKVTVKQLKEDYFKKIECFDSVEISGVEDRFNASLGTYHDLLKIIKDKDFLDNEENEDILEDIVLTLTLFEDREMIEERLKTYAHLFDDKVMKQLKRRRYTGWGRLSRKLINGIRDKQSGKTILDFLKSDGFANRNFMQLIHDDSLTFKEDIQKAQVSGQGDSLHEHIANLAGSPAIKKGILQTVKVVDELVKVMGRHKPENIVIEMARENQTTQKGQKNSRERMKRIEEGIKELGSQILKEHPVENTQLQNEKLYLYYLQNGRDMYVDQELDINRLSDYDVDHIVPQSFLKDDSIDNKVLTRSDKARGKSDNVPSEEVVKKMKNYWRQLLNAKLITQRKFDNLTKAERGGLSELDKAGFIKRQLVETRQITKHVAQILDSRMNTKYDENDKLIREVKVITLKSKLVSDFRKDFQFYKVREINNYHHAHDAYLNAVVGTALIKKYPKLESEFVYGDYKVYDVRKMIAKSEQEIGKATAKYFFYSNIMNFFKTEITLANGEIRKRPLIETNGETGEIVWDKGRDFATVRKVLSMPQVNIVKKTEVQTGGFSKESILPKRNSDKLIARKKDWDPKKYGGFDSPTVAYSVLVVAKVEKGKSKKLKSVKELLGITIMERSSFEKNPIDFLEAKGYKEVKKDLIIKLPKYSLFELENGRKRMLASAGELQKGNELALPSKYVNFLYLASHYEKLKGSPEDNEQKQLFVEQHKHYLDEIIEQISEFSKRVILADANLDKVLSAYNKHRDKPIREQAENIIHLFTLTNLGAPAAFKYFDTTIDRKRYTSTKEVLDATLIHQSITGLYETRIDLSQLGGDGGGGSGSSGGGGGTLNIEDEYRLHETSKEPDVSLGSTWLSDFPQAWAETGGMGLAVRQAPLIIPLKATSTPVSIKQYPMSQEARLGIKPHIQRLLDQGILVPCQSPWNTPLLPVKKPGTNDYRPVQDLREVNKRVEDIHPTVPNPYNLLSGLPPSHQWYTVLDLKDAFFCLRLHPTSQPLFAFEWRDPEMGISGQLTWTRLPQGFKNSPTLFNEALHRDLAGFRIQHPDLILLQYVDDLLLAATSELDCQQGTRALLQTLGDLGYRASAKKAQICQKQVKYLGYLLKEGQRWLTEARKETVMGQPIPKTPRQLREFLGTAGFCRLWIPGFAEMAAPLYPLTKPGTLFNWGPDQQKAFQEIKQALLTAPALGLPDLTKPFELFVDEKQGYAKGVLTQKLGPWRRPVAYLSKKLDPVAAGWPPCLRMVAAIAVLTKDAGKLTMGQPLVILAPHAVEALVKQPPDRWLSNARMTHYQALLLDTDRVQFGPVVALNPATLLPLPEEGLQHDCLDILAEAHGTRSDLMDQPLPDADHTWYTDGSSFLQEGQRKAGAAVTTETEVIWARALPAGTSAQRAELIALTQALKMAEGKKLNVYTDSRYAFATAHIHGEIYRRRGWLTSEGKEIKNKDEILALLKALFLPKRLSIIHCPGHQKGNSAEARGNRMADQAAREVATRETPETSTLLAGKRTADGSEFEKRTADGSEFESPKKKAKVE

SEQ ID NO: 2294 - protein, 2092 aa, synthetic construct
MPAAKRVKLDGGDKKYSIGLDIGTNSVGWAVITDEYKVPSKKFKVLGNTDRHSIKKNLIGALLFDSGETAEATRLKRTARRRYTRRKNRICYLQEIFSNEMAKVDDSFFHRLEESFLVEEDKKHERHPIFGNIVDEVAYHEKYPTIYHLRKKLVDSTDKADLRLIYLALAHMIKFRGHFLIEGDLNPDNSDVDKLFIQLVQTYNQLFEENPINASGVDAKAILSARLSKSRRLENLIAQLPGEKKNGLFGNLIALSLGLTPNFKSNFDLAEDAKLQLSKDTYDDDLDNLLAQIGDQYADLFLAAKNLSDAILLSDILRVNTEITKAPLSASMIKRYDEHHQDLTLLKALVRQQLPEKYKEIFFDQSKNGYAGYIDGGASQEEFYKFIKPILEKMDGTEELLVKLNREDLLRKQRTFDNGSIPHQIHLGELHAILRRQEDFYPFLKDNREKIEKILTFRIPYYVGPLARGNSRFAWMTRKSEETITPWNFEEVVDKGASAQSFIERMTNFDKNLPNEKVLPKHSLLYEYFTVYNELTKVKYVTEGMRKPAFLSGEQKKAIVDLLFKTNRKVTVKQLKEDYFKKIECFDSVEISGVEDRFNASLGTYHDLLKIIKDKDFLDNEENEDILEDIVLTLTLFEDREMIEERLKTYAHLFDDKVMKQLKRRRYTGWGRLSRKLINGIRDKQSGKTILDFLKSDGFANRNFMQLIHDDSLTFKEDIQKAQVSGQGDSLHEHIANLAGSPAIKKGILQTVKVVDELVKVMGRHKPENIVIEMARENQTTQKGQKNSRERMKRIEEGIKELGSQILKEHPVENTQLQNEKLYLYYLQNGRDMYVDQELDINRLSDYDVDHIVPQSFLKDDSIDNKVLTRSDKARGKSDNVPSEEVVKKMKNYWRQLLNAKLITQRKFDNLTKAERGGLSELDKAGFIKRQLVETRQITKHVAQILDSRMNTKYDENDKLIREVKVITLKSKLVSDFRKDFQFYKVREINNYHHAHDAYLNAVVGTALIKKYPKLESEFVYGDYKVYDVRKMIAKSEQEIGKATAKYFFYSNIMNFFKTEITLANGEIRKRPLIETNGETGEIVWDKGRDFATVRKVLSMPQVNIVKKTEVQTGGFSKESILPKRNSDKLIARKKDWDPKKYGGFDSPTVAYSVLVVAKVEKGKSKKLKSVKELLGITIMERSSFEKNPIDFLEAKGYKEVKKDLIIKLPKYSLFELENGRKRMLASAGELQKGNELALPSKYVNFLYLASHYEKLKGSPEDNEQKQLFVEQHKHYLDEIIEQISEFSKRVILADANLDKVLSAYNKHRDKPIREQAENIIHLFTLTNLGAPAAFKYFDTTIDRKRYTSTKEVLDATLIHQSITGLYETRIDLSQLGGDGGPAPAPAPGGTLNIEDEYRLHETSKEPDVSLGSTWLSDFPQAWAETGGMGLAVRQAPLIIPLKATSTPVSIKQYPMSQEARLGIKPHIQRLLDQGILVPCQSPWNTPLLPVKKPGTNDYRPVQDLREVNKRVEDIHPTVPNPYNLLSGLPPSHQWYTVLDLKDAFFCLRLHPTSQPLFAFEWRDPEMGISGQLTWTRLPQGFKNSPTLFNEALHRDLAGFRIQHPDLILLQYVDDLLLAATSELDCQQGTRALLQTLGDLGYRASAKKAQICQKQVKYLGYLLKEGQRWLTEARKETVMGQPIPKTPRQLREFLGTAGFCRLWIPGFAEMAAPLYPLTKPGTLFNWGPDQQKAFQEIKQALLTAPALGLPDLTKPFELFVDEKQGYAKGVLTQKLGPWRRPVAYLSKKLDPVAAGWPPCLRMVAAIAVLTKDAGKLTMGQPLVILAPHAVEALVKQPPDRWLSNARMTHYQALLLDTDRVQFGPVVALNPATLLPLPEEGLQHDCLDILAEAHGTRSDLMDQPLPDADHTWYTDGSSFLQEGQRKAGAAVTTETEVIWARALPAGTSAQRAELIALTQALKMAEGKKLNVYTDSRYAFATAHIHGEIYRRRGWLTSEGKEIKNKDEILALLKALFLPKRLSIIHCPGHQKGNSAEARGNRMADQAAREVATRETPETSTLLAGKRTADGSEFEKRTADGSEFESPKKKAKVE

SEQ ID NO: 2295 - protein, 2094 aa, synthetic construct
MPAAKRVKLDGGDKKYSIGLDIGTNSVGWAVITDEYKVPSKKFKVLGNTDRHSIKKNLIGALLFDSGETAEATRLKRTARRRYTRRKNRICYLQEIFSNEMAKVDDSFFHRLEESFLVEEDKKHERHPIFGNIVDEVAYHEKYPTIYHLRKKLVDSTDKADLRLIYLALAHMIKFRGHFLIEGDLNPDNSDVDKLFIQLVQTYNQLFEENPINASGVDAKAILSARLSKSRRLENLIAQLPGEKKNGLFGNLIALSLGLTPNFKSNFDLAEDAKLQLSKDTYDDDLDNLLAQIGDQYADLFLAAKNLSDAILLSDILRVNTEITKAPLSASMIKRYDEHHQDLTLLKALVRQQLPEKYKEIFFDQSKNGYAGYIDGGASQEEFYKFIKPILEKMDGTEELLVKLNREDLLRKQRTFDNGSIPHQIHLGELHAILRRQEDFYPFLKDNREKIEKILTFRIPYYVGPLARGNSRFAWMTRKSEETITPWNFEEVVDKGASAQSFIERMTNFDKNLPNEKVLPKHSLLYEYFTVYNELTKVKYVTEGMRKPAFLSGEQKKAIVDLLFKTNRKVTVKQLKEDYFKKIECFDSVEISGVEDRFNASLGTYHDLLKIIKDKDFLDNEENEDILEDIVLTLTLFEDREMIEERLKTYAHLFDDKVMKQLKRRRYTGWGRLSRKLINGIRDKQSGKTILDFLKSDGFANRNFMQLIHDDSLTFKEDIQKAQVSGQGDSLHEHIANLAGSPAIKKGILQTVKVVDELVKVMGRHKPENIVIEMARENQTTQKGQKNSRERMKRIEEGIKELGSQILKEHPVENTQLQNEKLYLYYLQNGRDMYVDQELDINRLSDYDVDHIVPQSFLKDDSIDNKVLTRSDKARGKSDNVPSEEVVKKMKNYWRQLLNAKLITQRKFDNLTKAERGGLSELDKAGFIKRQLVETRQITKHVAQILDSRMNTKYDENDKLIREVKVITLKSKLVSDFRKDFQFYKVREINNYHHAHDAYLNAVVGTALIKKYPKLESEFVYGDYKVYDVRKMIAKSEQEIGKATAKYFFYSNIMNFFKTEITLANGEIRKRPLIETNGETGEIVWDKGRDFATVRKVLSMPQVNIVKKTEVQTGGFSKESILPKRNSDKLIARKKDWDPKKYGGFDSPTVAYSVLVVAKVEKGKSKKLKSVKELLGITIMERSSFEKNPIDFLEAKGYKEVKKDLIIKLPKYSLFELENGRKRMLASAGELQKGNELALPSKYVNFLYLASHYEKLKGSPEDNEQKQLFVEQHKHYLDEIIEQISEFSKRVILADANLDKVLSAYNKHRDKPIREQAENIIHLFTLTNLGAPAAFKYFDTTIDRKRYTSTKEVLDATLIHQSITGLYETRIDLSQLGGDGGPAPAPAPAPGGTLNIEDEYRLHETSKEPDVSLGSTWLSDFPQAWAETGGMGLAVRQAPLIIPLKATSTPVSIKQYPMSQEARLGIKPHIQRLLDQGILVPCQSPWNTPLLPVKKPGTNDYRPVQDLREVNKRVEDIHPTVPNPYNLLSGLPPSHQWYTVLDLKDAFFCLRLHPTSQPLFAFEWRDPEMGISGQLTWTRLPQGFKNSPTLFNEALHRDLAGFRIQHPDLILLQYVDDLLLAATSELDCQQGTRALLQTLGDLGYRASAKKAQICQKQVKYLGYLLKEGQRWLTEARKETVMGQPIPKTPRQLREFLGTAGFCRLWIPGFAEMAAPLYPLTKPGTLFNWGPDQQKAFQEIKQALLTAPALGLPDLTKPFELFVDEKQGYAKGVLTQKLGPWRRPVAYLSKKLDPVAAGWPPCLRMVAAIAVLTKDAGKLTMGQPLVILAPHAVEALVKQPPDRWLSNARMTHYQALLLDTDRVQFGPVVALNPATLLPLPEEGLQHDCLDILAEAHGTRSDLMDQPLPDADHTWYTDGSSFLQEGQRKAGAAVTTETEVIWARALPAGTSAQRAELIALTQALKMAEGKKLNVYTDSRYAFATAHIHGEIYRRRGWLTSEGKEIKNKDEILALLKALFLPKRLSIIHCPGHQKGNSAEARGNRMADQAAREVATRETPETSTLLAGKRTADGSEFEKRTADGSEFESPKKKAKVE

SEQ ID NO: 2296 - protein, 2096 aa, synthetic construct
MPAAKRVKLDGGDKKYSIGLDIGTNSVGWAVITDEYKVPSKKFKVLGNTDRHSIKKNLIGALLFDSGETAEATRLKRTARRRYTRRKNRICYLQEIFSNEMAKVDDSFFHRLEESFLVEEDKKHERHPIFGNIVDEVAYHEKYPTIYHLRKKLVDSTDKADLRLIYLALAHMIKFRGHFLIEGDLNPDNSDVDKLFIQLVQTYNQLFEENPINASGVDAKAILSARLSKSRRLENLIAQLPGEKKNGLFGNLIALSLGLTPNFKSNFDLAEDAKLQLSKDTYDDDLDNLLAQIGDQYADLFLAAKNLSDAILLSDILRVNTEITKAPLSASMIKRYDEHHQDLTLLKALVRQQLPEKYKEIFFDQSKNGYAGYIDGGASQEEFYKFIKPILEKMDGTEELLVKLNREDLLRKQRTFDNGSIPHQIHLGELHAILRRQEDFYPFLKDNREKIEKILTFRIPYYVGPLARGNSRFAWMTRKSEETITPWNFEEVVDKGASAQSFIERMTNFDKNLPNEKVLPKHSLLYEYFTVYNELTKVKYVTEGMRKPAFLSGEQKKAIVDLLFKTNRKVTVKQLKEDYFKKIECFDSVEISGVEDRFNASLGTYHDLLKIIKDKDFLDNEENEDILEDIVLTLTLFEDREMIEERLKTYAHLFDDKVMKQLKRRRYTGWGRLSRKLINGIRDKQSGKTILDFLKSDGFANRNFMQLIHDDSLTFKEDIQKAQVSGQGDSLHEHIANLAGSPAIKKGILQTVKVVDELVKVMGRHKPENIVIEMARENQTTQKGQKNSRERMKRIEEGIKELGSQILKEHPVENTQLQNEKLYLYYLQNGRDMYVDQELDINRLSDYDVDHIVPQSFLKDDSIDNKVLTRSDKARGKSDNVPSEEVVKKMKNYWRQLLNAKLITQRKFDNLTKAERGGLSELDKAGFIKRQLVETRQITKHVAQILDSRMNTKYDENDKLIREVKVITLKSKLVSDFRKDFQFYKVREINNYHHAHDAYLNAVVGTALIKKYPKLESEFVYGDYKVYDVRKMIAKSEQEIGKATAKYFFYSNIMNFFKTEITLANGEIRKRPLIETNGETGEIVWDKGRDFATVRKVLSMPQVNIVKKTEVQTGGFSKESILPKRNSDKLIARKKDWDPKKYGGFDSPTVAYSVLVVAKVEKGKSKKLKSVKELLGITIMERSSFEKNPIDFLEAKGYKEVKKDLIIKLPKYSLFELENGRKRMLASAGELQKGNELALPSKYVNFLYLASHYEKLKGSPEDNEQKQLFVEQHKHYLDEIIEQISEFSKRVILADANLDKVLSAYNKHRDKPIREQAENIIHLFTLTNLGAPAAFKYFDTTIDRKRYTSTKEVLDATLIHQSITGLYETRIDLSQLGGDGGGGSEAAAKGSSGGTLNIEDEYRLHETSKEPDVSLGSTWLSDFPQAWAETGGMGLAVRQAPLIIPLKATSTPVSIKQYPMSQEARLGIKPHIQRLLDQGILVPCQSPWNTPLLPVKKPGTNDYRPVQDLREVNKRVEDIHPTVPNPYNLLSGLPPSHQWYTVLDLKDAFFCLRLHPTSQPLFAFEWRDPEMGISGQLTWTRLPQGFKNSPTLFNEALHRDLAGFRIQHPDLILLQYVDDLLLAATSELDCQQGTRALLQTLGDLGYRASAKKAQICQKQVKYLGYLLKEGQRWLTEARKETVMGQPIPKTPRQLREFLGTAGFCRLWIPGFAEMAAPLYPLTKPGTLFNWGPDQQKAFQEIKQALLTAPALGLPDLTKPFELFVDEKQGYAKGVLTQKLGPWRRPVAYLSKKLDPVAAGWPPCLRMVAAIAVLTKDAGKLTMGQPLVILAPHAVEALVKQPPDRWLSNARMTHYQALLLDTDRVQFGPVVALNPATLLPLPEEGLQHDCLDILAEAHGTRSDLMDQPLPDADHTWYTDGSSFLQEGQRKAGAAVTTETEVIWARALPAGTSAQRAELIALTQALKMAEGKKLNVYTDSRYAFATAHIHGEIYRRRGWLTSEGKEIKNKDEILALLKALFLPKRLSIIHCPGHQKGNSAEARGNRMADQAAREVATRETPETSTLLAGKRTADGSEFEKRTADGSEFESPKKKAKVE

SEQ ID NO: 2297 - protein, 2093 aa, synthetic construct
MPAAKRVKLDGGDKKYSIGLDIGTNSVGWAVITDEYKVPSKKFKVLGNTDRHSIKKNLIGALLFDSGETAEATRLKRTARRRYTRRKNRICYLQEIFSNEMAKVDDSFFHRLEESFLVEEDKKHERHPIFGNIVDEVAYHEKYPTIYHLRKKLVDSTDKADLRLIYLALAHMIKFRGHFLIEGDLNPDNSDVDKLFIQLVQTYNQLFEENPINASGVDAKAILSARLSKSRRLENLIAQLPGEKKNGLFGNLIALSLGLTPNFKSNFDLAEDAKLQLSKDTYDDDLDNLLAQIGDQYADLFLAAKNLSDAILLSDILRVNTEITKAPLSASMIKRYDEHHQDLTLLKALVRQQLPEKYKEIFFDQSKNGYAGYIDGGASQEEFYKFIKPILEKMDGTEELLVKLNREDLLRKQRTFDNGSIPHQIHLGELHAILRRQEDFYPFLKDNREKIEKILTFRIPYYVGPLARGNSRFAWMTRKSEETITPWNFEEVVDKGASAQSFIERMTNFDKNLPNEKVLPKHSLLYEYFTVYNELTKVKYVTEGMRKPAFLSGEQKKAIVDLLFKTNRKVTVKQLKEDYFKKIECFDSVEISGVEDRFNASLGTYHDLLKIIKDKDFLDNEENEDILEDIVLTLTLFEDREMIEERLKTYAHLFDDKVMKQLKRRRYTGWGRLSRKLINGIRDKQSGKTILDFLKSDGFANRNFMQLIHDDSLTFKEDIQKAQVSGQGDSLHEHIANLAGSPAIKKGILQTVKVVDELVKVMGRHKPENIVIEMARENQTTQKGQKNSRERMKRIEEGIKELGSQILKEHPVENTQLQNEKLYLYYLQNGRDMYVDQELDINRLSDYDVDHIVPQSFLKDDSIDNKVLTRSDKARGKSDNVPSEEVVKKMKNYWRQLLNAKLITQRKFDNLTKAERGGLSELDKAGFIKRQLVETRQITKHVAQILDSRMNTKYDENDKLIREVKVITLKSKLVSDFRKDFQFYKVREINNYHHAHDAYLNAVVGTALIKKYPKLESEFVYGDYKVYDVRKMIAKSEQEIGKATAKYFFYSNIMNFFKTEITLANGEIRKRPLIETNGETGEIVWDKGRDFATVRKVLSMPQVNIVKKTEVQTGGFSKESILPKRNSDKLIARKKDWDPKKYGGFDSPTVAYSVLVVAKVEKGKSKKLKSVKELLGITIMERSSFEKNPIDFLEAKGYKEVKKDLIIKLPKYSLFELENGRKRMLASAGELQKGNELALPSKYVNFLYLASHYEKLKGSPEDNEQKQLFVEQHKHYLDEIIEQISEFSKRVILADANLDKVLSAYNKHRDKPIREQAENIIHLFTLTNLGAPAAFKYFDTTIDRKRYTSTKEVLDATLIHQSITGLYETRIDLSQLGGDGGEAAAKGSSGGTLNIEDEYRLHETSKEPDVSLGSTWLSDFPQAWAETGGMGLAVRQAPLIIPLKATSTPVSIKQYPMSQEARLGIKPHIQRLLDQGILVPCQSPWNTPLLPVKKPGTNDYRPVQDLREVNKRVEDIHPTVPNPYNLLSGLPPSHQWYTVLDLKDAFFCLRLHPTSQPLFAFEWRDPEMGISGQLTWTRLPQGFKNSPTLFNEALHRDLAGFRIQHPDLILLQYVDDLLLAATSELDCQQGTRALLQTLGDLGYRASAKKAQICQKQVKYLGYLLKEGQRWLTEARKETVMGQPIPKTPRQLREFLGTAGFCRLWIPGFAEMAAPLYPLTKPGTLFNWGPDQQKAFQEIKQALLTAPALGLPDLTKPFELFVDEKQGYAKGVLTQKLGPWRRPVAYLSKKLDPVAAGWPPCLRMVAAIAVLTKDAGKLTMGQPLVILAPHAVEALVKQPPDRWLSNARMTHYQALLLDTDRVQFGPVVALNPATLLPLPEEGLQHDCLDILAEAHGTRSDLMDQPLPDADHTWYTDGSSFLQEGQRKAGAAVTTETEVIWARALPAGTSAQRAELIALTQALKMAEGKKLNVYTDSRYAFATAHIHGEIYRRRGWLTSEGKEIKNKDEILALLKALFLPKRLSIIHCPGHQKGNSAEARGNRMADQAAREVATRETPETSTLLAGKRTADGSEFEKRTADGSEFESPKKKAKVE

SEQ ID NO: 2298 - protein, 2091 aa, synthetic construct
MPAAKRVKLDGGDKKYSIGLDIGTNSVGWAVITDEYKVPSKKFKVLGNTDRHSIKKNLIGALLFDSGETAEATRLKRTARRRYTRRKNRICYLQEIFSNEMAKVDDSFFHRLEESFLVEEDKKHERHPIFGNIVDEVAYHEKYPTIYHLRKKLVDSTDKADLRLIYLALAHMIKFRGHFLIEGDLNPDNSDVDKLFIQLVQTYNQLFEENPINASGVDAKAILSARLSKSRRLENLIAQLPGEKKNGLFGNLIALSLGLTPNFKSNFDLAEDAKLQLSKDTYDDDLDNLLAQIGDQYADLFLAAKNLSDAILLSDILRVNTEITKAPLSASMIKRYDEHHQDLTLLKALVRQQLPEKYKEIFFDQSKNGYAGYIDGGASQEEFYKFIKPILEKMDGTEELLVKLNREDLLRKQRTFDNGSIPHQIHLGELHAILRRQEDFYPFLKDNREKIEKILTFRIPYYVGPLARGNSRFAWMTRKSEETITPWNFEEVVDKGASAQSFIERMTNFDKNLPNEKVLPKHSLLYEYFTVYNELTKVKYVTEGMRKPAFLSGEQKKAIVDLLFKTNRKVTVKQLKEDYFKKIECFDSVEISGVEDRFNASLGTYHDLLKIIKDKDFLDNEENEDILEDIVLTLTLFEDREMIEERLKTYAHLFDDKVMKQLKRRRYTGWGRLSRKLINGIRDKQSGKTILDFLKSDGFANRNFMQLIHDDSLTFKEDIQKAQVSGQGDSLHEHIANLAGSPAIKKGILQTVKVVDELVKVMGRHKPENIVIEMARENQTTQKGQKNSRERMKRIEEGIKELGSQILKEHPVENTQLQNEKLYLYYLQNGRDMYVDQELDINRLSDYDVDHIVPQSFLKDDSIDNKVLTRSDKARGKSDNVPSEEVVKKMKNYWRQLLNAKLITQRKFDNLTKAERGGLSELDKAGFIKRQLVETRQITKHVAQILDSRMNTKYDENDKLIREVKVITLKSKLVSDFRKDFQFYKVREINNYHHAHDAYLNAVVGTALIKKYPKLESEFVYGDYKVYDVRKMIAKSEQEIGKATAKYFFYSNIMNFFKTEITLANGEIRKRPLIETNGETGEIVWDKGRDFATVRKVLSMPQVNIVKKTEVQTGGFSKESILPKRNSDKLIARKKDWDPKKYGGFDSPTVAYSVLVVAKVEKGKSKKLKSVKELLGITIMERSSFEKNPIDFLEAKGYKEVKKDLIIKLPKYSLFELENGRKRMLASAGELQKGNELALPSKYVNFLYLASHYEKLKGSPEDNEQKQLFVEQHKHYLDEIIEQISEFSKRVILADANLDKVLSAYNKHRDKPIREQAENIIHLFTLTNLGAPAAFKYFDTTIDRKRYTSTKEVLDATLIHQSITGLYETRIDLSQLGGDGGPAPGGGGGTLNIEDEYRLHETSKEPDVSLGSTWLSDFPQAWAETGGMGLAVRQAPLIIPLKATSTPVSIKQYPMSQEARLGIKPHIQRLLDQGILVPCQSPWNTPLLPVKKPGTNDYRPVQDLREVNKRVEDIHPTVPNPYNLLSGLPPSHQWYTVLDLKDAFFCLRLHPTSQPLFAFEWRDPEMGISGQLTWTRLPQGFKNSPTLFNEALHRDLAGFRIQHPDLILLQYVDDLLLAATSELDCQQGTRALLQTLGDLGYRASAKKAQICQKQVKYLGYLLKEGQRWLTEARKETVMGQPIPKTPRQLREFLGTAGFCRLWIPGFAEMAAPLYPLTKPGTLFNWGPDQQKAFQEIKQALLTAPALGLPDLTKPFELFVDEKQGYAKGVLTQKLGPWRRPVAYLSKKLDPVAAGWPPCLRMVAAIAVLTKDAGKLTMGQPLVILAPHAVEALVKQPPDRWLSNARMTHYQALLLDTDRVQFGPVVALNPATLLPLPEEGLQHDCLDILAEAHGTRSDLMDQPLPDADHTWYTDGSSFLQEGQRKAGAAVTTETEVIWARALPAGTSAQRAELIALTQALKMAEGKKLNVYTDSRYAFATAHIHGEIYRRRGWLTSEGKEIKNKDEILALLKALFLPKRLSIIHCPGHQKGNSAEARGNRMADQAAREVATRETPETSTLLAGKRTADGSEFEKRTADGSEFESPKKKAKVE

SEQ ID NO: 2299 - protein, 2088 aa, synthetic construct
MPAAKRVKLDGGDKKYSIGLDIGTNSVGWAVITDEYKVPSKKFKVLGNTDRHSIKKNLIGALLFDSGETAEATRLKRTARRRYTRRKNRICYLQEIFSNEMAKVDDSFFHRLEESFLVEEDKKHERHPIFGNIVDEVAYHEKYPTIYHLRKKLVDSTDKADLRLIYLALAHMIKFRGHFLIEGDLNPDNSDVDKLFIQLVQTYNQLFEENPINASGVDAKAILSARLSKSRRLENLIAQLPGEKKNGLFGNLIALSLGLTPNFKSNFDLAEDAKLQLSKDTYDDDLDNLLAQIGDQYADLFLAAKNLSDAILLSDILRVNTEITKAPLSASMIKRYDEHHQDLTLLKALVRQQLPEKYKEIFFDQSKNGYAGYIDGGASQEEFYKFIKPILEKMDGTEELLVKLNREDLLRKQRTFDNGSIPHQIHLGELHAILRRQEDFYPFLKDNREKIEKILTFRIPYYVGPLARGNSRFAWMTRKSEETITPWNFEEVVDKGASAQSFIERMTNFDKNLPNEKVLPKHSLLYEYFTVYNELTKVKYVTEGMRKPAFLSGEQKKAIVDLLFKTNRKVTVKQLKEDYFKKIECFDSVEISGVEDRFNASLGTYHDLLKIIKDKDFLDNEENEDILEDIVLTLTLFEDREMIEERLKTYAHLFDDKVMKQLKRRRYTGWGRLSRKLINGIRDKQSGKTILDFLKSDGFANRNFMQLIHDDSLTFKEDIQKAQVSGQGDSLHEHIANLAGSPAIKKGILQTVKVVDELVKVMGRHKPENIVIEMARENQTTQKGQKNSRERMKRIEEGIKELGSQILKEHPVENTQLQNEKLYLYYLQNGRDMYVDQELDINRLSDYDVDHIVPQSFLKDDSIDNKVLTRSDKARGKSDNVPSEEVVKKMKNYWRQLLNAKLITQRKFDNLTKAERGGLSELDKAGFIKRQLVETRQITKHVAQILDSRMNTKYDENDKLIREVKVITLKSKLVSDFRKDFQFYKVREINNYHHAHDAYLNAVVGTALIKKYPKLESEFVYGDYKVYDVRKMIAKSEQEIGKATAKYFFYSNIMNFFKTEITLANGEIRKRPLIETNGETGEIVWDKGRDFATVRKVLSMPQVNIVKKTEVQTGGFSKESILPKRNSDKLIARKKDWDPKKYGGFDSPTVAYSVLVVAKVEKGKSKKLKSVKELLGITIMERSSFEKNPIDFLEAKGYKEVKKDLIIKLPKYSLFELENGRKRMLASAGELQKGNELALPSKYVNFLYLASHYEKLKGSPEDNEQKQLFVEQHKHYLDEIIEQISEFSKRVILADANLDKVLSAYNKHRDKPIREQAENIIHLFTLTNLGAPAAFKYFDTTIDRKRYTSTKEVLDATLIHQSITGLYETRIDLSQLGGDGGPAPGGTLNIEDEYRLHETSKEPDVSLGSTWLSDFPQAWAETGGMGLAVRQAPLIIPLKATSTPVSIKQYPMSQEARLGIKPHIQRLLDQGILVPCQSPWNTPLLPVKKPGTNDYRPVQDLREVNKRVEDIHPTVPNPYNLLSGLPPSHQWYTVLDLKDAFFCLRLHPTSQPLFAFEWRDPEMGISGQLTWTRLPQGFKNSPTLFNEALHRDLAGFRIQHPDLILLQYVDDLLLAATSELDCQQGTRALLQTLGDLGYRASAKKAQICQKQVKYLGYLLKEGQRWLTEARKETVMGQPIPKTPRQLREFLGKAGFCRLFIPGFAEMAAPLYPLTKPGTLFNWGPDQQKAFQEIKQALLTAPALGLPDLTKPFELFVDEKQGYAKGVLTQKLGPWRRPVAYLSKKLDPVAAGWPPCLRMVAAIAVLTKDAGKLTMGQPLVILAPHAVEALVKQPPDRWLSNARMTHYQALLLDTDRVQFGPVVALNPATLLPLPEEGLQHDCLDILAEAHGTRSDLMDQPLPDADHTWYTDGSSFLQEGQRKAGAAVTTETEVIWARALPAGTSAQRAELIALTQALKMAEGKKLNVYTDSRYAFATAHIHGEIYRRRGWLTSEGKEIKNKDEILALLKALFLPKRLSIIHCPGHQKGNSAEARGNRMADQAAREVATRETPETSTLLAGKRTADGSEFEKRTADGSEFESPKKKAKVE

SEQ ID NO: 2300 - protein, 2103 aa, synthetic construct
MPAAKRVKLDGGDKKYSIGLDIGTNSVGWAVITDEYKVPSKKFKVLGNTDRHSIKKNLIGALLFDSGETAEATRLKRTARRRYTRRKNRICYLQEIFSNEMAKVDDSFFHRLEESFLVEEDKKHERHPIFGNIVDEVAYHEKYPTIYHLRKKLVDSTDKADLRLIYLALAHMIKFRGHFLIEGDLNPDNSDVDKLFIQLVQTYNQLFEENPINASGVDAKAILSARLSKSRRLENLIAQLPGEKKNGLFGNLIALSLGLTPNFKSNFDLAEDAKLQLSKDTYDDDLDNLLAQIGDQYADLFLAAKNLSDAILLSDILRVNTEITKAPLSASMIKRYDEHHQDLTLLKALVRQQLPEKYKEIFFDQSKNGYAGYIDGGASQEEFYKFIKPILEKMDGTEELLVKLNREDLLRKQRTFDNGSIPHQIHLGELHAILRRQEDFYPFLKDNREKIEKILTFRIPYYVGPLARGNSRFAWMTRKSEETITPWNFEEVVDKGASAQSFIERMTNFDKNLPNEKVLPKHSLLYEYFTVYNELTKVKYVTEGMRKPAFLSGEQKKAIVDLLFKTNRKVTVKQLKEDYFKKIECFDSVEISGVEDRFNASLGTYHDLLKIIKDKDFLDNEENEDILEDIVLTLTLFEDREMIEERLKTYAHLFDDKVMKQLKRRRYTGWGRLSRKLINGIRDKQSGKTILDFLKSDGFANRNFMQLIHDDSLTFKEDIQKAQVSGQGDSLHEHIANLAGSPAIKKGILQTVKVVDELVKVMGRHKPENIVIEMARENQTTQKGQKNSRERMKRIEEGIKELGSQILKEHPVENTQLQNEKLYLYYLQNGRDMYVDQELDINRLSDYDVDHIVPQSFLKDDSIDNKVLTRSDKARGKSDNVPSEEVVKKMKNYWRQLLNAKLITQRKFDNLTKAERGGLSELDKAGFIKRQLVETRQITKHVAQILDSRMNTKYDENDKLIREVKVITLKSKLVSDFRKDFQFYKVREINNYHHAHDAYLNAVVGTALIKKYPKLESEFVYGDYKVYDVRKMIAKSEQEIGKATAKYFFYSNIMNFFKTEITLANGEIRKRPLIETNGETGEIVWDKGRDFATVRKVLSMPQVNIVKKTEVQTGGFSKESILPKRNSDKLIARKKDWDPKKYGGFDSPTVAYSVLVVAKVEKGKSKKLKSVKELLGITIMERSSFEKNPIDFLEAKGYKEVKKDLIIKLPKYSLFELENGRKRMLASAGELQKGNELALPSKYVNFLYLASHYEKLKGSPEDNEQKQLFVEQHKHYLDEIIEQISEFSKRVILADANLDKVLSAYNKHRDKPIREQAENIIHLFTLTNLGAPAAFKYFDTTIDRKRYTSTKEVLDATLIHQSITGLYETRIDLSQLGGDGGGGSGGSGGSGGSGGSGGSGGTLNIEDEYRLHETSKEPDVSLGSTWLSDFPQAWAETGGMGLAVRQAPLIIPLKATSTPVSIKQYPMSQEARLGIKPHIQRLLDQGILVPCQSPWNTPLLPVKKPGTNDYRPVQDLREVNKRVEDIHPTVPNPYNLLSGLPPSHQWYTVLDLKDAFFCLRLHPTSQPLFAFEWRDPEMGISGQLTWTRLPQGFKNSPTLFNEALHRDLAGFRIQHPDLILLQYVDDLLLAATSELDCQQGTRALLQTLGDLGYRASAKKAQICQKQVKYLGYLLKEGQRWLTEARKETVMGQPIPKTPRQLREFLGKAGFCRLFIPGFAEMAAPLYPLTKPGTLFNWGPDQQKAFQEIKQALLTAPALGLPDLTKPFELFVDEKQGYAKGVLTQKLGPWRRPVAYLSKKLDPVAAGWPPCLRMVAAIAVLTKDAGKLTMGQPLVILAPHAVEALVKQPPDRWLSNARMTHYQALLLDTDRVQFGPVVALNPATLLPLPEEGLQHDCLDILAEAHGTRSDLMDQPLPDADHTWYTDGSSFLQEGQRKAGAAVTTETEVIWARALPAGTSAQRAELIALTQALKMAEGKKLNVYTDSRYAFATAHIHGEIYRRRGWLTSEGKEIKNKDEILALLKALFLPKRLSIIHCPGHQKGNSAEARGNRMADQAAREVATRETPETSTLLAGKRTADGSEFEKRTADGSEFESPKKKAKVE

SEQ ID NO: 2301 - protein, 2096 aa, synthetic construct
MPAAKRVKLDGGDKKYSIGLDIGTNSVGWAVITDEYKVPSKKFKVLGNTDRHSIKKNLIGALLFDSGETAEATRLKRTARRRYTRRKNRICYLQEIFSNEMAKVDDSFFHRLEESFLVEEDKKHERHPIFGNIVDEVAYHEKYPTIYHLRKKLVDSTDKADLRLIYLALAHMIKFRGHFLIEGDLNPDNSDVDKLFIQLVQTYNQLFEENPINASGVDAKAILSARLSKSRRLENLIAQLPGEKKNGLFGNLIALSLGLTPNFKSNFDLAEDAKLQLSKDTYDDDLDNLLAQIGDQYADLFLAAKNLSDAILLSDILRVNTEITKAPLSASMIKRYDEHHQDLTLLKALVRQQLPEKYKEIFFDQSKNGYAGYIDGGASQEEFYKFIKPILEKMDGTEELLVKLNREDLLRKQRTFDNGSIPHQIHLGELHAILRRQEDFYPFLKDNREKIEKILTFRIPYYVGPLARGNSRFAWMTRKSEETITPWNFEEVVDKGASAQSFIERMTNFDKNLPNEKVLPKHSLLYEYFTVYNELTKVKYVTEGMRKPAFLSGEQKKAIVDLLFKTNRKVTVKQLKEDYFKKIECFDSVEISGVEDRFNASLGTYHDLLKIIKDKDFLDNEENEDILEDIVLTLTLFEDREMIEERLKTYAHLFDDKVMKQLKRRRYTGWGRLSRKLINGIRDKQSGKTILDFLKSDGFANRNFMQLIHDDSLTFKEDIQKAQVSGQGDSLHEHIANLAGSPAIKKGILQTVKVVDELVKVMGRHKPENIVIEMARENQTTQKGQKNSRERMKRIEEGIKELGSQILKEHPVENTQLQNEKLYLYYLQNGRDMYVDQELDINRLSDYDVDHIVPQSFLKDDSIDNKVLTRSDKARGKSDNVPSEEVVKKMKNYWRQLLNAKLITQRKFDNLTKAERGGLSELDKAGFIKRQLVETRQITKHVAQILDSRMNTKYDENDKLIREVKVITLKSKLVSDFRKDFQFYKVREINNYHHAHDAYLNAVVGTALIKKYPKLESEFVYGDYKVYDVRKMIAKSEQEIGKATAKYFFYSNIMNFFKTEITLANGEIRKRPLIETNGETGEIVWDKGRDFATVRKVLSMPQVNIVKKTEVQTGGFSKESILPKRNSDKLIARKKDWDPKKYGGFDSPTVAYSVLVVAKVEKGKSKKLKSVKELLGITIMERSSFEKNPIDFLEAKGYKEVKKDLIIKLPKYSLFELENGRKRMLASAGELQKGNELALPSKYVNFLYLASHYEKLKGSPEDNEQKQLFVEQHKHYLDEIIEQISEFSKRVILADANLDKVLSAYNKHRDKPIREQAENIIHLFTLTNLGAPAAFKYFDTTIDRKRYTSTKEVLDATLIHQSITGLYETRIDLSQLGGDGGPAPAPAPAPAPGGTLNIEDEYRLHETSKEPDVSLGSTWLSDFPQAWAETGGMGLAVRQAPLIIPLKATSTPVSIKQYPMSQEARLGIKPHIQRLLDQGILVPCQSPWNTPLLPVKKPGTNDYRPVQDLREVNKRVEDIHPTVPNPYNLLSGLPPSHQWYTVLDLKDAFFCLRLHPTSQPLFAFEWRDPEMGISGQLTWTRLPQGFKNSPTLFNEALHRDLAGFRIQHPDLILLQYVDDLLLAATSELDCQQGTRALLQTLGDLGYRASAKKAQICQKQVKYLGYLLKEGQRWLTEARKETVMGQPIPKTPRQLREFLGKAGFCRLFIPGFAEMAAPLYPLTKPGTLFNWGPDQQKAFQEIKQALLTAPALGLPDLTKPFELFVDEKQGYAKGVLTQKLGPWRRPVAYLSKKLDPVAAGWPPCLRMVAAIAVLTKDAGKLTMGQPLVILAPHAVEALVKQPPDRWLSNARMTHYQALLLDTDRVQFGPVVALNPATLLPLPEEGLQHDCLDILAEAHGTRSDLMDQPLPDADHTWYTDGSSFLQEGQRKAGAAVTTETEVIWARALPAGTSAQRAELIALTQALKMAEGKKLNVYTDSRYAFATAHIHGEIYRRRGWLTSEGKEIKNKDEILALLKALFLPKRLSIIHCPGHQKGNSAEARGNRMADQAAREVATRETPETSTLLAGKRTADGSEFEKRTADGSEFESPKKKAKVE

SEQ ID NO: 2302 - protein, 2091 aa, synthetic construct
MPAAKRVKLDGGDKKYSIGLDIGTNSVGWAVITDEYKVPSKKFKVLGNTDRHSIKKNLIGALLFDSGETAEATRLKRTARRRYTRRKNRICYLQEIFSNEMAKVDDSFFHRLEESFLVEEDKKHERHPIFGNIVDEVAYHEKYPTIYHLRKKLVDSTDKADLRLIYLALAHMIKFRGHFLIEGDLNPDNSDVDKLFIQLVQTYNQLFEENPINASGVDAKAILSARLSKSRRLENLIAQLPGEKKNGLFGNLIALSLGLTPNFKSNFDLAEDAKLQLSKDTYDDDLDNLLAQIGDQYADLFLAAKNLSDAILLSDILRVNTEITKAPLSASMIKRYDEHHQDLTLLKALVRQQLPEKYKEIFFDQSKNGYAGYIDGGASQEEFYKFIKPILEKMDGTEELLVKLNREDLLRKQRTFDNGSIPHQIHLGELHAILRRQEDFYPFLKDNREKIEKILTFRIPYYVGPLARGNSRFAWMTRKSEETITPWNFEEVVDKGASAQSFIERMTNFDKNLPNEKVLPKHSLLYEYFTVYNELTKVKYVTEGMRKPAFLSGEQKKAIVDLLFKTNRKVTVKQLKEDYFKKIECFDSVEISGVEDRFNASLGTYHDLLKIIKDKDFLDNEENEDILEDIVLTLTLFEDREMIEERLKTYAHLFDDKVMKQLKRRRYTGWGRLSRKLINGIRDKQSGKTILDFLKSDGFANRNFMQLIHDDSLTFKEDIQKAQVSGQGDSLHEHIANLAGSPAIKKGILQTVKVVDELVKVMGRHKPENIVIEMARENQTTQKGQKNSRERMKRIEEGIKELGSQILKEHPVENTQLQNEKLYLYYLQNGRDMYVDQELDINRLSDYDVDHIVPQSFLKDDSIDNKVLTRSDKARGKSDNVPSEEVVKKMKNYWRQLLNAKLITQRKFDNLTKAERGGLSELDKAGFIKRQLVETRQITKHVAQILDSRMNTKYDENDKLIREVKVITLKSKLVSDFRKDFQFYKVREINNYHHAHDAYLNAVVGTALIKKYPKLESEFVYGDYKVYDVRKMIAKSEQEIGKATAKYFFYSNIMNFFKTEITLANGEIRKRPLIETNGETGEIVWDKGRDFATVRKVLSMPQVNIVKKTEVQTGGFSKESILPKRNSDKLIARKKDWDPKKYGGFDSPTVAYSVLVVAKVEKGKSKKLKSVKELLGITIMERSSFEKNPIDFLEAKGYKEVKKDLIIKLPKYSLFELENGRKRMLASAGELQKGNELALPSKYVNFLYLASHYEKLKGSPEDNEQKQLFVEQHKHYLDEIIEQISEFSKRVILADANLDKVLSAYNKHRDKPIREQAENIIHLFTLTNLGAPAAFKYFDTTIDRKRYTSTKEVLDATLIHQSITGLYETRIDLSQLGGDGGGGGPAPGGTLNIEDEYRLHETSKEPDVSLGSTWLSDFPQAWAETGGMGLAVRQAPLIIPLKATSTPVSIKQYPMSQEARLGIKPHIQRLLDQGILVPCQSPWNTPLLPVKKPGTNDYRPVQDLREVNKRVEDIHPTVPNPYNLLSGLPPSHQWYTVLDLKDAFFCLRLHPTSQPLFAFEWRDPEMGISGQLTWTRLPQGFKNSPTLFNEALHRDLAGFRIQHPDLILLQYVDDLLLAATSELDCQQGTRALLQTLGDLGYRASAKKAQICQKQVKYLGYLLKEGQRWLTEARKETVMGQPIPKTPRQLREFLGKAGFCRLFIPGFAEMAAPLYPLTKPGTLFNWGPDQQKAFQEIKQALLTAPALGLPDLTKPFELFVDEKQGYAKGVLTQKLGPWRRPVAYLSKKLDPVAAGWPPCLRMVAAIAVLTKDAGKLTMGQPLVILAPHAVEALVKQPPDRWLSNARMTHYQALLLDTDRVQFGPVVALNPATLLPLPEEGLQHDCLDILAEAHGTRSDLMDQPLPDADHTWYTDGSSFLQEGQRKAGAAVTTETEVIWARALPAGTSAQRAELIALTQALKMAEGKKLNVYTDSRYAFATAHIHGEIYRRRGWLTSEGKEIKNKDEILALLKALFLPKRLSIIHCPGHQKGNSAEARGNRMADQAAREVATRETPETSTLLAGKRTADGSEFEKRTADGSEFESPKKKAKVE

SEQ ID NO: 2303 - protein, 2115 aa, synthetic construct
MPAAKRVKLDGGDKKYSIGLDIGTNSVGWAVITDEYKVPSKKFKVLGNTDRHSIKKNLIGALLFDSGETAEATRLKRTARRRYTRRKNRICYLQEIFSNEMAKVDDSFFHRLEESFLVEEDKKHERHPIFGNIVDEVAYHEKYPTIYHLRKKLVDSTDKADLRLIYLALAHMIKFRGHFLIEGDLNPDNSDVDKLFIQLVQTYNQLFEENPINASGVDAKAILSARLSKSRRLENLIAQLPGEKKNGLFGNLIALSLGLTPNFKSNFDLAEDAKLQLSKDTYDDDLDNLLAQIGDQYADLFLAAKNLSDAILLSDILRVNTEITKAPLSASMIKRYDEHHQDLTLLKALVRQQLPEKYKEIFFDQSKNGYAGYIDGGASQEEFYKFIKPILEKMDGTEELLVKLNREDLLRKQRTFDNGSIPHQIHLGELHAILRRQEDFYPFLKDNREKIEKILTFRIPYYVGPLARGNSRFAWMTRKSEETITPWNFEEVVDKGASAQSFIERMTNFDKNLPNEKVLPKHSLLYEYFTVYNELTKVKYVTEGMRKPAFLSGEQKKAIVDLLFKTNRKVTVKQLKEDYFKKIECFDSVEISGVEDRFNASLGTYHDLLKIIKDKDFLDNEENEDILEDIVLTLTLFEDREMIEERLKTYAHLFDDKVMKQLKRRRYTGWGRLSRKLINGIRDKQSGKTILDFLKSDGFANRNFMQLIHDDSLTFKEDIQKAQVSGQGDSLHEHIANLAGSPAIKKGILQTVKVVDELVKVMGRHKPENIVIEMARENQTTQKGQKNSRERMKRIEEGIKELGSQILKEHPVENTQLQNEKLYLYYLQNGRDMYVDQELDINRLSDYDVDHIVPQSFLKDDSIDNKVLTRSDKARGKSDNVPSEEVVKKMKNYWRQLLNAKLITQRKFDNLTKAERGGLSELDKAGFIKRQLVETRQITKHVAQILDSRMNTKYDENDKLIREVKVITLKSKLVSDFRKDFQFYKVREINNYHHAHDAYLNAVVGTALIKKYPKLESEFVYGDYKVYDVRKMIAKSEQEIGKATAKYFFYSNIMNFFKTEITLANGEIRKRPLIETNGETGEIVWDKGRDFATVRKVLSMPQVNIVKKTEVQTGGFSKESILPKRNSDKLIARKKDWDPKKYGGFDSPTVAYSVLVVAKVEKGKSKKLKSVKELLGITIMERSSFEKNPIDFLEAKGYKEVKKDLIIKLPKYSLFELENGRKRMLASAGELQKGNELALPSKYVNFLYLASHYEKLKGSPEDNEQKQLFVEQHKHYLDEIIEQISEFSKRVILADANLDKVLSAYNKHRDKPIREQAENIIHLFTLTNLGAPAAFKYFDTTIDRKRYTSTKEVLDATLIHQSITGLYETRIDLSQLGGDGGGGGGSGGGGSGGGGSGGGGSGGGGSGGGGSGGTLNIEDEYRLHETSKEPDVSLGSTWLSDFPQAWAETGGMGLAVRQAPLIIPLKATSTPVSIKQYPMSQEARLGIKPHIQRLLDQGILVPCQSPWNTPLLPVKKPGTNDYRPVQDLREVNKRVEDIHPTVPNPYNLLSGLPPSHQWYTVLDLKDAFFCLRLHPTSQPLFAFEWRDPEMGISGQLTWTRLPQGFKNSPTLFNEALHRDLAGFRIQHPDLILLQYVDDLLLAATSELDCQQGTRALLQTLGDLGYRASAKKAQICQKQVKYLGYLLKEGQRWLTEARKETVMGQPIPKTPRQLREFLGKAGFCRLFIPGFAEMAAPLYPLTKPGTLFNWGPDQQKAFQEIKQALLTAPALGLPDLTKPFELFVDEKQGYAKGVLTQKLGPWRRPVAYLSKKLDPVAAGWPPCLRMVAAIAVLTKDAGKLTMGQPLVILAPHAVEALVKQPPDRWLSNARMTHYQALLLDTDRVQFGPVVALNPATLLPLPEEGLQHDCLDILAEAHGTRSDLMDQPLPDADHTWYTDGSSFLQEGQRKAGAAVTTETEVIWARALPAGTSAQRAELIALTQALKMAEGKKLNVYTDSRYAFATAHIHGEIYRRRGWLTSEGKEIKNKDEILALLKALFLPKRLSIIHCPGHQKGNSAEARGNRMADQAAREVATRETPETSTLLAGKRTADGSEFEKRTADGSEFESPKKKAKVE

SEQ ID NO: 2304 - protein, 2103 aa, synthetic construct
MPAAKRVKLDGGDKKYSIGLDIGTNSVGWAVITDEYKVPSKKFKVLGNTDRHSIKKNLIGALLFDSGETAEATRLKRTARRRYTRRKNRICYLQEIFSNEMAKVDDSFFHRLEESFLVEEDKKHERHPIFGNIVDEVAYHEKYPTIYHLRKKLVDSTDKADLRLIYLALAHMIKFRGHFLIEGDLNPDNSDVDKLFIQLVQTYNQLFEENPINASGVDAKAILSARLSKSRRLENLIAQLPGEKKNGLFGNLIALSLGLTPNFKSNFDLAEDAKLQLSKDTYDDDLDNLLAQIGDQYADLFLAAKNLSDAILLSDILRVNTEITKAPLSASMIKRYDEHHQDLTLLKALVRQQLPEKYKEIFFDQSKNGYAGYIDGGASQEEFYKFIKPILEKMDGTEELLVKLNREDLLRKQRTFDNGSIPHQIHLGELHAILRRQEDFYPFLKDNREKIEKILTFRIPYYVGPLARGNSRFAWMTRKSEETITPWNFEEVVDKGASAQSFIERMTNFDKNLPNEKVLPKHSLLYEYFTVYNELTKVKYVTEGMRKPAFLSGEQKKAIVDLLFKTNRKVTVKQLKEDYFKKIECFDSVEISGVEDRFNASLGTYHDLLKIIKDKDFLDNEENEDILEDIVLTLTLFEDREMIEERLKTYAHLFDDKVMKQLKRRRYTGWGRLSRKLINGIRDKQSGKTILDFLKSDGFANRNFMQLIHDDSLTFKEDIQKAQVSGQGDSLHEHIANLAGSPAIKKGILQTVKVVDELVKVMGRHKPENIVIEMARENQTTQKGQKNSRERMKRIEEGIKELGSQILKEHPVENTQLQNEKLYLYYLQNGRDMYVDQELDINRLSDYDVDHIVPQSFLKDDSIDNKVLTRSDKARGKSDNVPSEEVVKKMKNYWRQLLNAKLITQRKFDNLTKAERGGLSELDKAGFIKRQLVETRQITKHVAQILDSRMNTKYDENDKLIREVKVITLKSKLVSDFRKDFQFYKVREINNYHHAHDAYLNAVVGTALIKKYPKLESEFVYGDYKVYDVRKMIAKSEQEIGKATAKYFFYSNIMNFFKTEITLANGEIRKRPLIETNGETGEIVWDKGRDFATVRKVLSMPQVNIVKKTEVQTGGFSKESILPKRNSDKLIARKKDWDPKKYGGFDSPTVAYSVLVVAKVEKGKSKKLKSVKELLGITIMERSSFEKNPIDFLEAKGYKEVKKDLIIKLPKYSLFELENGRKRMLASAGELQKGNELALPSKYVNFLYLASHYEKLKGSPEDNEQKQLFVEQHKHYLDEIIEQISEFSKRVILADANLDKVLSAYNKHRDKPIREQAENIIHLFTLTNLGAPAAFKYFDTTIDRKRYTSTKEVLDATLIHQSITGLYETRIDLSQLGGDGGGSSGSSGSSGSSGSSGSSGGTLNIEDEYRLHETSKEPDVSLGSTWLSDFPQAWAETGGMGLAVRQAPLIIPLKATSTPVSIKQYPMSQEARLGIKPHIQRLLDQGILVPCQSPWNTPLLPVKKPGTNDYRPVQDLREVNKRVEDIHPTVPNPYNLLSGLPPSHQWYTVLDLKDAFFCLRLHPTSQPLFAFEWRDPEMGISGQLTWTRLPQGFKNSPTLFNEALHRDLAGFRIQHPDLILLQYVDDLLLAATSELDCQQGTRALLQTLGDLGYRASAKKAQICQKQVKYLGYLLKEGQRWLTEARKETVMGQPIPKTPRQLREFLGKAGFCRLFIPGFAEMAAPLYPLTKPGTLFNWGPDQQKAFQEIKQALLTAPALGLPDLTKPFELFVDEKQGYAKGVLTQKLGPWRRPVAYLSKKLDPVAAGWPPCLRMVAAIAVLTKDAGKLTMGQPLVILAPHAVEALVKQPPDRWLSNARMTHYQALLLDTDRVQFGPVVALNPATLLPLPEEGLQHDCLDILAEAHGTRSDLMDQPLPDADHTWYTDGSSFLQEGQRKAGAAVTTETEVIWARALPAGTSAQRAELIALTQALKMAEGKKLNVYTDSRYAFATAHIHGEIYRRRGWLTSEGKEIKNKDEILALLKALFLPKRLSIIHCPGHQKGNSAEARGNRMADQAAREVATRETPETSTLLAGKRTADGSEFEKRTADGSEFESPKKKAKVE

SEQ ID NO: 2305 - protein, 2100 aa, synthetic construct
MPAAKRVKLDGGDKKYSIGLDIGTNSVGWAVITDEYKVPSKKFKVLGNTDRHSIKKNLIGALLFDSGETAEATRLKRTARRRYTRRKNRICYLQEIFSNEMAKVDDSFFHRLEESFLVEEDKKHERHPIFGNIVDEVAYHEKYPTIYHLRKKLVDSTDKADLRLIYLALAHMIKFRGHFLIEGDLNPDNSDVDKLFIQLVQTYNQLFEENPINASGVDAKAILSARLSKSRRLENLIAQLPGEKKNGLFGNLIALSLGLTPNFKSNFDLAEDAKLQLSKDTYDDDLDNLLAQIGDQYADLFLAAKNLSDAILLSDILRVNTEITKAPLSASMIKRYDEHHQDLTLLKALVRQQLPEKYKEIFFDQSKNGYAGYIDGGASQEEFYKFIKPILEKMDGTEELLVKLNREDLLRKQRTFDNGSIPHQIHLGELHAILRRQEDFYPFLKDNREKIEKILTFRIPYYVGPLARGNSRFAWMTRKSEETITPWNFEEVVDKGASAQSFIERMTNFDKNLPNEKVLPKHSLLYEYFTVYNELTKVKYVTEGMRKPAFLSGEQKKAIVDLLFKTNRKVTVKQLKEDYFKKIECFDSVEISGVEDRFNASLGTYHDLLKIIKDKDFLDNEENEDILEDIVLTLTLFEDREMIEERLKTYAHLFDDKVMKQLKRRRYTGWGRLSRKLINGIRDKQSGKTILDFLKSDGFANRNFMQLIHDDSLTFKEDIQKAQVSGQGDSLHEHIANLAGSPAIKKGILQTVKVVDELVKVMGRHKPENIVIEMARENQTTQKGQKNSRERMKRIEEGIKELGSQILKEHPVENTQLQNEKLYLYYLQNGRDMYVDQELDINRLSDYDVDHIVPQSFLKDDSIDNKVLTRSDKARGKSDNVPSEEVVKKMKNYWRQLLNAKLITQRKFDNLTKAERGGLSELDKAGFIKRQLVETRQITKHVAQILDSRMNTKYDENDKLIREVKVITLKSKLVSDFRKDFQFYKVREINNYHHAHDAYLNAVVGTALIKKYPKLESEFVYGDYKVYDVRKMIAKSEQEIGKATAKYFFYSNIMNFFKTEITLANGEIRKRPLIETNGETGEIVWDKGRDFATVRKVLSMPQVNIVKKTEVQTGGFSKESILPKRNSDKLIARKKDWDPKKYGGFDSPTVAYSVLVVAKVEKGKSKKLKSVKELLGITIMERSSFEKNPIDFLEAKGYKEVKKDLIIKLPKYSLFELENGRKRMLASAGELQKGNELALPSKYVNFLYLASHYEKLKGSPEDNEQKQLFVEQHKHYLDEIIEQISEFSKRVILADANLDKVLSAYNKHRDKPIREQAENIIHLFTLTNLGAPAAFKYFDTTIDRKRYTSTKEVLDATLIHQSITGLYETRIDLSQLGGDGGEAAAKGGGGSEAAAKGGTLNIEDEYRLHETSKEPDVSLGSTWLSDFPQAWAETGGMGLAVRQAPLIIPLKATSTPVSIKQYPMSQEARLGIKPHIQRLLDQGILVPCQSPWNTPLLPVKKPGTNDYRPVQDLREVNKRVEDIHPTVPNPYNLLSGLPPSHQWYTVLDLKDAFFCLRLHPTSQPLFAFEWRDPEMGISGQLTWTRLPQGFKNSPTLFNEALHRDLAGFRIQHPDLILLQYVDDLLLAATSELDCQQGTRALLQTLGDLGYRASAKKAQICQKQVKYLGYLLKEGQRWLTEARKETVMGQPIPKTPRQLREFLGKAGFCRLFIPGFAEMAAPLYPLTKPGTLFNWGPDQQKAFQEIKQALLTAPALGLPDLTKPFELFVDEKQGYAKGVLTQKLGPWRRPVAYLSKKLDPVAAGWPPCLRMVAAIAVLTKDAGKLTMGQPLVILAPHAVEALVKQPPDRWLSNARMTHYQALLLDTDRVQFGPVVALNPATLLPLPEEGLQHDCLDILAEAHGTRSDLMDQPLPDADHTWYTDGSSFLQEGQRKAGAAVTTETEVIWARALPAGTSAQRAELIALTQALKMAEGKKLNVYTDSRYAFATAHIHGEIYRRRGWLTSEGKEIKNKDEILALLKALFLPKRLSIIHCPGHQKGNSAEARGNRMADQAAREVATRETPETSTLLAGKRTADGSEFEKRTADGSEFESPKKKAKVE

SEQ ID NO: 2306 - protein, 2096 aa, synthetic construct
MPAAKRVKLDGGDKKYSIGLDIGTNSVGWAVITDEYKVPSKKFKVLGNTDRHSIKKNLIGALLFDSGETAEATRLKRTARRRYTRRKNRICYLQEIFSNEMAKVDDSFFHRLEESFLVEEDKKHERHPIFGNIVDEVAYHEKYPTIYHLRKKLVDSTDKADLRLIYLALAHMIKFRGHFLIEGDLNPDNSDVDKLFIQLVQTYNQLFEENPINASGVDAKAILSARLSKSRRLENLIAQLPGEKKNGLFGNLIALSLGLTPNFKSNFDLAEDAKLQLSKDTYDDDLDNLLAQIGDQYADLFLAAKNLSDAILLSDILRVNTEITKAPLSASMIKRYDEHHQDLTLLKALVRQQLPEKYKEIFFDQSKNGYAGYIDGGASQEEFYKFIKPILEKMDGTEELLVKLNREDLLRKQRTFDNGSIPHQIHLGELHAILRRQEDFYPFLKDNREKIEKILTFRIPYYVGPLARGNSRFAWMTRKSEETITPWNFEEVVDKGASAQSFIERMTNFDKNLPNEKVLPKHSLLYEYFTVYNELTKVKYVTEGMRKPAFLSGEQKKAIVDLLFKTNRKVTVKQLKEDYFKKIECFDSVEISGVEDRFNASLGTYHDLLKIIKDKDFLDNEENEDILEDIVLTLTLFEDREMIEERLKTYAHLFDDKVMKQLKRRRYTGWGRLSRKLINGIRDKQSGKTILDFLKSDGFANRNFMQLIHDDSLTFKEDIQKAQVSGQGDSLHEHIANLAGSPAIKKGILQTVKVVDELVKVMGRHKPENIVIEMARENQTTQKGQKNSRERMKRIEEGIKELGSQILKEHPVENTQLQNEKLYLYYLQNGRDMYVDQELDINRLSDYDVDHIVPQSFLKDDSIDNKVLTRSDKARGKSDNVPSEEVVKKMKNYWRQLLNAKLITQRKFDNLTKAERGGLSELDKAGFIKRQLVETRQITKHVAQILDSRMNTKYDENDKLIREVKVITLKSKLVSDFRKDFQFYKVREINNYHHAHDAYLNAVVGTALIKKYPKLESEFVYGDYKVYDVRKMIAKSEQEIGKATAKYFFYSNIMNFFKTEITLANGEIRKRPLIETNGETGEIVWDKGRDFATVRKVLSMPQVNIVKKTEVQTGGFSKESILPKRNSDKLIARKKDWDPKKYGGFDSPTVAYSVLVVAKVEKGKSKKLKSVKELLGITIMERSSFEKNPIDFLEAKGYKEVKKDLIIKLPKYSLFELENGRKRMLASAGELQKGNELALPSKYVNFLYLASHYEKLKGSPEDNEQKQLFVEQHKHYLDEIIEQISEFSKRVILADANLDKVLSAYNKHRDKPIREQAENIIHLFTLTNLGAPAAFKYFDTTIDRKRYTSTKEVLDATLIHQSITGLYETRIDLSQLGGDGGGGGEAAAKGGSGGTLNIEDEYRLHETSKEPDVSLGSTWLSDFPQAWAETGGMGLAVRQAPLIIPLKATSTPVSIKQYPMSQEARLGIKPHIQRLLDQGILVPCQSPWNTPLLPVKKPGTNDYRPVQDLREVNKRVEDIHPTVPNPYNLLSGLPPSHQWYTVLDLKDAFFCLRLHPTSQPLFAFEWRDPEMGISGQLTWTRLPQGFKNSPTLFNEALHRDLAGFRIQHPDLILLQYVDDLLLAATSELDCQQGTRALLQTLGDLGYRASAKKAQICQKQVKYLGYLLKEGQRWLTEARKETVMGQPIPKTPRQLREFLGKAGFCRLFIPGFAEMAAPLYPLTKPGTLFNWGPDQQKAFQEIKQALLTAPALGLPDLTKPFELFVDEKQGYAKGVLTQKLGPWRRPVAYLSKKLDPVAAGWPPCLRMVAAIAVLTKDAGKLTMGQPLVILAPHAVEALVKQPPDRWLSNARMTHYQALLLDTDRVQFGPVVALNPATLLPLPEEGLQHDCLDILAEAHGTRSDLMDQPLPDADHTWYTDGSSFLQEGQRKAGAAVTTETEVIWARALPAGTSAQRAELIALTQALKMAEGKKLNVYTDSRYAFATAHIHGEIYRRRGWLTSEGKEIKNKDEILALLKALFLPKRLSIIHCPGHQKGNSAEARGNRMADQAAREVATRETPETSTLLAGKRTADGSEFEKRTADGSEFESPKKKAKVE

SEQ ID NO: 2307 - protein, 2092 aa, synthetic construct
MPAAKRVKLDGGDKKYSIGLDIGTNSVGWAVITDEYKVPSKKFKVLGNTDRHSIKKNLIGALLFDSGETAEATRLKRTARRRYTRRKNRICYLQEIFSNEMAKVDDSFFHRLEESFLVEEDKKHERHPIFGNIVDEVAYHEKYPTIYHLRKKLVDSTDKADLRLIYLALAHMIKFRGHFLIEGDLNPDNSDVDKLFIQLVQTYNQLFEENPINASGVDAKAILSARLSKSRRLENLIAQLPGEKKNGLFGNLIALSLGLTPNFKSNFDLAEDAKLQLSKDTYDDDLDNLLAQIGDQYADLFLAAKNLSDAILLSDILRVNTEITKAPLSASMIKRYDEHHQDLTLLKALVRQQLPEKYKEIFFDQSKNGYAGYIDGGASQEEFYKFIKPILEKMDGTEELLVKLNREDLLRKQRTFDNGSIPHQIHLGELHAILRRQEDFYPFLKDNREKIEKILTFRIPYYVGPLARGNSRFAWMTRKSEETITPWNFEEVVDKGASAQSFIERMTNFDKNLPNEKVLPKHSLLYEYFTVYNELTKVKYVTEGMRKPAFLSGEQKKAIVDLLFKTNRKVTVKQLKEDYFKKIECFDSVEISGVEDRFNASLGTYHDLLKIIKDKDFLDNEENEDILEDIVLTLTLFEDREMIEERLKTYAHLFDDKVMKQLKRRRYTGWGRLSRKLINGIRDKQSGKTILDFLKSDGFANRNFMQLIHDDSLTFKEDIQKAQVSGQGDSLHEHIANLAGSPAIKKGILQTVKVVDELVKVMGRHKPENIVIEMARENQTTQKGQKNSRERMKRIEEGIKELGSQILKEHPVENTQLQNEKLYLYYLQNGRDMYVDQELDINRLSDYDVDHIVPQSFLKDDSIDNKVLTRSDKARGKSDNVPSEEVVKKMKNYWRQLLNAKLITQRKFDNLTKAERGGLSELDKAGFIKRQLVETRQITKHVAQILDSRMNTKYDENDKLIREVKVITLKSKLVSDFRKDFQFYKVREINNYHHAHDAYLNAVVGTALIKKYPKLESEFVYGDYKVYDVRKMIAKSEQEIGKATAKYFFYSNIMNFFKTEITLANGEIRKRPLIETNGETGEIVWDKGRDFATVRKVLSMPQVNIVKKTEVQTGGFSKESILPKRNSDKLIARKKDWDPKKYGGFDSPTVAYSVLVVAKVEKGKSKKLKSVKELLGITIMERSSFEKNPIDFLEAKGYKEVKKDLIIKLPKYSLFELENGRKRMLASAGELQKGNELALPSKYVNFLYLASHYEKLKGSPEDNEQKQLFVEQHKHYLDEIIEQISEFSKRVILADANLDKVLSAYNKHRDKPIREQAENIIHLFTLTNLGAPAAFKYFDTTIDRKRYTSTKEVLDATLIHQSITGLYETRIDLSQLGGDGGGGGGGGGGGTLNIEDEYRLHETSKEPDVSLGSTWLSDFPQAWAETGGMGLAVRQAPLIIPLKATSTPVSIKQYPMSQEARLGIKPHIQRLLDQGILVPCQSPWNTPLLPVKKPGTNDYRPVQDLREVNKRVEDIHPTVPNPYNLLSGLPPSHQWYTVLDLKDAFFCLRLHPTSQPLFAFEWRDPEMGISGQLTWTRLPQGFKNSPTLFNEALHRDLAGFRIQHPDLILLQYVDDLLLAATSELDCQQGTRALLQTLGDLGYRASAKKAQICQKQVKYLGYLLKEGQRWLTEARKETVMGQPIPKTPRQLREFLGKAGFCRLFIPGFAEMAAPLYPLTKPGTLFNWGPDQQKAFQEIKQALLTAPALGLPDLTKPFELFVDEKQGYAKGVLTQKLGPWRRPVAYLSKKLDPVAAGWPPCLRMVAAIAVLTKDAGKLTMGQPLVILAPHAVEALVKQPPDRWLSNARMTHYQALLLDTDRVQFGPVVALNPATLLPLPEEGLQHDCLDILAEAHGTRSDLMDQPLPDADHTWYTDGSSFLQEGQRKAGAAVTTETEVIWARALPAGTSAQRAELIALTQALKMAEGKKLNVYTDSRYAFATAHIHGEIYRRRGWLTSEGKEIKNKDEILALLKALFLPKRLSIIHCPGHQKGNSAEARGNRMADQAAREVATRETPETSTLLAGKRTADGSEFEKRTADGSEFESPKKKAKVE

SEQ ID NO: 2308 - protein, 2094 aa, synthetic construct
MPAAKRVKLDGGDKKYSIGLDIGTNSVGWAVITDEYKVPSKKFKVLGNTDRHSIKKNLIGALLFDSGETAEATRLKRTARRRYTRRKNRICYLQEIFSNEMAKVDDSFFHRLEESFLVEEDKKHERHPIFGNIVDEVAYHEKYPTIYHLRKKLVDSTDKADLRLIYLALAHMIKFRGHFLIEGDLNPDNSDVDKLFIQLVQTYNQLFEENPINASGVDAKAILSARLSKSRRLENLIAQLPGEKKNGLFGNLIALSLGLTPNFKSNFDLAEDAKLQLSKDTYDDDLDNLLAQIGDQYADLFLAAKNLSDAILLSDILRVNTEITKAPLSASMIKRYDEHHQDLTLLKALVRQQLPEKYKEIFFDQSKNGYAGYIDGGASQEEFYKFIKPILEKMDGTEELLVKLNREDLLRKQRTFDNGSIPHQIHLGELHAILRRQEDFYPFLKDNREKIEKILTFRIPYYVGPLARGNSRFAWMTRKSEETITPWNFEEVVDKGASAQSFIERMTNFDKNLPNEKVLPKHSLLYEYFTVYNELTKVKYVTEGMRKPAFLSGEQKKAIVDLLFKTNRKVTVKQLKEDYFKKIECFDSVEISGVEDRFNASLGTYHDLLKIIKDKDFLDNEENEDILEDIVLTLTLFEDREMIEERLKTYAHLFDDKVMKQLKRRRYTGWGRLSRKLINGIRDKQSGKTILDFLKSDGFANRNFMQLIHDDSLTFKEDIQKAQVSGQGDSLHEHIANLAGSPAIKKGILQTVKVVDELVKVMGRHKPENIVIEMARENQTTQKGQKNSRERMKRIEEGIKELGSQILKEHPVENTQLQNEKLYLYYLQNGRDMYVDQELDINRLSDYDVDHIVPQSFLKDDSIDNKVLTRSDKARGKSDNVPSEEVVKKMKNYWRQLLNAKLITQRKFDNLTKAERGGLSELDKAGFIKRQLVETRQITKHVAQILDSRMNTKYDENDKLIREVKVITLKSKLVSDFRKDFQFYKVREINNYHHAHDAYLNAVVGTALIKKYPKLESEFVYGDYKVYDVRKMIAKSEQEIGKATAKYFFYSNIMNFFKTEITLANGEIRKRPLIETNGETGEIVWDKGRDFATVRKVLSMPQVNIVKKTEVQTGGFSKESILPKRNSDKLIARKKDWDPKKYGGFDSPTVAYSVLVVAKVEKGKSKKLKSVKELLGITIMERSSFEKNPIDFLEAKGYKEVKKDLIIKLPKYSLFELENGRKRMLASAGELQKGNELALPSKYVNFLYLASHYEKLKGSPEDNEQKQLFVEQHKHYLDEIIEQISEFSKRVILADANLDKVLSAYNKHRDKPIREQAENIIHLFTLTNLGAPAAFKYFDTTIDRKRYTSTKEVLDATLIHQSITGLYETRIDLSQLGGDGGPAPGGGGSSGGTLNIEDEYRLHETSKEPDVSLGSTWLSDFPQAWAETGGMGLAVRQAPLIIPLKATSTPVSIKQYPMSQEARLGIKPHIQRLLDQGILVPCQSPWNTPLLPVKKPGTNDYRPVQDLREVNKRVEDIHPTVPNPYNLLSGLPPSHQWYTVLDLKDAFFCLRLHPTSQPLFAFEWRDPEMGISGQLTWTRLPQGFKNSPTLFNEALHRDLAGFRIQHPDLILLQYVDDLLLAATSELDCQQGTRALLQTLGDLGYRASAKKAQICQKQVKYLGYLLKEGQRWLTEARKETVMGQPIPKTPRQLREFLGKAGFCRLFIPGFAEMAAPLYPLTKPGTLFNWGPDQQKAFQEIKQALLTAPALGLPDLTKPFELFVDEKQGYAKGVLTQKLGPWRRPVAYLSKKLDPVAAGWPPCLRMVAAIAVLTKDAGKLTMGQPLVILAPHAVEALVKQPPDRWLSNARMTHYQALLLDTDRVQFGPVVALNPATLLPLPEEGLQHDCLDILAEAHGTRSDLMDQPLPDADHTWYTDGSSFLQEGQRKAGAAVTTETEVIWARALPAGTSAQRAELIALTQALKMAEGKKLNVYTDSRYAFATAHIHGEIYRRRGWLTSEGKEIKNKDEILALLKALFLPKRLSIIHCPGHQKGNSAEARGNRMADQAAREVATRETPETSTLLAGKRTADGSEFEKRTADGSEFESPKKKAKVE

SEQ ID NO: 2309 - protein, 2098 aa, synthetic construct
MPAAKRVKLDGGDKKYSIGLDIGTNSVGWAVITDEYKVPSKKFKVLGNTDRHSIKKNLIGALLFDSGETAEATRLKRTARRRYTRRKNRICYLQEIFSNEMAKVDDSFFHRLEESFLVEEDKKHERHPIFGNIVDEVAYHEKYPTIYHLRKKLVDSTDKADLRLIYLALAHMIKFRGHFLIEGDLNPDNSDVDKLFIQLVQTYNQLFEENPINASGVDAKAILSARLSKSRRLENLIAQLPGEKKNGLFGNLIALSLGLTPNFKSNFDLAEDAKLQLSKDTYDDDLDNLLAQIGDQYADLFLAAKNLSDAILLSDILRVNTEITKAPLSASMIKRYDEHHQDLTLLKALVRQQLPEKYKEIFFDQSKNGYAGYIDGGASQEEFYKFIKPILEKMDGTEELLVKLNREDLLRKQRTFDNGSIPHQIHLGELHAILRRQEDFYPFLKDNREKIEKILTFRIPYYVGPLARGNSRFAWMTRKSEETITPWNFEEVVDKGASAQSFIERMTNFDKNLPNEKVLPKHSLLYEYFTVYNELTKVKYVTEGMRKPAFLSGEQKKAIVDLLFKTNRKVTVKQLKEDYFKKIECFDSVEISGVEDRFNASLGTYHDLLKIIKDKDFLDNEENEDILEDIVLTLTLFEDREMIEERLKTYAHLFDDKVMKQLKRRRYTGWGRLSRKLINGIRDKQSGKTILDFLKSDGFANRNFMQLIHDDSLTFKEDIQKAQVSGQGDSLHEHIANLAGSPAIKKGILQTVKVVDELVKVMGRHKPENIVIEMARENQTTQKGQKNSRERMKRIEEGIKELGSQILKEHPVENTQLQNEKLYLYYLQNGRDMYVDQELDINRLSDYDVDHIVPQSFLKDDSIDNKVLTRSDKARGKSDNVPSEEVVKKMKNYWRQLLNAKLITQRKFDNLTKAERGGLSELDKAGFIKRQLVETRQITKHVAQILDSRMNTKYDENDKLIREVKVITLKSKLVSDFRKDFQFYKVREINNYHHAHDAYLNAVVGTALIKKYPKLESEFVYGDYKVYDVRKMIAKSEQEIGKATAKYFFYSNIMNFFKTEITLANGEIRKRPLIETNGETGEIVWDKGRDFATVRKVLSMPQVNIVKKTEVQTGGFSKESILPKRNSDKLIARKKDWDPKKYGGFDSPTVAYSVLVVAKVEKGKSKKLKSVKELLGITIMERSSFEKNPIDFLEAKGYKEVKKDLIIKLPKYSLFELENGRKRMLASAGELQKGNELALPSKYVNFLYLASHYEKLKGSPEDNEQKQLFVEQHKHYLDEIIEQISEFSKRVILADANLDKVLSAYNKHRDKPIREQAENIIHLFTLTNLGAPAAFKYFDTTIDRKRYTSTKEVLDATLIHQSITGLYETRIDLSQLGGDGGPAPAPAPAPAPAPGGTLNIEDEYRLHETSKEPDVSLGSTWLSDFPQAWAETGGMGLAVRQAPLIIPLKATSTPVSIKQYPMSQEARLGIKPHIQRLLDQGILVPCQSPWNTPLLPVKKPGTNDYRPVQDLREVNKRVEDIHPTVPNPYNLLSGLPPSHQWYTVLDLKDAFFCLRLHPTSQPLFAFEWRDPEMGISGQLTWTRLPQGFKNSPTLFNEALHRDLAGFRIQHPDLILLQYVDDLLLAATSELDCQQGTRALLQTLGDLGYRASAKKAQICQKQVKYLGYLLKEGQRWLTEARKETVMGQPIPKTPRQLREFLGKAGFCRLFIPGFAEMAAPLYPLTKPGTLFNWGPDQQKAFQEIKQALLTAPALGLPDLTKPFELFVDEKQGYAKGVLTQKLGPWRRPVAYLSKKLDPVAAGWPPCLRMVAAIAVLTKDAGKLTMGQPLVILAPHAVEALVKQPPDRWLSNARMTHYQALLLDTDRVQFGPVVALNPATLLPLPEEGLQHDCLDILAEAHGTRSDLMDQPLPDADHTWYTDGSSFLQEGQRKAGAAVTTETEVIWARALPAGTSAQRAELIALTQALKMAEGKKLNVYTDSRYAFATAHIHGEIYRRRGWLTSEGKEIKNKDEILALLKALFLPKRLSIIHCPGHQKGNSAEARGNRMADQAAREVATRETPETSTLLAGKRTADGSEFEKRTADGSEFESPKKKAKVE

SEQ ID NO: 2310 - protein, 2100 aa, synthetic construct
MPAAKRVKLDGGDKKYSIGLDIGTNSVGWAVITDEYKVPSKKFKVLGNTDRHSIKKNLIGALLFDSGETAEATRLKRTARRRYTRRKNRICYLQEIFSNEMAKVDDSFFHRLEESFLVEEDKKHERHPIFGNIVDEVAYHEKYPTIYHLRKKLVDSTDKADLRLIYLALAHMIKFRGHFLIEGDLNPDNSDVDKLFIQLVQTYNQLFEENPINASGVDAKAILSARLSKSRRLENLIAQLPGEKKNGLFGNLIALSLGLTPNFKSNFDLAEDAKLQLSKDTYDDDLDNLLAQIGDQYADLFLAAKNLSDAILLSDILRVNTEITKAPLSASMIKRYDEHHQDLTLLKALVRQQLPEKYKEIFFDQSKNGYAGYIDGGASQEEFYKFIKPILEKMDGTEELLVKLNREDLLRKQRTFDNGSIPHQIHLGELHAILRRQEDFYPFLKDNREKIEKILTFRIPYYVGPLARGNSRFAWMTRKSEETITPWNFEEVVDKGASAQSFIERMTNFDKNLPNEKVLPKHSLLYEYFTVYNELTKVKYVTEGMRKPAFLSGEQKKAIVDLLFKTNRKVTVKQLKEDYFKKIECFDSVEISGVEDRFNASLGTYHDLLKIIKDKDFLDNEENEDILEDIVLTLTLFEDREMIEERLKTYAHLFDDKVMKQLKRRRYTGWGRLSRKLINGIRDKQSGKTILDFLKSDGFANRNFMQLIHDDSLTFKEDIQKAQVSGQGDSLHEHIANLAGSPAIKKGILQTVKVVDELVKVMGRHKPENIVIEMARENQTTQKGQKNSRERMKRIEEGIKELGSQILKEHPVENTQLQNEKLYLYYLQNGRDMYVDQELDINRLSDYDVDHIVPQSFLKDDSIDNKVLTRSDKARGKSDNVPSEEVVKKMKNYWRQLLNAKLITQRKFDNLTKAERGGLSELDKAGFIKRQLVETRQITKHVAQILDSRMNTKYDENDKLIREVKVITLKSKLVSDFRKDFQFYKVREINNYHHAHDAYLNAVVGTALIKKYPKLESEFVYGDYKVYDVRKMIAKSEQEIGKATAKYFFYSNIMNFFKTEITLANGEIRKRPLIETNGETGEIVWDKGRDFATVRKVLSMPQVNIVKKTEVQTGGFSKESILPKRNSDKLIARKKDWDPKKYGGFDSPTVAYSVLVVAKVEKGKSKKLKSVKELLGITIMERSSFEKNPIDFLEAKGYKEVKKDLIIKLPKYSLFELENGRKRMLASAGELQKGNELALPSKYVNFLYLASHYEKLKGSPEDNEQKQLFVEQHKHYLDEIIEQISEFSKRVILADANLDKVLSAYNKHRDKPIREQAENIIHLFTLTNLGAPAAFKYFDTTIDRKRYTSTKEVLDATLIHQSITGLYETRIDLSQLGGDGGGGSGGSGGSGGSGGSGGTLNIEDEYRLHETSKEPDVSLGSTWLSDFPQAWAETGGMGLAVRQAPLIIPLKATSTPVSIKQYPMSQEARLGIKPHIQRLLDQGILVPCQSPWNTPLLPVKKPGTNDYRPVQDLREVNKRVEDIHPTVPNPYNLLSGLPPSHQWYTVLDLKDAFFCLRLHPTSQPLFAFEWRDPEMGISGQLTWTRLPQGFKNSPTLFNEALHRDLAGFRIQHPDLILLQYVDDLLLAATSELDCQQGTRALLQTLGDLGYRASAKKAQICQKQVKYLGYLLKEGQRWLTEARKETVMGQPIPKTPRQLREFLGKAGFCRLFIPGFAEMAAPLYPLTKPGTLFNWGPDQQKAFQEIKQALLTAPALGLPDLTKPFELFVDEKQGYAKGVLTQKLGPWRRPVAYLSKKLDPVAAGWPPCLRMVAAIAVLTKDAGKLTMGQPLVILAPHAVEALVKQPPDRWLSNARMTHYQALLLDTDRVQFGPVVALNPATLLPLPEEGLQHDCLDILAEAHGTRSDLMDQPLPDADHTWYTDGSSFLQEGQRKAGAAVTTETEVIWARALPAGTSAQRAELIALTQALKMAEGKKLNVYTDSRYAFATAHIHGEIYRRRGWLTSEGKEIKNKDEILALLKALFLPKRLSIIHCPGHQKGNSAEARGNRMADQAAREVATRETPETSTLLAGKRTADGSEFEKRTADGSEFESPKKKAKVE

SEQ ID NO: 2311 - protein, 2105 aa, synthetic construct
MPAAKRVKLDGGDKKYSIGLDIGTNSVGWAVITDEYKVPSKKFKVLGNTDRHSIKKNLIGALLFDSGETAEATRLKRTARRRYTRRKNRICYLQEIFSNEMAKVDDSFFHRLEESFLVEEDKKHERHPIFGNIVDEVAYHEKYPTIYHLRKKLVDSTDKADLRLIYLALAHMIKFRGHFLIEGDLNPDNSDVDKLFIQLVQTYNQLFEENPINASGVDAKAILSARLSKSRRLENLIAQLPGEKKNGLFGNLIALSLGLTPNFKSNFDLAEDAKLQLSKDTYDDDLDNLLAQIGDQYADLFLAAKNLSDAILLSDILRVNTEITKAPLSASMIKRYDEHHQDLTLLKALVRQQLPEKYKEIFFDQSKNGYAGYIDGGASQEEFYKFIKPILEKMDGTEELLVKLNREDLLRKQRTFDNGSIPHQIHLGELHAILRRQEDFYPFLKDNREKIEKILTFRIPYYVGPLARGNSRFAWMTRKSEETITPWNFEEVVDKGASAQSFIERMTNFDKNLPNEKVLPKHSLLYEYFTVYNELTKVKYVTEGMRKPAFLSGEQKKAIVDLLFKTNRKVTVKQLKEDYFKKIECFDSVEISGVEDRFNASLGTYHDLLKIIKDKDFLDNEENEDILEDIVLTLTLFEDREMIEERLKTYAHLFDDKVMKQLKRRRYTGWGRLSRKLINGIRDKQSGKTILDFLKSDGFANRNFMQLIHDDSLTFKEDIQKAQVSGQGDSLHEHIANLAGSPAIKKGILQTVKVVDELVKVMGRHKPENIVIEMARENQTTQKGQKNSRERMKRIEEGIKELGSQILKEHPVENTQLQNEKLYLYYLQNGRDMYVDQELDINRLSDYDVDHIVPQSFLKDDSIDNKVLTRSDKARGKSDNVPSEEVVKKMKNYWRQLLNAKLITQRKFDNLTKAERGGLSELDKAGFIKRQLVETRQITKHVAQILDSRMNTKYDENDKLIREVKVITLKSKLVSDFRKDFQFYKVREINNYHHAHDAYLNAVVGTALIKKYPKLESEFVYGDYKVYDVRKMIAKSEQEIGKATAKYFFYSNIMNFFKTEITLANGEIRKRPLIETNGETGEIVWDKGRDFATVRKVLSMPQVNIVKKTEVQTGGFSKESILPKRNSDKLIARKKDWDPKKYGGFDSPTVAYSVLVVAKVEKGKSKKLKSVKELLGITIMERSSFEKNPIDFLEAKGYKEVKKDLIIKLPKYSLFELENGRKRMLASAGELQKGNELALPSKYVNFLYLASHYEKLKGSPEDNEQKQLFVEQHKHYLDEIIEQISEFSKRVILADANLDKVLSAYNKHRDKPIREQAENIIHLFTLTNLGAPAAFKYFDTTIDRKRYTSTKEVLDATLIHQSITGLYETRIDLSQLGGDGGGGGGSGGGGSGGGGSGGGGSGGTLNIEDEYRLHETSKEPDVSLGSTWLSDFPQAWAETGGMGLAVRQAPLIIPLKATSTPVSIKQYPMSQEARLGIKPHIQRLLDQGILVPCQSPWNTPLLPVKKPGTNDYRPVQDLREVNKRVEDIHPTVPNPYNLLSGLPPSHQWYTVLDLKDAFFCLRLHPTSQPLFAFEWRDPEMGISGQLTWTRLPQGFKNSPTLFNEALHRDLAGFRIQHPDLILLQYVDDLLLAATSELDCQQGTRALLQTLGDLGYRASAKKAQICQKQVKYLGYLLKEGQRWLTEARKETVMGQPIPKTPRQLREFLGKAGFCRLFIPGFAEMAAPLYPLTKPGTLFNWGPDQQKAFQEIKQALLTAPALGLPDLTKPFELFVDEKQGYAKGVLTQKLGPWRRPVAYLSKKLDPVAAGWPPCLRMVAAIAVLTKDAGKLTMGQPLVILAPHAVEALVKQPPDRWLSNARMTHYQALLLDTDRVQFGPVVALNPATLLPLPEEGLQHDCLDILAEAHGTRSDLMDQPLPDADHTWYTDGSSFLQEGQRKAGAAVTTETEVIWARALPAGTSAQRAELIALTQALKMAEGKKLNVYTDSRYAFATAHIHGEIYRRRGWLTSEGKEIKNKDEILALLKALFLPKRLSIIHCPGHQKGNSAEARGNRMADQAAREVATRETPETSTLLAGKRTADGSEFEKRTADGSEFESPKKKAKVE

SEQ ID NO: 2312 - protein, 2094 aa, synthetic construct
MPAAKRVKLDGGDKKYSIGLDIGTNSVGWAVITDEYKVPSKKFKVLGNTDRHSIKKNLIGALLFDSGETAEATRLKRTARRRYTRRKNRICYLQEIFSNEMAKVDDSFFHRLEESFLVEEDKKHERHPIFGNIVDEVAYHEKYPTIYHLRKKLVDSTDKADLRLIYLALAHMIKFRGHFLIEGDLNPDNSDVDKLFIQLVQTYNQLFEENPINASGVDAKAILSARLSKSRRLENLIAQLPGEKKNGLFGNLIALSLGLTPNFKSNFDLAEDAKLQLSKDTYDDDLDNLLAQIGDQYADLFLAAKNLSDAILLSDILRVNTEITKAPLSASMIKRYDEHHQDLTLLKALVRQQLPEKYKEIFFDQSKNGYAGYIDGGASQEEFYKFIKPILEKMDGTEELLVKLNREDLLRKQRTFDNGSIPHQIHLGELHAILRRQEDFYPFLKDNREKIEKILTFRIPYYVGPLARGNSRFAWMTRKSEETITPWNFEEVVDKGASAQSFIERMTNFDKNLPNEKVLPKHSLLYEYFTVYNELTKVKYVTEGMRKPAFLSGEQKKAIVDLLFKTNRKVTVKQLKEDYFKKIECFDSVEISGVEDRFNASLGTYHDLLKIIKDKDFLDNEENEDILEDIVLTLTLFEDREMIEERLKTYAHLFDDKVMKQLKRRRYTGWGRLSRKLINGIRDKQSGKTILDFLKSDGFANRNFMQLIHDDSLTFKEDIQKAQVSGQGDSLHEHIANLAGSPAIKKGILQTVKVVDELVKVMGRHKPENIVIEMARENQTTQKGQKNSRERMKRIEEGIKELGSQILKEHPVENTQLQNEKLYLYYLQNGRDMYVDQELDINRLSDYDVDHIVPQSFLKDDSIDNKVLTRSDKARGKSDNVPSEEVVKKMKNYWRQLLNAKLITQRKFDNLTKAERGGLSELDKAGFIKRQLVETRQITKHVAQILDSRMNTKYDENDKLIREVKVITLKSKLVSDFRKDFQFYKVREINNYHHAHDAYLNAVVGTALIKKYPKLESEFVYGDYKVYDVRKMIAKSEQEIGKATAKYFFYSNIMNFFKTEITLANGEIRKRPLIETNGETGEIVWDKGRDFATVRKVLSMPQVNIVKKTEVQTGGFSKESILPKRNSDKLIARKKDWDPKKYGGFDSPTVAYSVLVVAKVEKGKSKKLKSVKELLGITIMERSSFEKNPIDFLEAKGYKEVKKDLIIKLPKYSLFELENGRKRMLASAGELQKGNELALPSKYVNFLYLASHYEKLKGSPEDNEQKQLFVEQHKHYLDEIIEQISEFSKRVILADANLDKVLSAYNKHRDKPIREQAENIIHLFTLTNLGAPAAFKYFDTTIDRKRYTSTKEVLDATLIHQSITGLYETRIDLSQLGGDGGGGGGGSGSSGGTLNIEDEYRLHETSKEPDVSLGSTWLSDFPQAWAETGGMGLAVRQAPLIIPLKATSTPVSIKQYPMSQEARLGIKPHIQRLLDQGILVPCQSPWNTPLLPVKKPGTNDYRPVQDLREVNKRVEDIHPTVPNPYNLLSGLPPSHQWYTVLDLKDAFFCLRLHPTSQPLFAFEWRDPEMGISGQLTWTRLPQGFKNSPTLFNEALHRDLAGFRIQHPDLILLQYVDDLLLAATSELDCQQGTRALLQTLGDLGYRASAKKAQICQKQVKYLGYLLKEGQRWLTEARKETVMGQPIPKTPRQLREFLGKAGFCRLFIPGFAEMAAPLYPLTKPGTLFNWGPDQQKAFQEIKQALLTAPALGLPDLTKPFELFVDEKQGYAKGVLTQKLGPWRRPVAYLSKKLDPVAAGWPPCLRMVAAIAVLTKDAGKLTMGQPLVILAPHAVEALVKQPPDRWLSNARMTHYQALLLDTDRVQFGPVVALNPATLLPLPEEGLQHDCLDILAEAHGTRSDLMDQPLPDADHTWYTDGSSFLQEGQRKAGAAVTTETEVIWARALPAGTSAQRAELIALTQALKMAEGKKLNVYTDSRYAFATAHIHGEIYRRRGWLTSEGKEIKNKDEILALLKALFLPKRLSIIHCPGHQKGNSAEARGNRMADQAAREVATRETPETSTLLAGKRTADGSEFEKRTADGSEFESPKKKAKVE

SEQ ID NO: 2313 - protein, 2097 aa, synthetic construct
MPAAKRVKLDGGDKKYSIGLDIGTNSVGWAVITDEYKVPSKKFKVLGNTDRHSIKKNLIGALLFDSGETAEATRLKRTARRRYTRRKNRICYLQEIFSNEMAKVDDSFFHRLEESFLVEEDKKHERHPIFGNIVDEVAYHEKYPTIYHLRKKLVDSTDKADLRLIYLALAHMIKFRGHFLIEGDLNPDNSDVDKLFIQLVQTYNQLFEENPINASGVDAKAILSARLSKSRRLENLIAQLPGEKKNGLFGNLIALSLGLTPNFKSNFDLAEDAKLQLSKDTYDDDLDNLLAQIGDQYADLFLAAKNLSDAILLSDILRVNTEITKAPLSASMIKRYDEHHQDLTLLKALVRQQLPEKYKEIFFDQSKNGYAGYIDGGASQEEFYKFIKPILEKMDGTEELLVKLNREDLLRKQRTFDNGSIPHQIHLGELHAILRRQEDFYPFLKDNREKIEKILTFRIPYYVGPLARGNSRFAWMTRKSEETITPWNFEEVVDKGASAQSFIERMTNFDKNLPNEKVLPKHSLLYEYFTVYNELTKVKYVTEGMRKPAFLSGEQKKAIVDLLFKTNRKVTVKQLKEDYFKKIECFDSVEISGVEDRFNASLGTYHDLLKIIKDKDFLDNEENEDILEDIVLTLTLFEDREMIEERLKTYAHLFDDKVMKQLKRRRYTGWGRLSRKLINGIRDKQSGKTILDFLKSDGFANRNFMQLIHDDSLTFKEDIQKAQVSGQGDSLHEHIANLAGSPAIKKGILQTVKVVDELVKVMGRHKPENIVIEMARENQTTQKGQKNSRERMKRIEEGIKELGSQILKEHPVENTQLQNEKLYLYYLQNGRDMYVDQELDINRLSDYDVDHIVPQSFLKDDSIDNKVLTRSDKARGKSDNVPSEEVVKKMKNYWRQLLNAKLITQRKFDNLTKAERGGLSELDKAGFIKRQLVETRQITKHVAQILDSRMNTKYDENDKLIREVKVITLKSKLVSDFRKDFQFYKVREINNYHHAHDAYLNAVVGTALIKKYPKLESEFVYGDYKVYDVRKMIAKSEQEIGKATAKYFFYSNIMNFFKTEITLANGEIRKRPLIETNGETGEIVWDKGRDFATVRKVLSMPQVNIVKKTEVQTGGFSKESILPKRNSDKLIARKKDWDPKKYGGFDSPTVAYSVLVVAKVEKGKSKKLKSVKELLGITIMERSSFEKNPIDFLEAKGYKEVKKDLIIKLPKYSLFELENGRKRMLASAGELQKGNELALPSKYVNFLYLASHYEKLKGSPEDNEQKQLFVEQHKHYLDEIIEQISEFSKRVILADANLDKVLSAYNKHRDKPIREQAENIIHLFTLTNLGAPAAFKYFDTTIDRKRYTSTKEVLDATLIHQSITGLYETRIDLSQLGGDGGGSAGSAAGSGEFGGTLNIEDEYRLHETSKEPDVSLGSTWLSDFPQAWAETGGMGLAVRQAPLIIPLKATSTPVSIKQYPMSQEARLGIKPHIQRLLDQGILVPCQSPWNTPLLPVKKPGTNDYRPVQDLREVNKRVEDIHPTVPNPYNLLSGLPPSHQWYTVLDLKDAFFCLRLHPTSQPLFAFEWRDPEMGISGQLTWTRLPQGFKNSPTLFNEALHRDLAGFRIQHPDLILLQYVDDLLLAATSELDCQQGTRALLQTLGDLGYRASAKKAQICQKQVKYLGYLLKEGQRWLTEARKETVMGQPIPKTPRQLREFLGKAGFCRLFIPGFAEMAAPLYPLTKPGTLFNWGPDQQKAFQEIKQALLTAPALGLPDLTKPFELFVDEKQGYAKGVLTQKLGPWRRPVAYLSKKLDPVAAGWPPCLRMVAAIAVLTKDAGKLTMGQPLVILAPHAVEALVKQPPDRWLSNARMTHYQALLLDTDRVQFGPVVALNPATLLPLPEEGLQHDCLDILAEAHGTRSDLMDQPLPDADHTWYTDGSSFLQEGQRKAGAAVTTETEVIWARALPAGTSAQRAELIALTQALKMAEGKKLNVYTDSRYAFATAHIHGEIYRRRGWLTSEGKEIKNKDEILALLKALFLPKRLSIIHCPGHQKGNSAEARGNRMADQAAREVATRETPETSTLLAGKRTADGSEFEKRTADGSEFESPKKKAKVE

SEQ ID NO: 2314 - protein, 2096 aa, synthetic construct
MPAAKRVKLDGGDKKYSIGLDIGTNSVGWAVITDEYKVPSKKFKVLGNTDRHSIKKNLIGALLFDSGETAEATRLKRTARRRYTRRKNRICYLQEIFSNEMAKVDDSFFHRLEESFLVEEDKKHERHPIFGNIVDEVAYHEKYPTIYHLRKKLVDSTDKADLRLIYLALAHMIKFRGHFLIEGDLNPDNSDVDKLFIQLVQTYNQLFEENPINASGVDAKAILSARLSKSRRLENLIAQLPGEKKNGLFGNLIALSLGLTPNFKSNFDLAEDAKLQLSKDTYDDDLDNLLAQIGDQYADLFLAAKNLSDAILLSDILRVNTEITKAPLSASMIKRYDEHHQDLTLLKALVRQQLPEKYKEIFFDQSKNGYAGYIDGGASQEEFYKFIKPILEKMDGTEELLVKLNREDLLRKQRTFDNGSIPHQIHLGELHAILRRQEDFYPFLKDNREKIEKILTFRIPYYVGPLARGNSRFAWMTRKSEETITPWNFEEVVDKGASAQSFIERMTNFDKNLPNEKVLPKHSLLYEYFTVYNELTKVKYVTEGMRKPAFLSGEQKKAIVDLLFKTNRKVTVKQLKEDYFKKIECFDSVEISGVEDRFNASLGTYHDLLKIIKDKDFLDNEENEDILEDIVLTLTLFEDREMIEERLKTYAHLFDDKVMKQLKRRRYTGWGRLSRKLINGIRDKQSGKTILDFLKSDGFANRNFMQLIHDDSLTFKEDIQKAQVSGQGDSLHEHIANLAGSPAIKKGILQTVKVVDELVKVMGRHKPENIVIEMARENQTTQKGQKNSRERMKRIEEGIKELGSQILKEHPVENTQLQNEKLYLYYLQNGRDMYVDQELDINRLSDYDVDHIVPQSFLKDDSIDNKVLTRSDKARGKSDNVPSEEVVKKMKNYWRQLLNAKLITQRKFDNLTKAERGGLSELDKAGFIKRQLVETRQITKHVAQILDSRMNTKYDENDKLIREVKVITLKSKLVSDFRKDFQFYKVREINNYHHAHDAYLNAVVGTALIKKYPKLESEFVYGDYKVYDVRKMIAKSEQEIGKATAKYFFYSNIMNFFKTEITLANGEIRKRPLIETNGETGEIVWDKGRDFATVRKVLSMPQVNIVKKTEVQTGGFSKESILPKRNSDKLIARKKDWDPKKYGGFDSPTVAYSVLVVAKVEKGKSKKLKSVKELLGITIMERSSFEKNPIDFLEAKGYKEVKKDLIIKLPKYSLFELENGRKRMLASAGELQKGNELALPSKYVNFLYLASHYEKLKGSPEDNEQKQLFVEQHKHYLDEIIEQISEFSKRVILADANLDKVLSAYNKHRDKPIREQAENIIHLFTLTNLGAPAAFKYFDTTIDRKRYTSTKEVLDATLIHQSITGLYETRIDLSQLGGDGGPAPEAAAKGGSGGTLNIEDEYRLHETSKEPDVSLGSTWLSDFPQAWAETGGMGLAVRQAPLIIPLKATSTPVSIKQYPMSQEARLGIKPHIQRLLDQGILVPCQSPWNTPLLPVKKPGTNDYRPVQDLREVNKRVEDIHPTVPNPYNLLSGLPPSHQWYTVLDLKDAFFCLRLHPTSQPLFAFEWRDPEMGISGQLTWTRLPQGFKNSPTLFNEALHRDLAGFRIQHPDLILLQYVDDLLLAATSELDCQQGTRALLQTLGDLGYRASAKKAQICQKQVKYLGYLLKEGQRWLTEARKETVMGQPIPKTPRQLREFLGKAGFCRLFIPGFAEMAAPLYPLTKPGTLFNWGPDQQKAFQEIKQALLTAPALGLPDLTKPFELFVDEKQGYAKGVLTQKLGPWRRPVAYLSKKLDPVAAGWPPCLRMVAAIAVLTKDAGKLTMGQPLVILAPHAVEALVKQPPDRWLSNARMTHYQALLLDTDRVQFGPVVALNPATLLPLPEEGLQHDCLDILAEAHGTRSDLMDQPLPDADHTWYTDGSSFLQEGQRKAGAAVTTETEVIWARALPAGTSAQRAELIALTQALKMAEGKKLNVYTDSRYAFATAHIHGEIYRRRGWLTSEGKEIKNKDEILALLKALFLPKRLSIIHCPGHQKGNSAEARGNRMADQAAREVATRETPETSTLLAGKRTADGSEFEKRTADGSEFESPKKKAKVE

SEQ ID NO: 2315 - protein, 2096 aa, synthetic construct
MPAAKRVKLDGGDKKYSIGLDIGTNSVGWAVITDEYKVPSKKFKVLGNTDRHSIKKNLIGALLFDSGETAEATRLKRTARRRYTRRKNRICYLQEIFSNEMAKVDDSFFHRLEESFLVEEDKKHERHPIFGNIVDEVAYHEKYPTIYHLRKKLVDSTDKADLRLIYLALAHMIKFRGHFLIEGDLNPDNSDVDKLFIQLVQTYNQLFEENPINASGVDAKAILSARLSKSRRLENLIAQLPGEKKNGLFGNLIALSLGLTPNFKSNFDLAEDAKLQLSKDTYDDDLDNLLAQIGDQYADLFLAAKNLSDAILLSDILRVNTEITKAPLSASMIKRYDEHHQDLTLLKALVRQQLPEKYKEIFFDQSKNGYAGYIDGGASQEEFYKFIKPILEKMDGTEELLVKLNREDLLRKQRTFDNGSIPHQIHLGELHAILRRQEDFYPFLKDNREKIEKILTFRIPYYVGPLARGNSRFAWMTRKSEETITPWNFEEVVDKGASAQSFIERMTNFDKNLPNEKVLPKHSLLYEYFTVYNELTKVKYVTEGMRKPAFLSGEQKKAIVDLLFKTNRKVTVKQLKEDYFKKIECFDSVEISGVEDRFNASLGTYHDLLKIIKDKDFLDNEENEDILEDIVLTLTLFEDREMIEERLKTYAHLFDDKVMKQLKRRRYTGWGRLSRKLINGIRDKQSGKTILDFLKSDGFANRNFMQLIHDDSLTFKEDIQKAQVSGQGDSLHEHIANLAGSPAIKKGILQTVKVVDELVKVMGRHKPENIVIEMARENQTTQKGQKNSRERMKRIEEGIKELGSQILKEHPVENTQLQNEKLYLYYLQNGRDMYVDQELDINRLSDYDVDHIVPQSFLKDDSIDNKVLTRSDKARGKSDNVPSEEVVKKMKNYWRQLLNAKLITQRKFDNLTKAERGGLSELDKAGFIKRQLVETRQITKHVAQILDSRMNTKYDENDKLIREVKVITLKSKLVSDFRKDFQFYKVREINNYHHAHDAYLNAVVGTALIKKYPKLESEFVYGDYKVYDVRKMIAKSEQEIGKATAKYFFYSNIMNFFKTEITLANGEIRKRPLIETNGETGEIVWDKGRDFATVRKVLSMPQVNIVKKTEVQTGGFSKESILPKRNSDKLIARKKDWDPKKYGGFDSPTVAYSVLVVAKVEKGKSKKLKSVKELLGITIMERSSFEKNPIDFLEAKGYKEVKKDLIIKLPKYSLFELENGRKRMLASAGELQKGNELALPSKYVNFLYLASHYEKLKGSPEDNEQKQLFVEQHKHYLDEIIEQISEFSKRVILADANLDKVLSAYNKHRDKPIREQAENIIHLFTLTNLGAPAAFKYFDTTIDRKRYTSTKEVLDATLIHQSITGLYETRIDLSQLGGDGGEAAAKPAPGGSGGTLNIEDEYRLHETSKEPDVSLGSTWLSDFPQAWAETGGMGLAVRQAPLIIPLKATSTPVSIKQYPMSQEARLGIKPHIQRLLDQGILVPCQSPWNTPLLPVKKPGTNDYRPVQDLREVNKRVEDIHPTVPNPYNLLSGLPPSHQWYTVLDLKDAFFCLRLHPTSQPLFAFEWRDPEMGISGQLTWTRLPQGFKNSPTLFNEALHRDLAGFRIQHPDLILLQYVDDLLLAATSELDCQQGTRALLQTLGDLGYRASAKKAQICQKQVKYLGYLLKEGQRWLTEARKETVMGQPIPKTPRQLREFLGKAGFCRLFIPGFAEMAAPLYPLTKPGTLFNWGPDQQKAFQEIKQALLTAPALGLPDLTKPFELFVDEKQGYAKGVLTQKLGPWRRPVAYLSKKLDPVAAGWPPCLRMVAAIAVLTKDAGKLTMGQPLVILAPHAVEALVKQPPDRWLSNARMTHYQALLLDTDRVQFGPVVALNPATLLPLPEEGLQHDCLDILAEAHGTRSDLMDQPLPDADHTWYTDGSSFLQEGQRKAGAAVTTETEVIWARALPAGTSAQRAELIALTQALKMAEGKKLNVYTDSRYAFATAHIHGEIYRRRGWLTSEGKEIKNKDEILALLKALFLPKRLSIIHCPGHQKGNSAEARGNRMADQAAREVATRETPETSTLLAGKRTADGSEFEKRTADGSEFESPKKKAKVE

SEQ ID NO: 2316 - protein, 2096 aa, synthetic construct
MPAAKRVKLDGGDKKYSIGLDIGTNSVGWAVITDEYKVPSKKFKVLGNTDRHSIKKNLIGALLFDSGETAEATRLKRTARRRYTRRKNRICYLQEIFSNEMAKVDDSFFHRLEESFLVEEDKKHERHPIFGNIVDEVAYHEKYPTIYHLRKKLVDSTDKADLRLIYLALAHMIKFRGHFLIEGDLNPDNSDVDKLFIQLVQTYNQLFEENPINASGVDAKAILSARLSKSRRLENLIAQLPGEKKNGLFGNLIALSLGLTPNFKSNFDLAEDAKLQLSKDTYDDDLDNLLAQIGDQYADLFLAAKNLSDAILLSDILRVNTEITKAPLSASMIKRYDEHHQDLTLLKALVRQQLPEKYKEIFFDQSKNGYAGYIDGGASQEEFYKFIKPILEKMDGTEELLVKLNREDLLRKQRTFDNGSIPHQIHLGELHAILRRQEDFYPFLKDNREKIEKILTFRIPYYVGPLARGNSRFAWMTRKSEETITPWNFEEVVDKGASAQSFIERMTNFDKNLPNEKVLPKHSLLYEYFTVYNELTKVKYVTEGMRKPAFLSGEQKKAIVDLLFKTNRKVTVKQLKEDYFKKIECFDSVEISGVEDRFNASLGTYHDLLKIIKDKDFLDNEENEDILEDIVLTLTLFEDREMIEERLKTYAHLFDDKVMKQLKRRRYTGWGRLSRKLINGIRDKQSGKTILDFLKSDGFANRNFMQLIHDDSLTFKEDIQKAQVSGQGDSLHEHIANLAGSPAIKKGILQTVKVVDELVKVMGRHKPENIVIEMARENQTTQKGQKNSRERMKRIEEGIKELGSQILKEHPVENTQLQNEKLYLYYLQNGRDMYVDQELDINRLSDYDVDHIVPQSFLKDDSIDNKVLTRSDKARGKSDNVPSEEVVKKMKNYWRQLLNAKLITQRKFDNLTKAERGGLSELDKAGFIKRQLVETRQITKHVAQILDSRMNTKYDENDKLIREVKVITLKSKLVSDFRKDFQFYKVREINNYHHAHDAYLNAVVGTALIKKYPKLESEFVYGDYKVYDVRKMIAKSEQEIGKATAKYFFYSNIMNFFKTEITLANGEIRKRPLIETNGETGEIVWDKGRDFATVRKVLSMPQVNIVKKTEVQTGGFSKESILPKRNSDKLIARKKDWDPKKYGGFDSPTVAYSVLVVAKVEKGKSKKLKSVKELLGITIMERSSFEKNPIDFLEAKGYKEVKKDLIIKLPKYSLFELENGRKRMLASAGELQKGNELALPSKYVNFLYLASHYEKLKGSPEDNEQKQLFVEQHKHYLDEIIEQISEFSKRVILADANLDKVLSAYNKHRDKPIREQAENIIHLFTLTNLGAPAAFKYFDTTIDRKRYTSTKEVLDATLIHQSITGLYETRIDLSQLGGDGGGGGEAAAKGSSGGTLNIEDEYRLHETSKEPDVSLGSTWLSDFPQAWAETGGMGLAVRQAPLIIPLKATSTPVSIKQYPMSQEARLGIKPHIQRLLDQGILVPCQSPWNTPLLPVKKPGTNDYRPVQDLREVNKRVEDIHPTVPNPYNLLSGLPPSHQWYTVLDLKDAFFCLRLHPTSQPLFAFEWRDPEMGISGQLTWTRLPQGFKNSPTLFNEALHRDLAGFRIQHPDLILLQYVDDLLLAATSELDCQQGTRALLQTLGDLGYRASAKKAQICQKQVKYLGYLLKEGQRWLTEARKETVMGQPIPKTPRQLREFLGKAGFCRLFIPGFAEMAAPLYPLTKPGTLFNWGPDQQKAFQEIKQALLTAPALGLPDLTKPFELFVDEKQGYAKGVLTQKLGPWRRPVAYLSKKLDPVAAGWPPCLRMVAAIAVLTKDAGKLTMGQPLVILAPHAVEALVKQPPDRWLSNARMTHYQALLLDTDRVQFGPVVALNPATLLPLPEEGLQHDCLDILAEAHGTRSDLMDQPLPDADHTWYTDGSSFLQEGQRKAGAAVTTETEVIWARALPAGTSAQRAELIALTQALKMAEGKKLNVYTDSRYAFATAHIHGEIYRRRGWLTSEGKEIKNKDEILALLKALFLPKRLSIIHCPGHQKGNSAEARGNRMADQAAREVATRETPETSTLLAGKRTADGSEFEKRTADGSEFESPKKKAKVE

SEQ ID NO: 2317 - protein, 2094 aa, synthetic construct
MPAAKRVKLDGGDKKYSIGLDIGTNSVGWAVITDEYKVPSKKFKVLGNTDRHSIKKNLIGALLFDSGETAEATRLKRTARRRYTRRKNRICYLQEIFSNEMAKVDDSFFHRLEESFLVEEDKKHERHPIFGNIVDEVAYHEKYPTIYHLRKKLVDSTDKADLRLIYLALAHMIKFRGHFLIEGDLNPDNSDVDKLFIQLVQTYNQLFEENPINASGVDAKAILSARLSKSRRLENLIAQLPGEKKNGLFGNLIALSLGLTPNFKSNFDLAEDAKLQLSKDTYDDDLDNLLAQIGDQYADLFLAAKNLSDAILLSDILRVNTEITKAPLSASMIKRYDEHHQDLTLLKALVRQQLPEKYKEIFFDQSKNGYAGYIDGGASQEEFYKFIKPILEKMDGTEELLVKLNREDLLRKQRTFDNGSIPHQIHLGELHAILRRQEDFYPFLKDNREKIEKILTFRIPYYVGPLARGNSRFAWMTRKSEETITPWNFEEVVDKGASAQSFIERMTNFDKNLPNEKVLPKHSLLYEYFTVYNELTKVKYVTEGMRKPAFLSGEQKKAIVDLLFKTNRKVTVKQLKEDYFKKIECFDSVEISGVEDRFNASLGTYHDLLKIIKDKDFLDNEENEDILEDIVLTLTLFEDREMIEERLKTYAHLFDDKVMKQLKRRRYTGWGRLSRKLINGIRDKQSGKTILDFLKSDGFANRNFMQLIHDDSLTFKEDIQKAQVSGQGDSLHEHIANLAGSPAIKKGILQTVKVVDELVKVMGRHKPENIVIEMARENQTTQKGQKNSRERMKRIEEGIKELGSQILKEHPVENTQLQNEKLYLYYLQNGRDMYVDQELDINRLSDYDVDHIVPQSFLKDDSIDNKVLTRSDKARGKSDNVPSEEVVKKMKNYWRQLLNAKLITQRKFDNLTKAERGGLSELDKAGFIKRQLVETRQITKHVAQILDSRMNTKYDENDKLIREVKVITLKSKLVSDFRKDFQFYKVREINNYHHAHDAYLNAVVGTALIKKYPKLESEFVYGDYKVYDVRKMIAKSEQEIGKATAKYFFYSNIMNFFKTEITLANGEIRKRPLIETNGETGEIVWDKGRDFATVRKVLSMPQVNIVKKTEVQTGGFSKESILPKRNSDKLIARKKDWDPKKYGGFDSPTVAYSVLVVAKVEKGKSKKLKSVKELLGITIMERSSFEKNPIDFLEAKGYKEVKKDLIIKLPKYSLFELENGRKRMLASAGELQKGNELALPSKYVNFLYLASHYEKLKGSPEDNEQKQLFVEQHKHYLDEIIEQISEFSKRVILADANLDKVLSAYNKHRDKPIREQAENIIHLFTLTNLGAPAAFKYFDTTIDRKRYTSTKEVLDATLIHQSITGLYETRIDLSQLGGDGGGGSGGGPAPGGTLNIEDEYRLHETSKEPDVSLGSTWLSDFPQAWAETGGMGLAVRQAPLIIPLKATSTPVSIKQYPMSQEARLGIKPHIQRLLDQGILVPCQSPWNTPLLPVKKPGTNDYRPVQDLREVNKRVEDIHPTVPNPYNLLSGLPPSHQWYTVLDLKDAFFCLRLHPTSQPLFAFEWRDPEMGISGQLTWTRLPQGFKNSPTLFNEALHRDLAGFRIQHPDLILLQYVDDLLLAATSELDCQQGTRALLQTLGDLGYRASAKKAQICQKQVKYLGYLLKEGQRWLTEARKETVMGQPIPKTPRQLREFLGKAGFCRLFIPGFAEMAAPLYPLTKPGTLFNWGPDQQKAFQEIKQALLTAPALGLPDLTKPFELFVDEKQGYAKGVLTQKLGPWRRPVAYLSKKLDPVAAGWPPCLRMVAAIAVLTKDAGKLTMGQPLVILAPHAVEALVKQPPDRWLSNARMTHYQALLLDTDRVQFGPVVALNPATLLPLPEEGLQHDCLDILAEAHGTRSDLMDQPLPDADHTWYTDGSSFLQEGQRKAGAAVTTETEVIWARALPAGTSAQRAELIALTQALKMAEGKKLNVYTDSRYAFATAHIHGEIYRRRGWLTSEGKEIKNKDEILALLKALFLPKRLSIIHCPGHQKGNSAEARGNRMADQAAREVATRETPETSTLLAGKRTADGSEFEKRTADGSEFESPKKKAKVE

SEQ ID NO: 2318 - protein, 2094 aa, synthetic construct
MPAAKRVKLDGGDKKYSIGLDIGTNSVGWAVITDEYKVPSKKFKVLGNTDRHSIKKNLIGALLFDSGETAEATRLKRTARRRYTRRKNRICYLQEIFSNEMAKVDDSFFHRLEESFLVEEDKKHERHPIFGNIVDEVAYHEKYPTIYHLRKKLVDSTDKADLRLIYLALAHMIKFRGHFLIEGDLNPDNSDVDKLFIQLVQTYNQLFEENPINASGVDAKAILSARLSKSRRLENLIAQLPGEKKNGLFGNLIALSLGLTPNFKSNFDLAEDAKLQLSKDTYDDDLDNLLAQIGDQYADLFLAAKNLSDAILLSDILRVNTEITKAPLSASMIKRYDEHHQDLTLLKALVRQQLPEKYKEIFFDQSKNGYAGYIDGGASQEEFYKFIKPILEKMDGTEELLVKLNREDLLRKQRTFDNGSIPHQIHLGELHAILRRQEDFYPFLKDNREKIEKILTFRIPYYVGPLARGNSRFAWMTRKSEETITPWNFEEVVDKGASAQSFIERMTNFDKNLPNEKVLPKHSLLYEYFTVYNELTKVKYVTEGMRKPAFLSGEQKKAIVDLLFKTNRKVTVKQLKEDYFKKIECFDSVEISGVEDRFNASLGTYHDLLKIIKDKDFLDNEENEDILEDIVLTLTLFEDREMIEERLKTYAHLFDDKVMKQLKRRRYTGWGRLSRKLINGIRDKQSGKTILDFLKSDGFANRNFMQLIHDDSLTFKEDIQKAQVSGQGDSLHEHIANLAGSPAIKKGILQTVKVVDELVKVMGRHKPENIVIEMARENQTTQKGQKNSRERMKRIEEGIKELGSQILKEHPVENTQLQNEKLYLYYLQNGRDMYVDQELDINRLSDYDVDHIVPQSFLKDDSIDNKVLTRSDKARGKSDNVPSEEVVKKMKNYWRQLLNAKLITQRKFDNLTKAERGGLSELDKAGFIKRQLVETRQITKHVAQILDSRMNTKYDENDKLIREVKVITLKSKLVSDFRKDFQFYKVREINNYHHAHDAYLNAVVGTALIKKYPKLESEFVYGDYKVYDVRKMIAKSEQEIGKATAKYFFYSNIMNFFKTEITLANGEIRKRPLIETNGETGEIVWDKGRDFATVRKVLSMPQVNIVKKTEVQTGGFSKESILPKRNSDKLIARKKDWDPKKYGGFDSPTVAYSVLVVAKVEKGKSKKLKSVKELLGITIMERSSFEKNPIDFLEAKGYKEVKKDLIIKLPKYSLFELENGRKRMLASAGELQKGNELALPSKYVNFLYLASHYEKLKGSPEDNEQKQLFVEQHKHYLDEIIEQISEFSKRVILADANLDKVLSAYNKHRDKPIREQAENIIHLFTLTNLGAPAAFKYFDTTIDRKRYTSTKEVLDATLIHQSITGLYETRIDLSQLGGDGGPAPAPAPAPGGTLNIEDEYRLHETSKEPDVSLGSTWLSDFPQAWAETGGMGLAVRQAPLIIPLKATSTPVSIKQYPMSQEARLGIKPHIQRLLDQGILVPCQSPWNTPLLPVKKPGTNDYRPVQDLREVNKRVEDIHPTVPNPYNLLSGLPPSHQWYTVLDLKDAFFCLRLHPTSQPLFAFEWRDPEMGISGQLTWTRLPQGFKNSPTLFNEALHRDLAGFRIQHPDLILLQYVDDLLLAATSELDCQQGTRALLQTLGDLGYRASAKKAQICQKQVKYLGYLLKEGQRWLTEARKETVMGQPIPKTPRQLREFLGKAGFCRLFIPGFAEMAAPLYPLTKPGTLFNWGPDQQKAFQEIKQALLTAPALGLPDLTKPFELFVDEKQGYAKGVLTQKLGPWRRPVAYLSKKLDPVAAGWPPCLRMVAAIAVLTKDAGKLTMGQPLVILAPHAVEALVKQPPDRWLSNARMTHYQALLLDTDRVQFGPVVALNPATLLPLPEEGLQHDCLDILAEAHGTRSDLMDQPLPDADHTWYTDGSSFLQEGQRKAGAAVTTETEVIWARALPAGTSAQRAELIALTQALKMAEGKKLNVYTDSRYAFATAHIHGEIYRRRGWLTSEGKEIKNKDEILALLKALFLPKRLSIIHCPGHQKGNSAEARGNRMADQAAREVATRETPETSTLLAGKRTADGSEFEKRTADGSEFESPKKKAKVE

SEQ ID NO: 2319 - protein, 2097 aa, synthetic construct
MPAAKRVKLDGGDKKYSIGLDIGTNSVGWAVITDEYKVPSKKFKVLGNTDRHSIKKNLIGALLFDSGETAEATRLKRTARRRYTRRKNRICYLQEIFSNEMAKVDDSFFHRLEESFLVEEDKKHERHPIFGNIVDEVAYHEKYPTIYHLRKKLVDSTDKADLRLIYLALAHMIKFRGHFLIEGDLNPDNSDVDKLFIQLVQTYNQLFEENPINASGVDAKAILSARLSKSRRLENLIAQLPGEKKNGLFGNLIALSLGLTPNFKSNFDLAEDAKLQLSKDTYDDDLDNLLAQIGDQYADLFLAAKNLSDAILLSDILRVNTEITKAPLSASMIKRYDEHHQDLTLLKALVRQQLPEKYKEIFFDQSKNGYAGYIDGGASQEEFYKFIKPILEKMDGTEELLVKLNREDLLRKQRTFDNGSIPHQIHLGELHAILRRQEDFYPFLKDNREKIEKILTFRIPYYVGPLARGNSRFAWMTRKSEETITPWNFEEVVDKGASAQSFIERMTNFDKNLPNEKVLPKHSLLYEYFTVYNELTKVKYVTEGMRKPAFLSGEQKKAIVDLLFKTNRKVTVKQLKEDYFKKIECFDSVEISGVEDRFNASLGTYHDLLKIIKDKDFLDNEENEDILEDIVLTLTLFEDREMIEERLKTYAHLFDDKVMKQLKRRRYTGWGRLSRKLINGIRDKQSGKTILDFLKSDGFANRNFMQLIHDDSLTFKEDIQKAQVSGQGDSLHEHIANLAGSPAIKKGILQTVKVVDELVKVMGRHKPENIVIEMARENQTTQKGQKNSRERMKRIEEGIKELGSQILKEHPVENTQLQNEKLYLYYLQNGRDMYVDQELDINRLSDYDVDHIVPQSFLKDDSIDNKVLTRSDKARGKSDNVPSEEVVKKMKNYWRQLLNAKLITQRKFDNLTKAERGGLSELDKAGFIKRQLVETRQITKHVAQILDSRMNTKYDENDKLIREVKVITLKSKLVSDFRKDFQFYKVREINNYHHAHDAYLNAVVGTALIKKYPKLESEFVYGDYKVYDVRKMIAKSEQEIGKATAKYFFYSNIMNFFKTEITLANGEIRKRPLIETNGETGEIVWDKGRDFATVRKVLSMPQVNIVKKTEVQTGGFSKESILPKRNSDKLIARKKDWDPKKYGGFDSPTVAYSVLVVAKVEKGKSKKLKSVKELLGITIMERSSFEKNPIDFLEAKGYKEVKKDLIIKLPKYSLFELENGRKRMLASAGELQKGNELALPSKYVNFLYLASHYEKLKGSPEDNEQKQLFVEQHKHYLDEIIEQISEFSKRVILADANLDKVLSAYNKHRDKPIREQAENIIHLFTLTNLGAPAAFKYFDTTIDRKRYTSTKEVLDATLIHQSITGLYETRIDLSQLGGDGGGGSGGSGGSGGSGGTLNIEDEYRLHETSKEPDVSLGSTWLSDFPQAWAETGGMGLAVRQAPLIIPLKATSTPVSIKQYPMSQEARLGIKPHIQRLLDQGILVPCQSPWNTPLLPVKKPGTNDYRPVQDLREVNKRVEDIHPTVPNPYNLLSGLPPSHQWYTVLDLKDAFFCLRLHPTSQPLFAFEWRDPEMGISGQLTWTRLPQGFKNSPTLFNEALHRDLAGFRIQHPDLILLQYVDDLLLAATSELDCQQGTRALLQTLGDLGYRASAKKAQICQKQVKYLGYLLKEGQRWLTEARKETVMGQPIPKTPRQLREFLGKAGFCRLFIPGFAEMAAPLYPLTKPGTLFNWGPDQQKAFQEIKQALLTAPALGLPDLTKPFELFVDEKQGYAKGVLTQKLGPWRRPVAYLSKKLDPVAAGWPPCLRMVAAIAVLTKDAGKLTMGQPLVILAPHAVEALVKQPPDRWLSNARMTHYQALLLDTDRVQFGPVVALNPATLLPLPEEGLQHDCLDILAEAHGTRSDLMDQPLPDADHTWYTDGSSFLQEGQRKAGAAVTTETEVIWARALPAGTSAQRAELIALTQALKMAEGKKLNVYTDSRYAFATAHIHGEIYRRRGWLTSEGKEIKNKDEILALLKALFLPKRLSIIHCPGHQKGNSAEARGNRMADQAAREVATRETPETSTLLAGKRTADGSEFEKRTADGSEFESPKKKAKVE

SEQ ID NO: 2320 - protein, 2094 aa, synthetic construct
MPAAKRVKLDGGDKKYSIGLDIGTNSVGWAVITDEYKVPSKKFKVLGNTDRHSIKKNLIGALLFDSGETAEATRLKRTARRRYTRRKNRICYLQEIFSNEMAKVDDSFFHRLEESFLVEEDKKHERHPIFGNIVDEVAYHEKYPTIYHLRKKLVDSTDKADLRLIYLALAHMIKFRGHFLIEGDLNPDNSDVDKLFIQLVQTYNQLFEENPINASGVDAKAILSARLSKSRRLENLIAQLPGEKKNGLFGNLIALSLGLTPNFKSNFDLAEDAKLQLSKDTYDDDLDNLLAQIGDQYADLFLAAKNLSDAILLSDILRVNTEITKAPLSASMIKRYDEHHQDLTLLKALVRQQLPEKYKEIFFDQSKNGYAGYIDGGASQEEFYKFIKPILEKMDGTEELLVKLNREDLLRKQRTFDNGSIPHQIHLGELHAILRRQEDFYPFLKDNREKIEKILTFRIPYYVGPLARGNSRFAWMTRKSEETITPWNFEEVVDKGASAQSFIERMTNFDKNLPNEKVLPKHSLLYEYFTVYNELTKVKYVTEGMRKPAFLSGEQKKAIVDLLFKTNRKVTVKQLKEDYFKKIECFDSVEISGVEDRFNASLGTYHDLLKIIKDKDFLDNEENEDILEDIVLTLTLFEDREMIEERLKTYAHLFDDKVMKQLKRRRYTGWGRLSRKLINGIRDKQSGKTILDFLKSDGFANRNFMQLIHDDSLTFKEDIQKAQVSGQGDSLHEHIANLAGSPAIKKGILQTVKVVDELVKVMGRHKPENIVIEMARENQTTQKGQKNSRERMKRIEEGIKELGSQILKEHPVENTQLQNEKLYLYYLQNGRDMYVDQELDINRLSDYDVDHIVPQSFLKDDSIDNKVLTRSDKARGKSDNVPSEEVVKKMKNYWRQLLNAKLITQRKFDNLTKAERGGLSELDKAGFIKRQLVETRQITKHVAQILDSRMNTKYDENDKLIREVKVITLKSKLVSDFRKDFQFYKVREINNYHHAHDAYLNAVVGTALIKKYPKLESEFVYGDYKVYDVRKMIAKSEQEIGKATAKYFFYSNIMNFFKTEITLANGEIRKRPLIETNGETGEIVWDKGRDFATVRKVLSMPQVNIVKKTEVQTGGFSKESILPKRNSDKLIARKKDWDPKKYGGFDSPTVAYSVLVVAKVEKGKSKKLKSVKELLGITIMERSSFEKNPIDFLEAKGYKEVKKDLIIKLPKYSLFELENGRKRMLASAGELQKGNELALPSKYVNFLYLASHYEKLKGSPEDNEQKQLFVEQHKHYLDEIIEQISEFSKRVILADANLDKVLSAYNKHRDKPIREQAENIIHLFTLTNLGAPAAFKYFDTTIDRKRYTSTKEVLDATLIHQSITGLYETRIDLSQLGGDGGGGGPAPGGSGGTLNIEDEYRLHETSKEPDVSLGSTWLSDFPQAWAETGGMGLAVRQAPLIIPLKATSTPVSIKQYPMSQEARLGIKPHIQRLLDQGILVPCQSPWNTPLLPVKKPGTNDYRPVQDLREVNKRVEDIHPTVPNPYNLLSGLPPSHQWYTVLDLKDAFFCLRLHPTSQPLFAFEWRDPEMGISGQLTWTRLPQGFKNSPTLFNEALHRDLAGFRIQHPDLILLQYVDDLLLAATSELDCQQGTRALLQTLGDLGYRASAKKAQICQKQVKYLGYLLKEGQRWLTEARKETVMGQPIPKTPRQLREFLGKAGFCRLFIPGFAEMAAPLYPLTKPGTLFNWGPDQQKAFQEIKQALLTAPALGLPDLTKPFELFVDEKQGYAKGVLTQKLGPWRRPVAYLSKKLDPVAAGWPPCLRMVAAIAVLTKDAGKLTMGQPLVILAPHAVEALVKQPPDRWLSNARMTHYQALLLDTDRVQFGPVVALNPATLLPLPEEGLQHDCLDILAEAHGTRSDLMDQPLPDADHTWYTDGSSFLQEGQRKAGAAVTTETEVIWARALPAGTSAQRAELIALTQALKMAEGKKLNVYTDSRYAFATAHIHGEIYRRRGWLTSEGKEIKNKDEILALLKALFLPKRLSIIHCPGHQKGNSAEARGNRMADQAAREVATRETPETSTLLAGKRTADGSEFEKRTADGSEFESPKKKAKVE

SEQ ID NO: 2321 - protein, 2094 aa, synthetic construct
MPAAKRVKLDGGDKKYSIGLDIGTNSVGWAVITDEYKVPSKKFKVLGNTDRHSIKKNLIGALLFDSGETAEATRLKRTARRRYTRRKNRICYLQEIFSNEMAKVDDSFFHRLEESFLVEEDKKHERHPIFGNIVDEVAYHEKYPTIYHLRKKLVDSTDKADLRLIYLALAHMIKFRGHFLIEGDLNPDNSDVDKLFIQLVQTYNQLFEENPINASGVDAKAILSARLSKSRRLENLIAQLPGEKKNGLFGNLIALSLGLTPNFKSNFDLAEDAKLQLSKDTYDDDLDNLLAQIGDQYADLFLAAKNLSDAILLSDILRVNTEITKAPLSASMIKRYDEHHQDLTLLKALVRQQLPEKYKEIFFDQSKNGYAGYIDGGASQEEFYKFIKPILEKMDGTEELLVKLNREDLLRKQRTFDNGSIPHQIHLGELHAILRRQEDFYPFLKDNREKIEKILTFRIPYYVGPLARGNSRFAWMTRKSEETITPWNFEEVVDKGASAQSFIERMTNFDKNLPNEKVLPKHSLLYEYFTVYNELTKVKYVTEGMRKPAFLSGEQKKAIVDLLFKTNRKVTVKQLKEDYFKKIECFDSVEISGVEDRFNASLGTYHDLLKIIKDKDFLDNEENEDILEDIVLTLTLFEDREMIEERLKTYAHLFDDKVMKQLKRRRYTGWGRLSRKLINGIRDKQSGKTILDFLKSDGFANRNFMQLIHDDSLTFKEDIQKAQVSGQGDSLHEHIANLAGSPAIKKGILQTVKVVDELVKVMGRHKPENIVIEMARENQTTQKGQKNSRERMKRIEEGIKELGSQILKEHPVENTQLQNEKLYLYYLQNGRDMYVDQELDINRLSDYDVDHIVPQSFLKDDSIDNKVLTRSDKARGKSDNVPSEEVVKKMKNYWRQLLNAKLITQRKFDNLTKAERGGLSELDKAGFIKRQLVETRQITKHVAQILDSRMNTKYDENDKLIREVKVITLKSKLVSDFRKDFQFYKVREINNYHHAHDAYLNAVVGTALIKKYPKLESEFVYGDYKVYDVRKMIAKSEQEIGKATAKYFFYSNIMNFFKTEITLANGEIRKRPLIETNGETGEIVWDKGRDFATVRKVLSMPQVNIVKKTEVQTGGFSKESILPKRNSDKLIARKKDWDPKKYGGFDSPTVAYSVLVVAKVEKGKSKKLKSVKELLGITIMERSSFEKNPIDFLEAKGYKEVKKDLIIKLPKYSLFELENGRKRMLASAGELQKGNELALPSKYVNFLYLASHYEKLKGSPEDNEQKQLFVEQHKHYLDEIIEQISEFSKRVILADANLDKVLSAYNKHRDKPIREQAENIIHLFTLTNLGAPAAFKYFDTTIDRKRYTSTKEVLDATLIHQSITGLYETRIDLSQLGGDGGPAPGGSGSSGGTLNIEDEYRLHETSKEPDVSLGSTWLSDFPQAWAETGGMGLAVRQAPLIIPLKATSTPVSIKQYPMSQEARLGIKPHIQRLLDQGILVPCQSPWNTPLLPVKKPGTNDYRPVQDLREVNKRVEDIHPTVPNPYNLLSGLPPSHQWYTVLDLKDAFFCLRLHPTSQPLFAFEWRDPEMGISGQLTWTRLPQGFKNSPTLFNEALHRDLAGFRIQHPDLILLQYVDDLLLAATSELDCQQGTRALLQTLGDLGYRASAKKAQICQKQVKYLGYLLKEGQRWLTEARKETVMGQPIPKTPRQLREFLGKAGFCRLFIPGFAEMAAPLYPLTKPGTLFNWGPDQQKAFQEIKQALLTAPALGLPDLTKPFELFVDEKQGYAKGVLTQKLGPWRRPVAYLSKKLDPVAAGWPPCLRMVAAIAVLTKDAGKLTMGQPLVILAPHAVEALVKQPPDRWLSNARMTHYQALLLDTDRVQFGPVVALNPATLLPLPEEGLQHDCLDILAEAHGTRSDLMDQPLPDADHTWYTDGSSFLQEGQRKAGAAVTTETEVIWARALPAGTSAQRAELIALTQALKMAEGKKLNVYTDSRYAFATAHIHGEIYRRRGWLTSEGKEIKNKDEILALLKALFLPKRLSIIHCPGHQKGNSAEARGNRMADQAAREVATRETPETSTLLAGKRTADGSEFEKRTADGSEFESPKKKAKVE

SEQ ID NO: 2322 - protein, 2115 aa, synthetic construct
MPAAKRVKLDGGDKKYSIGLDIGTNSVGWAVITDEYKVPSKKFKVLGNTDRHSIKKNLIGALLFDSGETAEATRLKRTARRRYTRRKNRICYLQEIFSNEMAKVDDSFFHRLEESFLVEEDKKHERHPIFGNIVDEVAYHEKYPTIYHLRKKLVDSTDKADLRLIYLALAHMIKFRGHFLIEGDLNPDNSDVDKLFIQLVQTYNQLFEENPINASGVDAKAILSARLSKSRRLENLIAQLPGEKKNGLFGNLIALSLGLTPNFKSNFDLAEDAKLQLSKDTYDDDLDNLLAQIGDQYADLFLAAKNLSDAILLSDILRVNTEITKAPLSASMIKRYDEHHQDLTLLKALVRQQLPEKYKEIFFDQSKNGYAGYIDGGASQEEFYKFIKPILEKMDGTEELLVKLNREDLLRKQRTFDNGSIPHQIHLGELHAILRRQEDFYPFLKDNREKIEKILTFRIPYYVGPLARGNSRFAWMTRKSEETITPWNFEEVVDKGASAQSFIERMTNFDKNLPNEKVLPKHSLLYEYFTVYNELTKVKYVTEGMRKPAFLSGEQKKAIVDLLFKTNRKVTVKQLKEDYFKKIECFDSVEISGVEDRFNASLGTYHDLLKIIKDKDFLDNEENEDILEDIVLTLTLFEDREMIEERLKTYAHLFDDKVMKQLKRRRYTGWGRLSRKLINGIRDKQSGKTILDFLKSDGFANRNFMQLIHDDSLTFKEDIQKAQVSGQGDSLHEHIANLAGSPAIKKGILQTVKVVDELVKVMGRHKPENIVIEMARENQTTQKGQKNSRERMKRIEEGIKELGSQILKEHPVENTQLQNEKLYLYYLQNGRDMYVDQELDINRLSDYDVDHIVPQSFLKDDSIDNKVLTRSDKARGKSDNVPSEEVVKKMKNYWRQLLNAKLITQRKFDNLTKAERGGLSELDKAGFIKRQLVETRQITKHVAQILDSRMNTKYDENDKLIREVKVITLKSKLVSDFRKDFQFYKVREINNYHHAHDAYLNAVVGTALIKKYPKLESEFVYGDYKVYDVRKMIAKSEQEIGKATAKYFFYSNIMNFFKTEITLANGEIRKRPLIETNGETGEIVWDKGRDFATVRKVLSMPQVNIVKKTEVQTGGFSKESILPKRNSDKLIARKKDWDPKKYGGFDSPTVAYSVLVVAKVEKGKSKKLKSVKELLGITIMERSSFEKNPIDFLEAKGYKEVKKDLIIKLPKYSLFELENGRKRMLASAGELQKGNELALPSKYVNFLYLASHYEKLKGSPEDNEQKQLFVEQHKHYLDEIIEQISEFSKRVILADANLDKVLSAYNKHRDKPIREQAENIIHLFTLTNLGAPAAFKYFDTTIDRKRYTSTKEVLDATLIHQSITGLYETRIDLSQLGGDGGEAAAKEAAAKEAAAKEAAAKEAAAKEAAAKGGTLNIEDEYRLHETSKEPDVSLGSTWLSDFPQAWAETGGMGLAVRQAPLIIPLKATSTPVSIKQYPMSQEARLGIKPHIQRLLDQGILVPCQSPWNTPLLPVKKPGTNDYRPVQDLREVNKRVEDIHPTVPNPYNLLSGLPPSHQWYTVLDLKDAFFCLRLHPTSQPLFAFEWRDPEMGISGQLTWTRLPQGFKNSPTLFNEALHRDLAGFRIQHPDLILLQYVDDLLLAATSELDCQQGTRALLQTLGDLGYRASAKKAQICQKQVKYLGYLLKEGQRWLTEARKETVMGQPIPKTPRQLREFLGKAGFCRLFIPGFAEMAAPLYPLTKPGTLFNWGPDQQKAFQEIKQALLTAPALGLPDLTKPFELFVDEKQGYAKGVLTQKLGPWRRPVAYLSKKLDPVAAGWPPCLRMVAAIAVLTKDAGKLTMGQPLVILAPHAVEALVKQPPDRWLSNARMTHYQALLLDTDRVQFGPVVALNPATLLPLPEEGLQHDCLDILAEAHGTRSDLMDQPLPDADHTWYTDGSSFLQEGQRKAGAAVTTETEVIWARALPAGTSAQRAELIALTQALKMAEGKKLNVYTDSRYAFATAHIHGEIYRRRGWLTSEGKEIKNKDEILALLKALFLPKRLSIIHCPGHQKGNSAEARGNRMADQAAREVATRETPETSTLLAGKRTADGSEFEKRTADGSEFESPKKKAKVE

SEQ ID NO: 2323 - protein, 2088 aa, synthetic construct
MPAAKRVKLDGGDKKYSIGLDIGTNSVGWAVITDEYKVPSKKFKVLGNTDRHSIKKNLIGALLFDSGETAEATRLKRTARRRYTRRKNRICYLQEIFSNEMAKVDDSFFHRLEESFLVEEDKKHERHPIFGNIVDEVAYHEKYPTIYHLRKKLVDSTDKADLRLIYLALAHMIKFRGHFLIEGDLNPDNSDVDKLFIQLVQTYNQLFEENPINASGVDAKAILSARLSKSRRLENLIAQLPGEKKNGLFGNLIALSLGLTPNFKSNFDLAEDAKLQLSKDTYDDDLDNLLAQIGDQYADLFLAAKNLSDAILLSDILRVNTEITKAPLSASMIKRYDEHHQDLTLLKALVRQQLPEKYKEIFFDQSKNGYAGYIDGGASQEEFYKFIKPILEKMDGTEELLVKLNREDLLRKQRTFDNGSIPHQIHLGELHAILRRQEDFYPFLKDNREKIEKILTFRIPYYVGPLARGNSRFAWMTRKSEETITPWNFEEVVDKGASAQSFIERMTNFDKNLPNEKVLPKHSLLYEYFTVYNELTKVKYVTEGMRKPAFLSGEQKKAIVDLLFKTNRKVTVKQLKEDYFKKIECFDSVEISGVEDRFNASLGTYHDLLKIIKDKDFLDNEENEDILEDIVLTLTLFEDREMIEERLKTYAHLFDDKVMKQLKRRRYTGWGRLSRKLINGIRDKQSGKTILDFLKSDGFANRNFMQLIHDDSLTFKEDIQKAQVSGQGDSLHEHIANLAGSPAIKKGILQTVKVVDELVKVMGRHKPENIVIEMARENQTTQKGQKNSRERMKRIEEGIKELGSQILKEHPVENTQLQNEKLYLYYLQNGRDMYVDQELDINRLSDYDVDHIVPQSFLKDDSIDNKVLTRSDKARGKSDNVPSEEVVKKMKNYWRQLLNAKLITQRKFDNLTKAERGGLSELDKAGFIKRQLVETRQITKHVAQILDSRMNTKYDENDKLIREVKVITLKSKLVSDFRKDFQFYKVREINNYHHAHDAYLNAVVGTALIKKYPKLESEFVYGDYKVYDVRKMIAKSEQEIGKATAKYFFYSNIMNFFKTEITLANGEIRKRPLIETNGETGEIVWDKGRDFATVRKVLSMPQVNIVKKTEVQTGGFSKESILPKRNSDKLIARKKDWDPKKYGGFDSPTVAYSVLVVAKVEKGKSKKLKSVKELLGITIMERSSFEKNPIDFLEAKGYKEVKKDLIIKLPKYSLFELENGRKRMLASAGELQKGNELALPSKYVNFLYLASHYEKLKGSPEDNEQKQLFVEQHKHYLDEIIEQISEFSKRVILADANLDKVLSAYNKHRDKPIREQAENIIHLFTLTNLGAPAAFKYFDTTIDRKRYTSTKEVLDATLIHQSITGLYETRIDLSQLGGDGGGGSGGTLNIEDEYRLHETSKEPDVSLGSTWLSDFPQAWAETGGMGLAVRQAPLIIPLKATSTPVSIKQYPMSQEARLGIKPHIQRLLDQGILVPCQSPWNTPLLPVKKPGTNDYRPVQDLREVNKRVEDIHPTVPNPYNLLSGLPPSHQWYTVLDLKDAFFCLRLHPTSQPLFAFEWRDPEMGISGQLTWTRLPQGFKNSPTLFNEALHRDLAGFRIQHPDLILLQYVDDLLLAATSELDCQQGTRALLQTLGDLGYRASAKKAQICQKQVKYLGYLLKEGQRWLTEARKETVMGQPIPKTPRQLREFLGKAGFCRLFIPGFAEMAAPLYPLTKPGTLFNWGPDQQKAFQEIKQALLTAPALGLPDLTKPFELFVDEKQGYAKGVLTQKLGPWRRPVAYLSKKLDPVAAGWPPCLRMVAAIAVLTKDAGKLTMGQPLVILAPHAVEALVKQPPDRWLSNARMTHYQALLLDTDRVQFGPVVALNPATLLPLPEEGLQHDCLDILAEAHGTRSDLMDQPLPDADHTWYTDGSSFLQEGQRKAGAAVTTETEVIWARALPAGTSAQRAELIALTQALKMAEGKKLNVYTDSRYAFATAHIHGEIYRRRGWLTSEGKEIKNKDEILALLKALFLPKRLSIIHCPGHQKGNSAEARGNRMADQAAREVATRETPETSTLLAGKRTADGSEFEKRTADGSEFESPKKKAKVE

SEQ ID NO: 2324 - protein, 2110 aa, synthetic construct
MPAAKRVKLDGGDKKYSIGLDIGTNSVGWAVITDEYKVPSKKFKVLGNTDRHSIKKNLIGALLFDSGETAEATRLKRTARRRYTRRKNRICYLQEIFSNEMAKVDDSFFHRLEESFLVEEDKKHERHPIFGNIVDEVAYHEKYPTIYHLRKKLVDSTDKADLRLIYLALAHMIKFRGHFLIEGDLNPDNSDVDKLFIQLVQTYNQLFEENPINASGVDAKAILSARLSKSRRLENLIAQLPGEKKNGLFGNLIALSLGLTPNFKSNFDLAEDAKLQLSKDTYDDDLDNLLAQIGDQYADLFLAAKNLSDAILLSDILRVNTEITKAPLSASMIKRYDEHHQDLTLLKALVRQQLPEKYKEIFFDQSKNGYAGYIDGGASQEEFYKFIKPILEKMDGTEELLVKLNREDLLRKQRTFDNGSIPHQIHLGELHAILRRQEDFYPFLKDNREKIEKILTFRIPYYVGPLARGNSRFAWMTRKSEETITPWNFEEVVDKGASAQSFIERMTNFDKNLPNEKVLPKHSLLYEYFTVYNELTKVKYVTEGMRKPAFLSGEQKKAIVDLLFKTNRKVTVKQLKEDYFKKIECFDSVEISGVEDRFNASLGTYHDLLKIIKDKDFLDNEENEDILEDIVLTLTLFEDREMIEERLKTYAHLFDDKVMKQLKRRRYTGWGRLSRKLINGIRDKQSGKTILDFLKSDGFANRNFMQLIHDDSLTFKEDIQKAQVSGQGDSLHEHIANLAGSPAIKKGILQTVKVVDELVKVMGRHKPENIVIEMARENQTTQKGQKNSRERMKRIEEGIKELGSQILKEHPVENTQLQNEKLYLYYLQNGRDMYVDQELDINRLSDYDVDHIVPQSFLKDDSIDNKVLTRSDKARGKSDNVPSEEVVKKMKNYWRQLLNAKLITQRKFDNLTKAERGGLSELDKAGFIKRQLVETRQITKHVAQILDSRMNTKYDENDKLIREVKVITLKSKLVSDFRKDFQFYKVREINNYHHAHDAYLNAVVGTALIKKYPKLESEFVYGDYKVYDVRKMIAKSEQEIGKATAKYFFYSNIMNFFKTEITLANGEIRKRPLIETNGETGEIVWDKGRDFATVRKVLSMPQVNIVKKTEVQTGGFSKESILPKRNSDKLIARKKDWDPKKYGGFDSPTVAYSVLVVAKVEKGKSKKLKSVKELLGITIMERSSFEKNPIDFLEAKGYKEVKKDLIIKLPKYSLFELENGRKRMLASAGELQKGNELALPSKYVNFLYLASHYEKLKGSPEDNEQKQLFVEQHKHYLDEIIEQISEFSKRVILADANLDKVLSAYNKHRDKPIREQAENIIHLFTLTNLGAPAAFKYFDTTIDRKRYTSTKEVLDATLIHQSITGLYETRIDLSQLGGDGGEAAAKEAAAKEAAAKEAAAKEAAAKGGTLNIEDEYRLHETSKEPDVSLGSTWLSDFPQAWAETGGMGLAVRQAPLIIPLKATSTPVSIKQYPMSQEARLGIKPHIQRLLDQGILVPCQSPWNTPLLPVKKPGTNDYRPVQDLREVNKRVEDIHPTVPNPYNLLSGLPPSHQWYTVLDLKDAFFCLRLHPTSQPLFAFEWRDPEMGISGQLTWTRLPQGFKNSPTLFNEALHRDLAGFRIQHPDLILLQYVDDLLLAATSELDCQQGTRALLQTLGDLGYRASAKKAQICQKQVKYLGYLLKEGQRWLTEARKETVMGQPIPKTPRQLREFLGKAGFCRLFIPGFAEMAAPLYPLTKPGTLFNWGPDQQKAFQEIKQALLTAPALGLPDLTKPFELFVDEKQGYAKGVLTQKLGPWRRPVAYLSKKLDPVAAGWPPCLRMVAAIAVLTKDAGKLTMGQPLVILAPHAVEALVKQPPDRWLSNARMTHYQALLLDTDRVQFGPVVALNPATLLPLPEEGLQHDCLDILAEAHGTRSDLMDQPLPDADHTWYTDGSSFLQEGQRKAGAAVTTETEVIWARALPAGTSAQRAELIALTQALKMAEGKKLNVYTDSRYAFATAHIHGEIYRRRGWLTSEGKEIKNKDEILALLKALFLPKRLSIIHCPGHQKGNSAEARGNRMADQAAREVATRETPETSTLLAGKRTADGSEFEKRTADGSEFESPKKKAKVE

SEQ ID NO: 2325 - protein, 2105 aa, synthetic construct
MPAAKRVKLDGGDKKYSIGLDIGTNSVGWAVITDEYKVPSKKFKVLGNTDRHSIKKNLIGALLFDSGETAEATRLKRTARRRYTRRKNRICYLQEIFSNEMAKVDDSFFHRLEESFLVEEDKKHERHPIFGNIVDEVAYHEKYPTIYHLRKKLVDSTDKADLRLIYLALAHMIKFRGHFLIEGDLNPDNSDVDKLFIQLVQTYNQLFEENPINASGVDAKAILSARLSKSRRLENLIAQLPGEKKNGLFGNLIALSLGLTPNFKSNFDLAEDAKLQLSKDTYDDDLDNLLAQIGDQYADLFLAAKNLSDAILLSDILRVNTEITKAPLSASMIKRYDEHHQDLTLLKALVRQQLPEKYKEIFFDQSKNGYAGYIDGGASQEEFYKFIKPILEKMDGTEELLVKLNREDLLRKQRTFDNGSIPHQIHLGELHAILRRQEDFYPFLKDNREKIEKILTFRIPYYVGPLARGNSRFAWMTRKSEETITPWNFEEVVDKGASAQSFIERMTNFDKNLPNEKVLPKHSLLYEYFTVYNELTKVKYVTEGMRKPAFLSGEQKKAIVDLLFKTNRKVTVKQLKEDYFKKIECFDSVEISGVEDRFNASLGTYHDLLKIIKDKDFLDNEENEDILEDIVLTLTLFEDREMIEERLKTYAHLFDDKVMKQLKRRRYTGWGRLSRKLINGIRDKQSGKTILDFLKSDGFANRNFMQLIHDDSLTFKEDIQKAQVSGQGDSLHEHIANLAGSPAIKKGILQTVKVVDELVKVMGRHKPENIVIEMARENQTTQKGQKNSRERMKRIEEGIKELGSQILKEHPVENTQLQNEKLYLYYLQNGRDMYVDQELDINRLSDYDVDHIVPQSFLKDDSIDNKVLTRSDKARGKSDNVPSEEVVKKMKNYWRQLLNAKLITQRKFDNLTKAERGGLSELDKAGFIKRQLVETRQITKHVAQILDSRMNTKYDENDKLIREVKVITLKSKLVSDFRKDFQFYKVREINNYHHAHDAYLNAVVGTALIKKYPKLESEFVYGDYKVYDVRKMIAKSEQEIGKATAKYFFYSNIMNFFKTEITLANGEIRKRPLIETNGETGEIVWDKGRDFATVRKVLSMPQVNIVKKTEVQTGGFSKESILPKRNSDKLIARKKDWDPKKYGGFDSPTVAYSVLVVAKVEKGKSKKLKSVKELLGITIMERSSFEKNPIDFLEAKGYKEVKKDLIIKLPKYSLFELENGRKRMLASAGELQKGNELALPSKYVNFLYLASHYEKLKGSPEDNEQKQLFVEQHKHYLDEIIEQISEFSKRVILADANLDKVLSAYNKHRDKPIREQAENIIHLFTLTNLGAPAAFKYFDTTIDRKRYTSTKEVLDATLIHQSITGLYETRIDLSQLGGDGGEAAAKEAAAKEAAAKEAAAKGGTLNIEDEYRLHETSKEPDVSLGSTWLSDFPQAWAETGGMGLAVRQAPLIIPLKATSTPVSIKQYPMSQEARLGIKPHIQRLLDQGILVPCQSPWNTPLLPVKKPGTNDYRPVQDLREVNKRVEDIHPTVPNPYNLLSGLPPSHQWYTVLDLKDAFFCLRLHPTSQPLFAFEWRDPEMGISGQLTWTRLPQGFKNSPTLFNEALHRDLAGFRIQHPDLILLQYVDDLLLAATSELDCQQGTRALLQTLGDLGYRASAKKAQICQKQVKYLGYLLKEGQRWLTEARKETVMGQPIPKTPRQLREFLGKAGFCRLFIPGFAEMAAPLYPLTKPGTLFNWGPDQQKAFQEIKQALLTAPALGLPDLTKPFELFVDEKQGYAKGVLTQKLGPWRRPVAYLSKKLDPVAAGWPPCLRMVAAIAVLTKDAGKLTMGQPLVILAPHAVEALVKQPPDRWLSNARMTHYQALLLDTDRVQFGPVVALNPATLLPLPEEGLQHDCLDILAEAHGTRSDLMDQPLPDADHTWYTDGSSFLQEGQRKAGAAVTTETEVIWARALPAGTSAQRAELIALTQALKMAEGKKLNVYTDSRYAFATAHIHGEIYRRRGWLTSEGKEIKNKDEILALLKALFLPKRLSIIHCPGHQKGNSAEARGNRMADQAAREVATRETPETSTLLAGKRTADGSEFEKRTADGSEFESPKKKAKVE

SEQ ID NO: 2326 - protein, 2096 aa, synthetic construct
MPAAKRVKLDGGDKKYSIGLDIGTNSVGWAVITDEYKVPSKKFKVLGNTDRHSIKKNLIGALLFDSGETAEATRLKRTARRRYTRRKNRICYLQEIFSNEMAKVDDSFFHRLEESFLVEEDKKHERHPIFGNIVDEVAYHEKYPTIYHLRKKLVDSTDKADLRLIYLALAHMIKFRGHFLIEGDLNPDNSDVDKLFIQLVQTYNQLFEENPINASGVDAKAILSARLSKSRRLENLIAQLPGEKKNGLFGNLIALSLGLTPNFKSNFDLAEDAKLQLSKDTYDDDLDNLLAQIGDQYADLFLAAKNLSDAILLSDILRVNTEITKAPLSASMIKRYDEHHQDLTLLKALVRQQLPEKYKEIFFDQSKNGYAGYIDGGASQEEFYKFIKPILEKMDGTEELLVKLNREDLLRKQRTFDNGSIPHQIHLGELHAILRRQEDFYPFLKDNREKIEKILTFRIPYYVGPLARGNSRFAWMTRKSEETITPWNFEEVVDKGASAQSFIERMTNFDKNLPNEKVLPKHSLLYEYFTVYNELTKVKYVTEGMRKPAFLSGEQKKAIVDLLFKTNRKVTVKQLKEDYFKKIECFDSVEISGVEDRFNASLGTYHDLLKIIKDKDFLDNEENEDILEDIVLTLTLFEDREMIEERLKTYAHLFDDKVMKQLKRRRYTGWGRLSRKLINGIRDKQSGKTILDFLKSDGFANRNFMQLIHDDSLTFKEDIQKAQVSGQGDSLHEHIANLAGSPAIKKGILQTVKVVDELVKVMGRHKPENIVIEMARENQTTQKGQKNSRERMKRIEEGIKELGSQILKEHPVENTQLQNEKLYLYYLQNGRDMYVDQELDINRLSDYDVDHIVPQSFLKDDSIDNKVLTRSDKARGKSDNVPSEEVVKKMKNYWRQLLNAKLITQRKFDNLTKAERGGLSELDKAGFIKRQLVETRQITKHVAQILDSRMNTKYDENDKLIREVKVITLKSKLVSDFRKDFQFYKVREINNYHHAHDAYLNAVVGTALIKKYPKLESEFVYGDYKVYDVRKMIAKSEQEIGKATAKYFFYSNIMNFFKTEITLANGEIRKRPLIETNGETGEIVWDKGRDFATVRKVLSMPQVNIVKKTEVQTGGFSKESILPKRNSDKLIARKKDWDPKKYGGFDSPTVAYSVLVVAKVEKGKSKKLKSVKELLGITIMERSSFEKNPIDFLEAKGYKEVKKDLIIKLPKYSLFELENGRKRMLASAGELQKGNELALPSKYVNFLYLASHYEKLKGSPEDNEQKQLFVEQHKHYLDEIIEQISEFSKRVILADANLDKVLSAYNKHRDKPIREQAENIIHLFTLTNLGAPAAFKYFDTTIDRKRYTSTKEVLDATLIHQSITGLYETRIDLSQLGGDGGGGSEAAAKPAPGGTLNIEDEYRLHETSKEPDVSLGSTWLSDFPQAWAETGGMGLAVRQAPLIIPLKATSTPVSIKQYPMSQEARLGIKPHIQRLLDQGILVPCQSPWNTPLLPVKKPGTNDYRPVQDLREVNKRVEDIHPTVPNPYNLLSGLPPSHQWYTVLDLKDAFFCLRLHPTSQPLFAFEWRDPEMGISGQLTWTRLPQGFKNSPTLFNEALHRDLAGFRIQHPDLILLQYVDDLLLAATSELDCQQGTRALLQTLGDLGYRASAKKAQICQKQVKYLGYLLKEGQRWLTEARKETVMGQPIPKTPRQLREFLGKAGFCRLFIPGFAEMAAPLYPLTKPGTLFNWGPDQQKAFQEIKQALLTAPALGLPDLTKPFELFVDEKQGYAKGVLTQKLGPWRRPVAYLSKKLDPVAAGWPPCLRMVAAIAVLTKDAGKLTMGQPLVILAPHAVEALVKQPPDRWLSNARMTHYQALLLDTDRVQFGPVVALNPATLLPLPEEGLQHDCLDILAEAHGTRSDLMDQPLPDADHTWYTDGSSFLQEGQRKAGAAVTTETEVIWARALPAGTSAQRAELIALTQALKMAEGKKLNVYTDSRYAFATAHIHGEIYRRRGWLTSEGKEIKNKDEILALLKALFLPKRLSIIHCPGHQKGNSAEARGNRMADQAAREVATRETPETSTLLAGKRTADGSEFEKRTADGSEFESPKKKAKVE

SEQ ID NO: 2327 - protein, 2096 aa, synthetic construct
MPAAKRVKLDGGDKKYSIGLDIGTNSVGWAVITDEYKVPSKKFKVLGNTDRHSIKKNLIGALLFDSGETAEATRLKRTARRRYTRRKNRICYLQEIFSNEMAKVDDSFFHRLEESFLVEEDKKHERHPIFGNIVDEVAYHEKYPTIYHLRKKLVDSTDKADLRLIYLALAHMIKFRGHFLIEGDLNPDNSDVDKLFIQLVQTYNQLFEENPINASGVDAKAILSARLSKSRRLENLIAQLPGEKKNGLFGNLIALSLGLTPNFKSNFDLAEDAKLQLSKDTYDDDLDNLLAQIGDQYADLFLAAKNLSDAILLSDILRVNTEITKAPLSASMIKRYDEHHQDLTLLKALVRQQLPEKYKEIFFDQSKNGYAGYIDGGASQEEFYKFIKPILEKMDGTEELLVKLNREDLLRKQRTFDNGSIPHQIHLGELHAILRRQEDFYPFLKDNREKIEKILTFRIPYYVGPLARGNSRFAWMTRKSEETITPWNFEEVVDKGASAQSFIERMTNFDKNLPNEKVLPKHSLLYEYFTVYNELTKVKYVTEGMRKPAFLSGEQKKAIVDLLFKTNRKVTVKQLKEDYFKKIECFDSVEISGVEDRFNASLGTYHDLLKIIKDKDFLDNEENEDILEDIVLTLTLFEDREMIEERLKTYAHLFDDKVMKQLKRRRYTGWGRLSRKLINGIRDKQSGKTILDFLKSDGFANRNFMQLIHDDSLTFKEDIQKAQVSGQGDSLHEHIANLAGSPAIKKGILQTVKVVDELVKVMGRHKPENIVIEMARENQTTQKGQKNSRERMKRIEEGIKELGSQILKEHPVENTQLQNEKLYLYYLQNGRDMYVDQELDINRLSDYDVDHIVPQSFLKDDSIDNKVLTRSDKARGKSDNVPSEEVVKKMKNYWRQLLNAKLITQRKFDNLTKAERGGLSELDKAGFIKRQLVETRQITKHVAQILDSRMNTKYDENDKLIREVKVITLKSKLVSDFRKDFQFYKVREINNYHHAHDAYLNAVVGTALIKKYPKLESEFVYGDYKVYDVRKMIAKSEQEIGKATAKYFFYSNIMNFFKTEITLANGEIRKRPLIETNGETGEIVWDKGRDFATVRKVLSMPQVNIVKKTEVQTGGFSKESILPKRNSDKLIARKKDWDPKKYGGFDSPTVAYSVLVVAKVEKGKSKKLKSVKELLGITIMERSSFEKNPIDFLEAKGYKEVKKDLIIKLPKYSLFELENGRKRMLASAGELQKGNELALPSKYVNFLYLASHYEKLKGSPEDNEQKQLFVEQHKHYLDEIIEQISEFSKRVILADANLDKVLSAYNKHRDKPIREQAENIIHLFTLTNLGAPAAFKYFDTTIDRKRYTSTKEVLDATLIHQSITGLYETRIDLSQLGGDGGGGGGSSEAAAKGGTLNIEDEYRLHETSKEPDVSLGSTWLSDFPQAWAETGGMGLAVRQAPLIIPLKATSTPVSIKQYPMSQEARLGIKPHIQRLLDQGILVPCQSPWNTPLLPVKKPGTNDYRPVQDLREVNKRVEDIHPTVPNPYNLLSGLPPSHQWYTVLDLKDAFFCLRLHPTSQPLFAFEWRDPEMGISGQLTWTRLPQGFKNSPTLFNEALHRDLAGFRIQHPDLILLQYVDDLLLAATSELDCQQGTRALLQTLGDLGYRASAKKAQICQKQVKYLGYLLKEGQRWLTEARKETVMGQPIPKTPRQLREFLGKAGFCRLFIPGFAEMAAPLYPLTKPGTLFNWGPDQQKAFQEIKQALLTAPALGLPDLTKPFELFVDEKQGYAKGVLTQKLGPWRRPVAYLSKKLDPVAAGWPPCLRMVAAIAVLTKDAGKLTMGQPLVILAPHAVEALVKQPPDRWLSNARMTHYQALLLDTDRVQFGPVVALNPATLLPLPEEGLQHDCLDILAEAHGTRSDLMDQPLPDADHTWYTDGSSFLQEGQRKAGAAVTTETEVIWARALPAGTSAQRAELIALTQALKMAEGKKLNVYTDSRYAFATAHIHGEIYRRRGWLTSEGKEIKNKDEILALLKALFLPKRLSIIHCPGHQKGNSAEARGNRMADQAAREVATRETPETSTLLAGKRTADGSEFEKRTADGSEFESPKKKAKVE

SEQ ID NO: 2328 - protein, 2090 aa, synthetic construct
MPAAKRVKLDGGDKKYSIGLDIGTNSVGWAVITDEYKVPSKKFKVLGNTDRHSIKKNLIGALLFDSGETAEATRLKRTARRRYTRRKNRICYLQEIFSNEMAKVDDSFFHRLEESFLVEEDKKHERHPIFGNIVDEVAYHEKYPTIYHLRKKLVDSTDKADLRLIYLALAHMIKFRGHFLIEGDLNPDNSDVDKLFIQLVQTYNQLFEENPINASGVDAKAILSARLSKSRRLENLIAQLPGEKKNGLFGNLIALSLGLTPNFKSNFDLAEDAKLQLSKDTYDDDLDNLLAQIGDQYADLFLAAKNLSDAILLSDILRVNTEITKAPLSASMIKRYDEHHQDLTLLKALVRQQLPEKYKEIFFDQSKNGYAGYIDGGASQEEFYKFIKPILEKMDGTEELLVKLNREDLLRKQRTFDNGSIPHQIHLGELHAILRRQEDFYPFLKDNREKIEKILTFRIPYYVGPLARGNSRFAWMTRKSEETITPWNFEEVVDKGASAQSFIERMTNFDKNLPNEKVLPKHSLLYEYFTVYNELTKVKYVTEGMRKPAFLSGEQKKAIVDLLFKTNRKVTVKQLKEDYFKKIECFDSVEISGVEDRFNASLGTYHDLLKIIKDKDFLDNEENEDILEDIVLTLTLFEDREMIEERLKTYAHLFDDKVMKQLKRRRYTGWGRLSRKLINGIRDKQSGKTILDFLKSDGFANRNFMQLIHDDSLTFKEDIQKAQVSGQGDSLHEHIANLAGSPAIKKGILQTVKVVDELVKVMGRHKPENIVIEMARENQTTQKGQKNSRERMKRIEEGIKELGSQILKEHPVENTQLQNEKLYLYYLQNGRDMYVDQELDINRLSDYDVDHIVPQSFLKDDSIDNKVLTRSDKARGKSDNVPSEEVVKKMKNYWRQLLNAKLITQRKFDNLTKAERGGLSELDKAGFIKRQLVETRQITKHVAQILDSRMNTKYDENDKLIREVKVITLKSKLVSDFRKDFQFYKVREINNYHHAHDAYLNAVVGTALIKKYPKLESEFVYGDYKVYDVRKMIAKSEQEIGKATAKYFFYSNIMNFFKTEITLANGEIRKRPLIETNGETGEIVWDKGRDFATVRKVLSMPQVNIVKKTEVQTGGFSKESILPKRNSDKLIARKKDWDPKKYGGFDSPTVAYSVLVVAKVEKGKSKKLKSVKELLGITIMERSSFEKNPIDFLEAKGYKEVKKDLIIKLPKYSLFELENGRKRMLASAGELQKGNELALPSKYVNFLYLASHYEKLKGSPEDNEQKQLFVEQHKHYLDEIIEQISEFSKRVILADANLDKVLSAYNKHRDKPIREQAENIIHLFTLTNLGAPAAFKYFDTTIDRKRYTSTKEVLDATLIHQSITGLYETRIDLSQLGGDGGEAAAKGGTLNIEDEYRLHETSKEPDVSLGSTWLSDFPQAWAETGGMGLAVRQAPLIIPLKATSTPVSIKQYPMSQEARLGIKPHIQRLLDQGILVPCQSPWNTPLLPVKKPGTNDYRPVQDLREVNKRVEDIHPTVPNPYNLLSGLPPSHQWYTVLDLKDAFFCLRLHPTSQPLFAFEWRDPEMGISGQLTWTRLPQGFKNSPTLFNEALHRDLAGFRIQHPDLILLQYVDDLLLAATSELDCQQGTRALLQTLGDLGYRASAKKAQICQKQVKYLGYLLKEGQRWLTEARKETVMGQPIPKTPRQLREFLGKAGFCRLFIPGFAEMAAPLYPLTKPGTLFNWGPDQQKAFQEIKQALLTAPALGLPDLTKPFELFVDEKQGYAKGVLTQKLGPWRRPVAYLSKKLDPVAAGWPPCLRMVAAIAVLTKDAGKLTMGQPLVILAPHAVEALVKQPPDRWLSNARMTHYQALLLDTDRVQFGPVVALNPATLLPLPEEGLQHDCLDILAEAHGTRSDLMDQPLPDADHTWYTDGSSFLQEGQRKAGAAVTTETEVIWARALPAGTSAQRAELIALTQALKMAEGKKLNVYTDSRYAFATAHIHGEIYRRRGWLTSEGKEIKNKDEILALLKALFLPKRLSIIHCPGHQKGNSAEARGNRMADQAAREVATRETPETSTLLAGKRTADGSEFEKRTADGSEFESPKKKAKVE

SEQ ID NO: 2329 - protein, 2094 aa, synthetic construct
MPAAKRVKLDGGDKKYSIGLDIGTNSVGWAVITDEYKVPSKKFKVLGNTDRHSIKKNLIGALLFDSGETAEATRLKRTARRRYTRRKNRICYLQEIFSNEMAKVDDSFFHRLEESFLVEEDKKHERHPIFGNIVDEVAYHEKYPTIYHLRKKLVDSTDKADLRLIYLALAHMIKFRGHFLIEGDLNPDNSDVDKLFIQLVQTYNQLFEENPINASGVDAKAILSARLSKSRRLENLIAQLPGEKKNGLFGNLIALSLGLTPNFKSNFDLAEDAKLQLSKDTYDDDLDNLLAQIGDQYADLFLAAKNLSDAILLSDILRVNTEITKAPLSASMIKRYDEHHQDLTLLKALVRQQLPEKYKEIFFDQSKNGYAGYIDGGASQEEFYKFIKPILEKMDGTEELLVKLNREDLLRKQRTFDNGSIPHQIHLGELHAILRRQEDFYPFLKDNREKIEKILTFRIPYYVGPLARGNSRFAWMTRKSEETITPWNFEEVVDKGASAQSFIERMTNFDKNLPNEKVLPKHSLLYEYFTVYNELTKVKYVTEGMRKPAFLSGEQKKAIVDLLFKTNRKVTVKQLKEDYFKKIECFDSVEISGVEDRFNASLGTYHDLLKIIKDKDFLDNEENEDILEDIVLTLTLFEDREMIEERLKTYAHLFDDKVMKQLKRRRYTGWGRLSRKLINGIRDKQSGKTILDFLKSDGFANRNFMQLIHDDSLTFKEDIQKAQVSGQGDSLHEHIANLAGSPAIKKGILQTVKVVDELVKVMGRHKPENIVIEMARENQTTQKGQKNSRERMKRIEEGIKELGSQILKEHPVENTQLQNEKLYLYYLQNGRDMYVDQELDINRLSDYDVDHIVPQSFLKDDSIDNKVLTRSDKARGKSDNVPSEEVVKKMKNYWRQLLNAKLITQRKFDNLTKAERGGLSELDKAGFIKRQLVETRQITKHVAQILDSRMNTKYDENDKLIREVKVITLKSKLVSDFRKDFQFYKVREINNYHHAHDAYLNAVVGTALIKKYPKLESEFVYGDYKVYDVRKMIAKSEQEIGKATAKYFFYSNIMNFFKTEITLANGEIRKRPLIETNGETGEIVWDKGRDFATVRKVLSMPQVNIVKKTEVQTGGFSKESILPKRNSDKLIARKKDWDPKKYGGFDSPTVAYSVLVVAKVEKGKSKKLKSVKELLGITIMERSSFEKNPIDFLEAKGYKEVKKDLIIKLPKYSLFELENGRKRMLASAGELQKGNELALPSKYVNFLYLASHYEKLKGSPEDNEQKQLFVEQHKHYLDEIIEQISEFSKRVILADANLDKVLSAYNKHRDKPIREQAENIIHLFTLTNLGAPAAFKYFDTTIDRKRYTSTKEVLDATLIHQSITGLYETRIDLSQLGGDGGGSSPAPGGGGGTLNIEDEYRLHETSKEPDVSLGSTWLSDFPQAWAETGGMGLAVRQAPLIIPLKATSTPVSIKQYPMSQEARLGIKPHIQRLLDQGILVPCQSPWNTPLLPVKKPGTNDYRPVQDLREVNKRVEDIHPTVPNPYNLLSGLPPSHQWYTVLDLKDAFFCLRLHPTSQPLFAFEWRDPEMGISGQLTWTRLPQGFKNSPTLFNEALHRDLAGFRIQHPDLILLQYVDDLLLAATSELDCQQGTRALLQTLGDLGYRASAKKAQICQKQVKYLGYLLKEGQRWLTEARKETVMGQPIPKTPRQLREFLGKAGFCRLFIPGFAEMAAPLYPLTKPGTLFNWGPDQQKAFQEIKQALLTAPALGLPDLTKPFELFVDEKQGYAKGVLTQKLGPWRRPVAYLSKKLDPVAAGWPPCLRMVAAIAVLTKDAGKLTMGQPLVILAPHAVEALVKQPPDRWLSNARMTHYQALLLDTDRVQFGPVVALNPATLLPLPEEGLQHDCLDILAEAHGTRSDLMDQPLPDADHTWYTDGSSFLQEGQRKAGAAVTTETEVIWARALPAGTSAQRAELIALTQALKMAEGKKLNVYTDSRYAFATAHIHGEIYRRRGWLTSEGKEIKNKDEILALLKALFLPKRLSIIHCPGHQKGNSAEARGNRMADQAAREVATRETPETSTLLAGKRTADGSEFEKRTADGSEFESPKKKAKVE

SEQ ID NO: 2330 - protein, 2088 aa, synthetic construct
MPAAKRVKLDGGDKKYSIGLDIGTNSVGWAVITDEYKVPSKKFKVLGNTDRHSIKKNLIGALLFDSGETAEATRLKRTARRRYTRRKNRICYLQEIFSNEMAKVDDSFFHRLEESFLVEEDKKHERHPIFGNIVDEVAYHEKYPTIYHLRKKLVDSTDKADLRLIYLALAHMIKFRGHFLIEGDLNPDNSDVDKLFIQLVQTYNQLFEENPINASGVDAKAILSARLSKSRRLENLIAQLPGEKKNGLFGNLIALSLGLTPNFKSNFDLAEDAKLQLSKDTYDDDLDNLLAQIGDQYADLFLAAKNLSDAILLSDILRVNTEITKAPLSASMIKRYDEHHQDLTLLKALVRQQLPEKYKEIFFDQSKNGYAGYIDGGASQEEFYKFIKPILEKMDGTEELLVKLNREDLLRKQRTFDNGSIPHQIHLGELHAILRRQEDFYPFLKDNREKIEKILTFRIPYYVGPLARGNSRFAWMTRKSEETITPWNFEEVVDKGASAQSFIERMTNFDKNLPNEKVLPKHSLLYEYFTVYNELTKVKYVTEGMRKPAFLSGEQKKAIVDLLFKTNRKVTVKQLKEDYFKKIECFDSVEISGVEDRFNASLGTYHDLLKIIKDKDFLDNEENEDILEDIVLTLTLFEDREMIEERLKTYAHLFDDKVMKQLKRRRYTGWGRLSRKLINGIRDKQSGKTILDFLKSDGFANRNFMQLIHDDSLTFKEDIQKAQVSGQGDSLHEHIANLAGSPAIKKGILQTVKVVDELVKVMGRHKPENIVIEMARENQTTQKGQKNSRERMKRIEEGIKELGSQILKEHPVENTQLQNEKLYLYYLQNGRDMYVDQELDINRLSDYDVDHIVPQSFLKDDSIDNKVLTRSDKARGKSDNVPSEEVVKKMKNYWRQLLNAKLITQRKFDNLTKAERGGLSELDKAGFIKRQLVETRQITKHVAQILDSRMNTKYDENDKLIREVKVITLKSKLVSDFRKDFQFYKVREINNYHHAHDAYLNAVVGTALIKKYPKLESEFVYGDYKVYDVRKMIAKSEQEIGKATAKYFFYSNIMNFFKTEITLANGEIRKRPLIETNGETGEIVWDKGRDFATVRKVLSMPQVNIVKKTEVQTGGFSKESILPKRNSDKLIARKKDWDPKKYGGFDSPTVAYSVLVVAKVEKGKSKKLKSVKELLGITIMERSSFEKNPIDFLEAKGYKEVKKDLIIKLPKYSLFELENGRKRMLASAGELQKGNELALPSKYVNFLYLASHYEKLKGSPEDNEQKQLFVEQHKHYLDEIIEQISEFSKRVILADANLDKVLSAYNKHRDKPIREQAENIIHLFTLTNLGAPAAFKYFDTTIDRKRYTSTKEVLDATLIHQSITGLYETRIDLSQLGGDGGGSSGGTLNIEDEYRLHETSKEPDVSLGSTWLSDFPQAWAETGGMGLAVRQAPLIIPLKATSTPVSIKQYPMSQEARLGIKPHIQRLLDQGILVPCQSPWNTPLLPVKKPGTNDYRPVQDLREVNKRVEDIHPTVPNPYNLLSGLPPSHQWYTVLDLKDAFFCLRLHPTSQPLFAFEWRDPEMGISGQLTWTRLPQGFKNSPTLFNEALHRDLAGFRIQHPDLILLQYVDDLLLAATSELDCQQGTRALLQTLGDLGYRASAKKAQICQKQVKYLGYLLKEGQRWLTEARKETVMGQPIPKTPRQLREFLGKAGFCRLFIPGFAEMAAPLYPLTKPGTLFNWGPDQQKAFQEIKQALLTAPALGLPDLTKPFELFVDEKQGYAKGVLTQKLGPWRRPVAYLSKKLDPVAAGWPPCLRMVAAIAVLTKDAGKLTMGQPLVILAPHAVEALVKQPPDRWLSNARMTHYQALLLDTDRVQFGPVVALNPATLLPLPEEGLQHDCLDILAEAHGTRSDLMDQPLPDADHTWYTDGSSFLQEGQRKAGAAVTTETEVIWARALPAGTSAQRAELIALTQALKMAEGKKLNVYTDSRYAFATAHIHGEIYRRRGWLTSEGKEIKNKDEILALLKALFLPKRLSIIHCPGHQKGNSAEARGNRMADQAAREVATRETPETSTLLAGKRTADGSEFEKRTADGSEFESPKKKAKVE

SEQ ID NO: 2331 - protein, 2094 aa, synthetic construct
MPAAKRVKLDGGDKKYSIGLDIGTNSVGWAVITDEYKVPSKKFKVLGNTDRHSIKKNLIGALLFDSGETAEATRLKRTARRRYTRRKNRICYLQEIFSNEMAKVDDSFFHRLEESFLVEEDKKHERHPIFGNIVDEVAYHEKYPTIYHLRKKLVDSTDKADLRLIYLALAHMIKFRGHFLIEGDLNPDNSDVDKLFIQLVQTYNQLFEENPINASGVDAKAILSARLSKSRRLENLIAQLPGEKKNGLFGNLIALSLGLTPNFKSNFDLAEDAKLQLSKDTYDDDLDNLLAQIGDQYADLFLAAKNLSDAILLSDILRVNTEITKAPLSASMIKRYDEHHQDLTLLKALVRQQLPEKYKEIFFDQSKNGYAGYIDGGASQEEFYKFIKPILEKMDGTEELLVKLNREDLLRKQRTFDNGSIPHQIHLGELHAILRRQEDFYPFLKDNREKIEKILTFRIPYYVGPLARGNSRFAWMTRKSEETITPWNFEEVVDKGASAQSFIERMTNFDKNLPNEKVLPKHSLLYEYFTVYNELTKVKYVTEGMRKPAFLSGEQKKAIVDLLFKTNRKVTVKQLKEDYFKKIECFDSVEISGVEDRFNASLGTYHDLLKIIKDKDFLDNEENEDILEDIVLTLTLFEDREMIEERLKTYAHLFDDKVMKQLKRRRYTGWGRLSRKLINGIRDKQSGKTILDFLKSDGFANRNFMQLIHDDSLTFKEDIQKAQVSGQGDSLHEHIANLAGSPAIKKGILQTVKVVDELVKVMGRHKPENIVIEMARENQTTQKGQKNSRERMKRIEEGIKELGSQILKEHPVENTQLQNEKLYLYYLQNGRDMYVDQELDINRLSDYDVDHIVPQSFLKDDSIDNKVLTRSDKARGKSDNVPSEEVVKKMKNYWRQLLNAKLITQRKFDNLTKAERGGLSELDKAGFIKRQLVETRQITKHVAQILDSRMNTKYDENDKLIREVKVITLKSKLVSDFRKDFQFYKVREINNYHHAHDAYLNAVVGTALIKKYPKLESEFVYGDYKVYDVRKMIAKSEQEIGKATAKYFFYSNIMNFFKTEITLANGEIRKRPLIETNGETGEIVWDKGRDFATVRKVLSMPQVNIVKKTEVQTGGFSKESILPKRNSDKLIARKKDWDPKKYGGFDSPTVAYSVLVVAKVEKGKSKKLKSVKELLGITIMERSSFEKNPIDFLEAKGYKEVKKDLIIKLPKYSLFELENGRKRMLASAGELQKGNELALPSKYVNFLYLASHYEKLKGSPEDNEQKQLFVEQHKHYLDEIIEQISEFSKRVILADANLDKVLSAYNKHRDKPIREQAENIIHLFTLTNLGAPAAFKYFDTTIDRKRYTSTKEVLDATLIHQSITGLYETRIDLSQLGGDGGGGSGSSGGGGGTLNIEDEYRLHETSKEPDVSLGSTWLSDFPQAWAETGGMGLAVRQAPLIIPLKATSTPVSIKQYPMSQEARLGIKPHIQRLLDQGILVPCQSPWNTPLLPVKKPGTNDYRPVQDLREVNKRVEDIHPTVPNPYNLLSGLPPSHQWYTVLDLKDAFFCLRLHPTSQPLFAFEWRDPEMGISGQLTWTRLPQGFKNSPTLFNEALHRDLAGFRIQHPDLILLQYVDDLLLAATSELDCQQGTRALLQTLGDLGYRASAKKAQICQKQVKYLGYLLKEGQRWLTEARKETVMGQPIPKTPRQLREFLGKAGFCRLFIPGFAEMAAPLYPLTKPGTLFNWGPDQQKAFQEIKQALLTAPALGLPDLTKPFELFVDEKQGYAKGVLTQKLGPWRRPVAYLSKKLDPVAAGWPPCLRMVAAIAVLTKDAGKLTMGQPLVILAPHAVEALVKQPPDRWLSNARMTHYQALLLDTDRVQFGPVVALNPATLLPLPEEGLQHDCLDILAEAHGTRSDLMDQPLPDADHTWYTDGSSFLQEGQRKAGAAVTTETEVIWARALPAGTSAQRAELIALTQALKMAEGKKLNVYTDSRYAFATAHIHGEIYRRRGWLTSEGKEIKNKDEILALLKALFLPKRLSIIHCPGHQKGNSAEARGNRMADQAAREVATRETPETSTLLAGKRTADGSEFEKRTADGSEFESPKKKAKVE

SEQ ID NO: 2332 - protein, 2096 aa, synthetic construct
MPAAKRVKLDGGDKKYSIGLDIGTNSVGWAVITDEYKVPSKKFKVLGNTDRHSIKKNLIGALLFDSGETAEATRLKRTARRRYTRRKNRICYLQEIFSNEMAKVDDSFFHRLEESFLVEEDKKHERHPIFGNIVDEVAYHEKYPTIYHLRKKLVDSTDKADLRLIYLALAHMIKFRGHFLIEGDLNPDNSDVDKLFIQLVQTYNQLFEENPINASGVDAKAILSARLSKSRRLENLIAQLPGEKKNGLFGNLIALSLGLTPNFKSNFDLAEDAKLQLSKDTYDDDLDNLLAQIGDQYADLFLAAKNLSDAILLSDILRVNTEITKAPLSASMIKRYDEHHQDLTLLKALVRQQLPEKYKEIFFDQSKNGYAGYIDGGASQEEFYKFIKPILEKMDGTEELLVKLNREDLLRKQRTFDNGSIPHQIHLGELHAILRRQEDFYPFLKDNREKIEKILTFRIPYYVGPLARGNSRFAWMTRKSEETITPWNFEEVVDKGASAQSFIERMTNFDKNLPNEKVLPKHSLLYEYFTVYNELTKVKYVTEGMRKPAFLSGEQKKAIVDLLFKTNRKVTVKQLKEDYFKKIECFDSVEISGVEDRFNASLGTYHDLLKIIKDKDFLDNEENEDILEDIVLTLTLFEDREMIEERLKTYAHLFDDKVMKQLKRRRYTGWGRLSRKLINGIRDKQSGKTILDFLKSDGFANRNFMQLIHDDSLTFKEDIQKAQVSGQGDSLHEHIANLAGSPAIKKGILQTVKVVDELVKVMGRHKPENIVIEMARENQTTQKGQKNSRERMKRIEEGIKELGSQILKEHPVENTQLQNEKLYLYYLQNGRDMYVDQELDINRLSDYDVDHIVPQSFLKDDSIDNKVLTRSDKARGKSDNVPSEEVVKKMKNYWRQLLNAKLITQRKFDNLTKAERGGLSELDKAGFIKRQLVETRQITKHVAQILDSRMNTKYDENDKLIREVKVITLKSKLVSDFRKDFQFYKVREINNYHHAHDAYLNAVVGTALIKKYPKLESEFVYGDYKVYDVRKMIAKSEQEIGKATAKYFFYSNIMNFFKTEITLANGEIRKRPLIETNGETGEIVWDKGRDFATVRKVLSMPQVNIVKKTEVQTGGFSKESILPKRNSDKLIARKKDWDPKKYGGFDSPTVAYSVLVVAKVEKGKSKKLKSVKELLGITIMERSSFEKNPIDFLEAKGYKEVKKDLIIKLPKYSLFELENGRKRMLASAGELQKGNELALPSKYVNFLYLASHYEKLKGSPEDNEQKQLFVEQHKHYLDEIIEQISEFSKRVILADANLDKVLSAYNKHRDKPIREQAENIIHLFTLTNLGAPAAFKYFDTTIDRKRYTSTKEVLDATLIHQSITGLYETRIDLSQLGGDGGPAPGGSEAAAKGGTLNIEDEYRLHETSKEPDVSLGSTWLSDFPQAWAETGGMGLAVRQAPLIIPLKATSTPVSIKQYPMSQEARLGIKPHIQRLLDQGILVPCQSPWNTPLLPVKKPGTNDYRPVQDLREVNKRVEDIHPTVPNPYNLLSGLPPSHQWYTVLDLKDAFFCLRLHPTSQPLFAFEWRDPEMGISGQLTWTRLPQGFKNSPTLFNEALHRDLAGFRIQHPDLILLQYVDDLLLAATSELDCQQGTRALLQTLGDLGYRASAKKAQICQKQVKYLGYLLKEGQRWLTEARKETVMGQPIPKTPRQLREFLGKAGFCRLFIPGFAEMAAPLYPLTKPGTLFNWGPDQQKAFQEIKQALLTAPALGLPDLTKPFELFVDEKQGYAKGVLTQKLGPWRRPVAYLSKKLDPVAAGWPPCLRMVAAIAVLTKDAGKLTMGQPLVILAPHAVEALVKQPPDRWLSNARMTHYQALLLDTDRVQFGPVVALNPATLLPLPEEGLQHDCLDILAEAHGTRSDLMDQPLPDADHTWYTDGSSFLQEGQRKAGAAVTTETEVIWARALPAGTSAQRAELIALTQALKMAEGKKLNVYTDSRYAFATAHIHGEIYRRRGWLTSEGKEIKNKDEILALLKALFLPKRLSIIHCPGHQKGNSAEARGNRMADQAAREVATRETPETSTLLAGKRTADGSEFEKRTADGSEFESPKKKAKVE

SEQ ID NO: 2333 - protein, 2100 aa, synthetic construct
MPAAKRVKLDGGDKKYSIGLDIGTNSVGWAVITDEYKVPSKKFKVLGNTDRHSIKKNLIGALLFDSGETAEATRLKRTARRRYTRRKNRICYLQEIFSNEMAKVDDSFFHRLEESFLVEEDKKHERHPIFGNIVDEVAYHEKYPTIYHLRKKLVDSTDKADLRLIYLALAHMIKFRGHFLIEGDLNPDNSDVDKLFIQLVQTYNQLFEENPINASGVDAKAILSARLSKSRRLENLIAQLPGEKKNGLFGNLIALSLGLTPNFKSNFDLAEDAKLQLSKDTYDDDLDNLLAQIGDQYADLFLAAKNLSDAILLSDILRVNTEITKAPLSASMIKRYDEHHQDLTLLKALVRQQLPEKYKEIFFDQSKNGYAGYIDGGASQEEFYKFIKPILEKMDGTEELLVKLNREDLLRKQRTFDNGSIPHQIHLGELHAILRRQEDFYPFLKDNREKIEKILTFRIPYYVGPLARGNSRFAWMTRKSEETITPWNFEEVVDKGASAQSFIERMTNFDKNLPNEKVLPKHSLLYEYFTVYNELTKVKYVTEGMRKPAFLSGEQKKAIVDLLFKTNRKVTVKQLKEDYFKKIECFDSVEISGVEDRFNASLGTYHDLLKIIKDKDFLDNEENEDILEDIVLTLTLFEDREMIEERLKTYAHLFDDKVMKQLKRRRYTGWGRLSRKLINGIRDKQSGKTILDFLKSDGFANRNFMQLIHDDSLTFKEDIQKAQVSGQGDSLHEHIANLAGSPAIKKGILQTVKVVDELVKVMGRHKPENIVIEMARENQTTQKGQKNSRERMKRIEEGIKELGSQILKEHPVENTQLQNEKLYLYYLQNGRDMYVDQELDINRLSDYDVDHIVPQSFLKDDSIDNKVLTRSDKARGKSDNVPSEEVVKKMKNYWRQLLNAKLITQRKFDNLTKAERGGLSELDKAGFIKRQLVETRQITKHVAQILDSRMNTKYDENDKLIREVKVITLKSKLVSDFRKDFQFYKVREINNYHHAHDAYLNAVVGTALIKKYPKLESEFVYGDYKVYDVRKMIAKSEQEIGKATAKYFFYSNIMNFFKTEITLANGEIRKRPLIETNGETGEIVWDKGRDFATVRKVLSMPQVNIVKKTEVQTGGFSKESILPKRNSDKLIARKKDWDPKKYGGFDSPTVAYSVLVVAKVEKGKSKKLKSVKELLGITIMERSSFEKNPIDFLEAKGYKEVKKDLIIKLPKYSLFELENGRKRMLASAGELQKGNELALPSKYVNFLYLASHYEKLKGSPEDNEQKQLFVEQHKHYLDEIIEQISEFSKRVILADANLDKVLSAYNKHRDKPIREQAENIIHLFTLTNLGAPAAFKYFDTTIDRKRYTSTKEVLDATLIHQSITGLYETRIDLSQLGGDGGGGGGSGGGGSGGGGSGGTLNIEDEYRLHETSKEPDVSLGSTWLSDFPQAWAETGGMGLAVRQAPLIIPLKATSTPVSIKQYPMSQEARLGIKPHIQRLLDQGILVPCQSPWNTPLLPVKKPGTNDYRPVQDLREVNKRVEDIHPTVPNPYNLLSGLPPSHQWYTVLDLKDAFFCLRLHPTSQPLFAFEWRDPEMGISGQLTWTRLPQGFKNSPTLFNEALHRDLAGFRIQHPDLILLQYVDDLLLAATSELDCQQGTRALLQTLGDLGYRASAKKAQICQKQVKYLGYLLKEGQRWLTEARKETVMGQPIPKTPRQLREFLGKAGFCRLFIPGFAEMAAPLYPLTKPGTLFNWGPDQQKAFQEIKQALLTAPALGLPDLTKPFELFVDEKQGYAKGVLTQKLGPWRRPVAYLSKKLDPVAAGWPPCLRMVAAIAVLTKDAGKLTMGQPLVILAPHAVEALVKQPPDRWLSNARMTHYQALLLDTDRVQFGPVVALNPATLLPLPEEGLQHDCLDILAEAHGTRSDLMDQPLPDADHTWYTDGSSFLQEGQRKAGAAVTTETEVIWARALPAGTSAQRAELIALTQALKMAEGKKLNVYTDSRYAFATAHIHGEIYRRRGWLTSEGKEIKNKDEILALLKALFLPKRLSIIHCPGHQKGNSAEARGNRMADQAAREVATRETPETSTLLAGKRTADGSEFEKRTADGSEFESPKKKAKVE

SEQ ID NO: 2334 - protein, 2096 aa, synthetic construct
MPAAKRVKLDGGDKKYSIGLDIGTNSVGWAVITDEYKVPSKKFKVLGNTDRHSIKKNLIGALLFDSGETAEATRLKRTARRRYTRRKNRICYLQEIFSNEMAKVDDSFFHRLEESFLVEEDKKHERHPIFGNIVDEVAYHEKYPTIYHLRKKLVDSTDKADLRLIYLALAHMIKFRGHFLIEGDLNPDNSDVDKLFIQLVQTYNQLFEENPINASGVDAKAILSARLSKSRRLENLIAQLPGEKKNGLFGNLIALSLGLTPNFKSNFDLAEDAKLQLSKDTYDDDLDNLLAQIGDQYADLFLAAKNLSDAILLSDILRVNTEITKAPLSASMIKRYDEHHQDLTLLKALVRQQLPEKYKEIFFDQSKNGYAGYIDGGASQEEFYKFIKPILEKMDGTEELLVKLNREDLLRKQRTFDNGSIPHQIHLGELHAILRRQEDFYPFLKDNREKIEKILTFRIPYYVGPLARGNSRFAWMTRKSEETITPWNFEEVVDKGASAQSFIERMTNFDKNLPNEKVLPKHSLLYEYFTVYNELTKVKYVTEGMRKPAFLSGEQKKAIVDLLFKTNRKVTVKQLKEDYFKKIECFDSVEISGVEDRFNASLGTYHDLLKIIKDKDFLDNEENEDILEDIVLTLTLFEDREMIEERLKTYAHLFDDKVMKQLKRRRYTGWGRLSRKLINGIRDKQSGKTILDFLKSDGFANRNFMQLIHDDSLTFKEDIQKAQVSGQGDSLHEHIANLAGSPAIKKGILQTVKVVDELVKVMGRHKPENIVIEMARENQTTQKGQKNSRERMKRIEEGIKELGSQILKEHPVENTQLQNEKLYLYYLQNGRDMYVDQELDINRLSDYDVDHIVPQSFLKDDSIDNKVLTRSDKARGKSDNVPSEEVVKKMKNYWRQLLNAKLITQRKFDNLTKAERGGLSELDKAGFIKRQLVETRQITKHVAQILDSRMNTKYDENDKLIREVKVITLKSKLVSDFRKDFQFYKVREINNYHHAHDAYLNAVVGTALIKKYPKLESEFVYGDYKVYDVRKMIAKSEQEIGKATAKYFFYSNIMNFFKTEITLANGEIRKRPLIETNGETGEIVWDKGRDFATVRKVLSMPQVNIVKKTEVQTGGFSKESILPKRNSDKLIARKKDWDPKKYGGFDSPTVAYSVLVVAKVEKGKSKKLKSVKELLGITIMERSSFEKNPIDFLEAKGYKEVKKDLIIKLPKYSLFELENGRKRMLASAGELQKGNELALPSKYVNFLYLASHYEKLKGSPEDNEQKQLFVEQHKHYLDEIIEQISEFSKRVILADANLDKVLSAYNKHRDKPIREQAENIIHLFTLTNLGAPAAFKYFDTTIDRKRYTSTKEVLDATLIHQSITGLYETRIDLSQLGGDGGEAAAKGGSGGGGGTLNIEDEYRLHETSKEPDVSLGSTWLSDFPQAWAETGGMGLAVRQAPLIIPLKATSTPVSIKQYPMSQEARLGIKPHIQRLLDQGILVPCQSPWNTPLLPVKKPGTNDYRPVQDLREVNKRVEDIHPTVPNPYNLLSGLPPSHQWYTVLDLKDAFFCLRLHPTSQPLFAFEWRDPEMGISGQLTWTRLPQGFKNSPTLFNEALHRDLAGFRIQHPDLILLQYVDDLLLAATSELDCQQGTRALLQTLGDLGYRASAKKAQICQKQVKYLGYLLKEGQRWLTEARKETVMGQPIPKTPRQLREFLGKAGFCRLFIPGFAEMAAPLYPLTKPGTLFNWGPDQQKAFQEIKQALLTAPALGLPDLTKPFELFVDEKQGYAKGVLTQKLGPWRRPVAYLSKKLDPVAAGWPPCLRMVAAIAVLTKDAGKLTMGQPLVILAPHAVEALVKQPPDRWLSNARMTHYQALLLDTDRVQFGPVVALNPATLLPLPEEGLQHDCLDILAEAHGTRSDLMDQPLPDADHTWYTDGSSFLQEGQRKAGAAVTTETEVIWARALPAGTSAQRAELIALTQALKMAEGKKLNVYTDSRYAFATAHIHGEIYRRRGWLTSEGKEIKNKDEILALLKALFLPKRLSIIHCPGHQKGNSAEARGNRMADQAAREVATRETPETSTLLAGKRTADGSEFEKRTADGSEFESPKKKAKVE

SEQ ID NO: 2335 - protein, 2091 aa, synthetic construct
MPAAKRVKLDGGDKKYSIGLDIGTNSVGWAVITDEYKVPSKKFKVLGNTDRHSIKKNLIGALLFDSGETAEATRLKRTARRRYTRRKNRICYLQEIFSNEMAKVDDSFFHRLEESFLVEEDKKHERHPIFGNIVDEVAYHEKYPTIYHLRKKLVDSTDKADLRLIYLALAHMIKFRGHFLIEGDLNPDNSDVDKLFIQLVQTYNQLFEENPINASGVDAKAILSARLSKSRRLENLIAQLPGEKKNGLFGNLIALSLGLTPNFKSNFDLAEDAKLQLSKDTYDDDLDNLLAQIGDQYADLFLAAKNLSDAILLSDILRVNTEITKAPLSASMIKRYDEHHQDLTLLKALVRQQLPEKYKEIFFDQSKNGYAGYIDGGASQEEFYKFIKPILEKMDGTEELLVKLNREDLLRKQRTFDNGSIPHQIHLGELHAILRRQEDFYPFLKDNREKIEKILTFRIPYYVGPLARGNSRFAWMTRKSEETITPWNFEEVVDKGASAQSFIERMTNFDKNLPNEKVLPKHSLLYEYFTVYNELTKVKYVTEGMRKPAFLSGEQKKAIVDLLFKTNRKVTVKQLKEDYFKKIECFDSVEISGVEDRFNASLGTYHDLLKIIKDKDFLDNEENEDILEDIVLTLTLFEDREMIEERLKTYAHLFDDKVMKQLKRRRYTGWGRLSRKLINGIRDKQSGKTILDFLKSDGFANRNFMQLIHDDSLTFKEDIQKAQVSGQGDSLHEHIANLAGSPAIKKGILQTVKVVDELVKVMGRHKPENIVIEMARENQTTQKGQKNSRERMKRIEEGIKELGSQILKEHPVENTQLQNEKLYLYYLQNGRDMYVDQELDINRLSDYDVDHIVPQSFLKDDSIDNKVLTRSDKARGKSDNVPSEEVVKKMKNYWRQLLNAKLITQRKFDNLTKAERGGLSELDKAGFIKRQLVETRQITKHVAQILDSRMNTKYDENDKLIREVKVITLKSKLVSDFRKDFQFYKVREINNYHHAHDAYLNAVVGTALIKKYPKLESEFVYGDYKVYDVRKMIAKSEQEIGKATAKYFFYSNIMNFFKTEITLANGEIRKRPLIETNGETGEIVWDKGRDFATVRKVLSMPQVNIVKKTEVQTGGFSKESILPKRNSDKLIARKKDWDPKKYGGFDSPTVAYSVLVVAKVEKGKSKKLKSVKELLGITIMERSSFEKNPIDFLEAKGYKEVKKDLIIKLPKYSLFELENGRKRMLASAGELQKGNELALPSKYVNFLYLASHYEKLKGSPEDNEQKQLFVEQHKHYLDEIIEQISEFSKRVILADANLDKVLSAYNKHRDKPIREQAENIIHLFTLTNLGAPAAFKYFDTTIDRKRYTSTKEVLDATLIHQSITGLYETRIDLSQLGGDGGGGSGGGGGTLNIEDEYRLHETSKEPDVSLGSTWLSDFPQAWAETGGMGLAVRQAPLIIPLKATSTPVSIKQYPMSQEARLGIKPHIQRLLDQGILVPCQSPWNTPLLPVKKPGTNDYRPVQDLREVNKRVEDIHPTVPNPYNLLSGLPPSHQWYTVLDLKDAFFCLRLHPTSQPLFAFEWRDPEMGISGQLTWTRLPQGFKNSPTLFNEALHRDLAGFRIQHPDLILLQYVDDLLLAATSELDCQQGTRALLQTLGDLGYRASAKKAQICQKQVKYLGYLLKEGQRWLTEARKETVMGQPIPKTPRQLREFLGKAGFCRLFIPGFAEMAAPLYPLTKPGTLFNWGPDQQKAFQEIKQALLTAPALGLPDLTKPFELFVDEKQGYAKGVLTQKLGPWRRPVAYLSKKLDPVAAGWPPCLRMVAAIAVLTKDAGKLTMGQPLVILAPHAVEALVKQPPDRWLSNARMTHYQALLLDTDRVQFGPVVALNPATLLPLPEEGLQHDCLDILAEAHGTRSDLMDQPLPDADHTWYTDGSSFLQEGQRKAGAAVTTETEVIWARALPAGTSAQRAELIALTQALKMAEGKKLNVYTDSRYAFATAHIHGEIYRRRGWLTSEGKEIKNKDEILALLKALFLPKRLSIIHCPGHQKGNSAEARGNRMADQAAREVATRETPETSTLLAGKRTADGSEFEKRTADGSEFESPKKKAKVE

SEQ ID NO: 2336 - protein, 2091 aa, synthetic construct
MPAAKRVKLDGGDKKYSIGLDIGTNSVGWAVITDEYKVPSKKFKVLGNTDRHSIKKNLIGALLFDSGETAEATRLKRTARRRYTRRKNRICYLQEIFSNEMAKVDDSFFHRLEESFLVEEDKKHERHPIFGNIVDEVAYHEKYPTIYHLRKKLVDSTDKADLRLIYLALAHMIKFRGHFLIEGDLNPDNSDVDKLFIQLVQTYNQLFEENPINASGVDAKAILSARLSKSRRLENLIAQLPGEKKNGLFGNLIALSLGLTPNFKSNFDLAEDAKLQLSKDTYDDDLDNLLAQIGDQYADLFLAAKNLSDAILLSDILRVNTEITKAPLSASMIKRYDEHHQDLTLLKALVRQQLPEKYKEIFFDQSKNGYAGYIDGGASQEEFYKFIKPILEKMDGTEELLVKLNREDLLRKQRTFDNGSIPHQIHLGELHAILRRQEDFYPFLKDNREKIEKILTFRIPYYVGPLARGNSRFAWMTRKSEETITPWNFEEVVDKGASAQSFIERMTNFDKNLPNEKVLPKHSLLYEYFTVYNELTKVKYVTEGMRKPAFLSGEQKKAIVDLLFKTNRKVTVKQLKEDYFKKIECFDSVEISGVEDRFNASLGTYHDLLKIIKDKDFLDNEENEDILEDIVLTLTLFEDREMIEERLKTYAHLFDDKVMKQLKRRRYTGWGRLSRKLINGIRDKQSGKTILDFLKSDGFANRNFMQLIHDDSLTFKEDIQKAQVSGQGDSLHEHIANLAGSPAIKKGILQTVKVVDELVKVMGRHKPENIVIEMARENQTTQKGQKNSRERMKRIEEGIKELGSQILKEHPVENTQLQNEKLYLYYLQNGRDMYVDQELDINRLSDYDVDHIVPQSFLKDDSIDNKVLTRSDKARGKSDNVPSEEVVKKMKNYWRQLLNAKLITQRKFDNLTKAERGGLSELDKAGFIKRQLVETRQITKHVAQILDSRMNTKYDENDKLIREVKVITLKSKLVSDFRKDFQFYKVREINNYHHAHDAYLNAVVGTALIKKYPKLESEFVYGDYKVYDVRKMIAKSEQEIGKATAKYFFYSNIMNFFKTEITLANGEIRKRPLIETNGETGEIVWDKGRDFATVRKVLSMPQVNIVKKTEVQTGGFSKESILPKRNSDKLIARKKDWDPKKYGGFDSPTVAYSVLVVAKVEKGKSKKLKSVKELLGITIMERSSFEKNPIDFLEAKGYKEVKKDLIIKLPKYSLFELENGRKRMLASAGELQKGNELALPSKYVNFLYLASHYEKLKGSPEDNEQKQLFVEQHKHYLDEIIEQISEFSKRVILADANLDKVLSAYNKHRDKPIREQAENIIHLFTLTNLGAPAAFKYFDTTIDRKRYTSTKEVLDATLIHQSITGLYETRIDLSQLGGDGGPAPGSSGGTLNIEDEYRLHETSKEPDVSLGSTWLSDFPQAWAETGGMGLAVRQAPLIIPLKATSTPVSIKQYPMSQEARLGIKPHIQRLLDQGILVPCQSPWNTPLLPVKKPGTNDYRPVQDLREVNKRVEDIHPTVPNPYNLLSGLPPSHQWYTVLDLKDAFFCLRLHPTSQPLFAFEWRDPEMGISGQLTWTRLPQGFKNSPTLFNEALHRDLAGFRIQHPDLILLQYVDDLLLAATSELDCQQGTRALLQTLGDLGYRASAKKAQICQKQVKYLGYLLKEGQRWLTEARKETVMGQPIPKTPRQLREFLGKAGFCRLFIPGFAEMAAPLYPLTKPGTLFNWGPDQQKAFQEIKQALLTAPALGLPDLTKPFELFVDEKQGYAKGVLTQKLGPWRRPVAYLSKKLDPVAAGWPPCLRMVAAIAVLTKDAGKLTMGQPLVILAPHAVEALVKQPPDRWLSNARMTHYQALLLDTDRVQFGPVVALNPATLLPLPEEGLQHDCLDILAEAHGTRSDLMDQPLPDADHTWYTDGSSFLQEGQRKAGAAVTTETEVIWARALPAGTSAQRAELIALTQALKMAEGKKLNVYTDSRYAFATAHIHGEIYRRRGWLTSEGKEIKNKDEILALLKALFLPKRLSIIHCPGHQKGNSAEARGNRMADQAAREVATRETPETSTLLAGKRTADGSEFEKRTADGSEFESPKKKAKVE

SEQ ID NO: 2337 - protein, 2093 aa, synthetic construct
MPAAKRVKLDGGDKKYSIGLDIGTNSVGWAVITDEYKVPSKKFKVLGNTDRHSIKKNLIGALLFDSGETAEATRLKRTARRRYTRRKNRICYLQEIFSNEMAKVDDSFFHRLEESFLVEEDKKHERHPIFGNIVDEVAYHEKYPTIYHLRKKLVDSTDKADLRLIYLALAHMIKFRGHFLIEGDLNPDNSDVDKLFIQLVQTYNQLFEENPINASGVDAKAILSARLSKSRRLENLIAQLPGEKKNGLFGNLIALSLGLTPNFKSNFDLAEDAKLQLSKDTYDDDLDNLLAQIGDQYADLFLAAKNLSDAILLSDILRVNTEITKAPLSASMIKRYDEHHQDLTLLKALVRQQLPEKYKEIFFDQSKNGYAGYIDGGASQEEFYKFIKPILEKMDGTEELLVKLNREDLLRKQRTFDNGSIPHQIHLGELHAILRRQEDFYPFLKDNREKIEKILTFRIPYYVGPLARGNSRFAWMTRKSEETITPWNFEEVVDKGASAQSFIERMTNFDKNLPNEKVLPKHSLLYEYFTVYNELTKVKYVTEGMRKPAFLSGEQKKAIVDLLFKTNRKVTVKQLKEDYFKKIECFDSVEISGVEDRFNASLGTYHDLLKIIKDKDFLDNEENEDILEDIVLTLTLFEDREMIEERLKTYAHLFDDKVMKQLKRRRYTGWGRLSRKLINGIRDKQSGKTILDFLKSDGFANRNFMQLIHDDSLTFKEDIQKAQVSGQGDSLHEHIANLAGSPAIKKGILQTVKVVDELVKVMGRHKPENIVIEMARENQTTQKGQKNSRERMKRIEEGIKELGSQILKEHPVENTQLQNEKLYLYYLQNGRDMYVDQELDINRLSDYDVDHIVPQSFLKDDSIDNKVLTRSDKARGKSDNVPSEEVVKKMKNYWRQLLNAKLITQRKFDNLTKAERGGLSELDKAGFIKRQLVETRQITKHVAQILDSRMNTKYDENDKLIREVKVITLKSKLVSDFRKDFQFYKVREINNYHHAHDAYLNAVVGTALIKKYPKLESEFVYGDYKVYDVRKMIAKSEQEIGKATAKYFFYSNIMNFFKTEITLANGEIRKRPLIETNGETGEIVWDKGRDFATVRKVLSMPQVNIVKKTEVQTGGFSKESILPKRNSDKLIARKKDWDPKKYGGFDSPTVAYSVLVVAKVEKGKSKKLKSVKELLGITIMERSSFEKNPIDFLEAKGYKEVKKDLIIKLPKYSLFELENGRKRMLASAGELQKGNELALPSKYVNFLYLASHYEKLKGSPEDNEQKQLFVEQHKHYLDEIIEQISEFSKRVILADANLDKVLSAYNKHRDKPIREQAENIIHLFTLTNLGAPAAFKYFDTTIDRKRYTSTKEVLDATLIHQSITGLYETRIDLSQLGGDGGEAAAKPAPGGTLNIEDEYRLHETSKEPDVSLGSTWLSDFPQAWAETGGMGLAVRQAPLIIPLKATSTPVSIKQYPMSQEARLGIKPHIQRLLDQGILVPCQSPWNTPLLPVKKPGTNDYRPVQDLREVNKRVEDIHPTVPNPYNLLSGLPPSHQWYTVLDLKDAFFCLRLHPTSQPLFAFEWRDPEMGISGQLTWTRLPQGFKNSPTLFNEALHRDLAGFRIQHPDLILLQYVDDLLLAATSELDCQQGTRALLQTLGDLGYRASAKKAQICQKQVKYLGYLLKEGQRWLTEARKETVMGQPIPKTPRQLREFLGKAGFCRLFIPGFAEMAAPLYPLTKPGTLFNWGPDQQKAFQEIKQALLTAPALGLPDLTKPFELFVDEKQGYAKGVLTQKLGPWRRPVAYLSKKLDPVAAGWPPCLRMVAAIAVLTKDAGKLTMGQPLVILAPHAVEALVKQPPDRWLSNARMTHYQALLLDTDRVQFGPVVALNPATLLPLPEEGLQHDCLDILAEAHGTRSDLMDQPLPDADHTWYTDGSSFLQEGQRKAGAAVTTETEVIWARALPAGTSAQRAELIALTQALKMAEGKKLNVYTDSRYAFATAHIHGEIYRRRGWLTSEGKEIKNKDEILALLKALFLPKRLSIIHCPGHQKGNSAEARGNRMADQAAREVATRETPETSTLLAGKRTADGSEFEKRTADGSEFESPKKKAKVE

SEQ ID NO: 2338 - protein, 2096 aa, synthetic construct
MPAAKRVKLDGGDKKYSIGLDIGTNSVGWAVITDEYKVPSKKFKVLGNTDRHSIKKNLIGALLFDSGETAEATRLKRTARRRYTRRKNRICYLQEIFSNEMAKVDDSFFHRLEESFLVEEDKKHERHPIFGNIVDEVAYHEKYPTIYHLRKKLVDSTDKADLRLIYLALAHMIKFRGHFLIEGDLNPDNSDVDKLFIQLVQTYNQLFEENPINASGVDAKAILSARLSKSRRLENLIAQLPGEKKNGLFGNLIALSLGLTPNFKSNFDLAEDAKLQLSKDTYDDDLDNLLAQIGDQYADLFLAAKNLSDAILLSDILRVNTEITKAPLSASMIKRYDEHHQDLTLLKALVRQQLPEKYKEIFFDQSKNGYAGYIDGGASQEEFYKFIKPILEKMDGTEELLVKLNREDLLRKQRTFDNGSIPHQIHLGELHAILRRQEDFYPFLKDNREKIEKILTFRIPYYVGPLARGNSRFAWMTRKSEETITPWNFEEVVDKGASAQSFIERMTNFDKNLPNEKVLPKHSLLYEYFTVYNELTKVKYVTEGMRKPAFLSGEQKKAIVDLLFKTNRKVTVKQLKEDYFKKIECFDSVEISGVEDRFNASLGTYHDLLKIIKDKDFLDNEENEDILEDIVLTLTLFEDREMIEERLKTYAHLFDDKVMKQLKRRRYTGWGRLSRKLINGIRDKQSGKTILDFLKSDGFANRNFMQLIHDDSLTFKEDIQKAQVSGQGDSLHEHIANLAGSPAIKKGILQTVKVVDELVKVMGRHKPENIVIEMARENQTTQKGQKNSRERMKRIEEGIKELGSQILKEHPVENTQLQNEKLYLYYLQNGRDMYVDQELDINRLSDYDVDHIVPQSFLKDDSIDNKVLTRSDKARGKSDNVPSEEVVKKMKNYWRQLLNAKLITQRKFDNLTKAERGGLSELDKAGFIKRQLVETRQITKHVAQILDSRMNTKYDENDKLIREVKVITLKSKLVSDFRKDFQFYKVREINNYHHAHDAYLNAVVGTALIKKYPKLESEFVYGDYKVYDVRKMIAKSEQEIGKATAKYFFYSNIMNFFKTEITLANGEIRKRPLIETNGETGEIVWDKGRDFATVRKVLSMPQVNIVKKTEVQTGGFSKESILPKRNSDKLIARKKDWDPKKYGGFDSPTVAYSVLVVAKVEKGKSKKLKSVKELLGITIMERSSFEKNPIDFLEAKGYKEVKKDLIIKLPKYSLFELENGRKRMLASAGELQKGNELALPSKYVNFLYLASHYEKLKGSPEDNEQKQLFVEQHKHYLDEIIEQISEFSKRVILADANLDKVLSAYNKHRDKPIREQAENIIHLFTLTNLGAPAAFKYFDTTIDRKRYTSTKEVLDATLIHQSITGLYETRIDLSQLGGDGGGGSPAPEAAAKGGTLNIEDEYRLHETSKEPDVSLGSTWLSDFPQAWAETGGMGLAVRQAPLIIPLKATSTPVSIKQYPMSQEARLGIKPHIQRLLDQGILVPCQSPWNTPLLPVKKPGTNDYRPVQDLREVNKRVEDIHPTVPNPYNLLSGLPPSHQWYTVLDLKDAFFCLRLHPTSQPLFAFEWRDPEMGISGQLTWTRLPQGFKNSPTLFNEALHRDLAGFRIQHPDLILLQYVDDLLLAATSELDCQQGTRALLQTLGDLGYRASAKKAQICQKQVKYLGYLLKEGQRWLTEARKETVMGQPIPKTPRQLREFLGKAGFCRLFIPGFAEMAAPLYPLTKPGTLFNWGPDQQKAFQEIKQALLTAPALGLPDLTKPFELFVDEKQGYAKGVLTQKLGPWRRPVAYLSKKLDPVAAGWPPCLRMVAAIAVLTKDAGKLTMGQPLVILAPHAVEALVKQPPDRWLSNARMTHYQALLLDTDRVQFGPVVALNPATLLPLPEEGLQHDCLDILAEAHGTRSDLMDQPLPDADHTWYTDGSSFLQEGQRKAGAAVTTETEVIWARALPAGTSAQRAELIALTQALKMAEGKKLNVYTDSRYAFATAHIHGEIYRRRGWLTSEGKEIKNKDEILALLKALFLPKRLSIIHCPGHQKGNSAEARGNRMADQAAREVATRETPETSTLLAGKRTADGSEFEKRTADGSEFESPKKKAKVE

SEQ ID NO: 2339 - protein, 2094 aa, synthetic construct
MPAAKRVKLDGGDKKYSIGLDIGTNSVGWAVITDEYKVPSKKFKVLGNTDRHSIKKNLIGALLFDSGETAEATRLKRTARRRYTRRKNRICYLQEIFSNEMAKVDDSFFHRLEESFLVEEDKKHERHPIFGNIVDEVAYHEKYPTIYHLRKKLVDSTDKADLRLIYLALAHMIKFRGHFLIEGDLNPDNSDVDKLFIQLVQTYNQLFEENPINASGVDAKAILSARLSKSRRLENLIAQLPGEKKNGLFGNLIALSLGLTPNFKSNFDLAEDAKLQLSKDTYDDDLDNLLAQIGDQYADLFLAAKNLSDAILLSDILRVNTEITKAPLSASMIKRYDEHHQDLTLLKALVRQQLPEKYKEIFFDQSKNGYAGYIDGGASQEEFYKFIKPILEKMDGTEELLVKLNREDLLRKQRTFDNGSIPHQIHLGELHAILRRQEDFYPFLKDNREKIEKILTFRIPYYVGPLARGNSRFAWMTRKSEETITPWNFEEVVDKGASAQSFIERMTNFDKNLPNEKVLPKHSLLYEYFTVYNELTKVKYVTEGMRKPAFLSGEQKKAIVDLLFKTNRKVTVKQLKEDYFKKIECFDSVEISGVEDRFNASLGTYHDLLKIIKDKDFLDNEENEDILEDIVLTLTLFEDREMIEERLKTYAHLFDDKVMKQLKRRRYTGWGRLSRKLINGIRDKQSGKTILDFLKSDGFANRNFMQLIHDDSLTFKEDIQKAQVSGQGDSLHEHIANLAGSPAIKKGILQTVKVVDELVKVMGRHKPENIVIEMARENQTTQKGQKNSRERMKRIEEGIKELGSQILKEHPVENTQLQNEKLYLYYLQNGRDMYVDQELDINRLSDYDVDHIVPQSFLKDDSIDNKVLTRSDKARGKSDNVPSEEVVKKMKNYWRQLLNAKLITQRKFDNLTKAERGGLSELDKAGFIKRQLVETRQITKHVAQILDSRMNTKYDENDKLIREVKVITLKSKLVSDFRKDFQFYKVREINNYHHAHDAYLNAVVGTALIKKYPKLESEFVYGDYKVYDVRKMIAKSEQEIGKATAKYFFYSNIMNFFKTEITLANGEIRKRPLIETNGETGEIVWDKGRDFATVRKVLSMPQVNIVKKTEVQTGGFSKESILPKRNSDKLIARKKDWDPKKYGGFDSPTVAYSVLVVAKVEKGKSKKLKSVKELLGITIMERSSFEKNPIDFLEAKGYKEVKKDLIIKLPKYSLFELENGRKRMLASAGELQKGNELALPSKYVNFLYLASHYEKLKGSPEDNEQKQLFVEQHKHYLDEIIEQISEFSKRVILADANLDKVLSAYNKHRDKPIREQAENIIHLFTLTNLGAPAAFKYFDTTIDRKRYTSTKEVLDATLIHQSITGLYETRIDLSQLGGDGGGGSGSSPAPGGTLNIEDEYRLHETSKEPDVSLGSTWLSDFPQAWAETGGMGLAVRQAPLIIPLKATSTPVSIKQYPMSQEARLGIKPHIQRLLDQGILVPCQSPWNTPLLPVKKPGTNDYRPVQDLREVNKRVEDIHPTVPNPYNLLSGLPPSHQWYTVLDLKDAFFCLRLHPTSQPLFAFEWRDPEMGISGQLTWTRLPQGFKNSPTLFNEALHRDLAGFRIQHPDLILLQYVDDLLLAATSELDCQQGTRALLQTLGDLGYRASAKKAQICQKQVKYLGYLLKEGQRWLTEARKETVMGQPIPKTPRQLREFLGKAGFCRLFIPGFAEMAAPLYPLTKPGTLFNWGPDQQKAFQEIKQALLTAPALGLPDLTKPFELFVDEKQGYAKGVLTQKLGPWRRPVAYLSKKLDPVAAGWPPCLRMVAAIAVLTKDAGKLTMGQPLVILAPHAVEALVKQPPDRWLSNARMTHYQALLLDTDRVQFGPVVALNPATLLPLPEEGLQHDCLDILAEAHGTRSDLMDQPLPDADHTWYTDGSSFLQEGQRKAGAAVTTETEVIWARALPAGTSAQRAELIALTQALKMAEGKKLNVYTDSRYAFATAHIHGEIYRRRGWLTSEGKEIKNKDEILALLKALFLPKRLSIIHCPGHQKGNSAEARGNRMADQAAREVATRETPETSTLLAGKRTADGSEFEKRTADGSEFESPKKKAKVE

SEQ ID NO: 2340 - protein, 2091 aa, synthetic construct
MPAAKRVKLDGGDKKYSIGLDIGTNSVGWAVITDEYKVPSKKFKVLGNTDRHSIKKNLIGALLFDSGETAEATRLKRTARRRYTRRKNRICYLQEIFSNEMAKVDDSFFHRLEESFLVEEDKKHERHPIFGNIVDEVAYHEKYPTIYHLRKKLVDSTDKADLRLIYLALAHMIKFRGHFLIEGDLNPDNSDVDKLFIQLVQTYNQLFEENPINASGVDAKAILSARLSKSRRLENLIAQLPGEKKNGLFGNLIALSLGLTPNFKSNFDLAEDAKLQLSKDTYDDDLDNLLAQIGDQYADLFLAAKNLSDAILLSDILRVNTEITKAPLSASMIKRYDEHHQDLTLLKALVRQQLPEKYKEIFFDQSKNGYAGYIDGGASQEEFYKFIKPILEKMDGTEELLVKLNREDLLRKQRTFDNGSIPHQIHLGELHAILRRQEDFYPFLKDNREKIEKILTFRIPYYVGPLARGNSRFAWMTRKSEETITPWNFEEVVDKGASAQSFIERMTNFDKNLPNEKVLPKHSLLYEYFTVYNELTKVKYVTEGMRKPAFLSGEQKKAIVDLLFKTNRKVTVKQLKEDYFKKIECFDSVEISGVEDRFNASLGTYHDLLKIIKDKDFLDNEENEDILEDIVLTLTLFEDREMIEERLKTYAHLFDDKVMKQLKRRRYTGWGRLSRKLINGIRDKQSGKTILDFLKSDGFANRNFMQLIHDDSLTFKEDIQKAQVSGQGDSLHEHIANLAGSPAIKKGILQTVKVVDELVKVMGRHKPENIVIEMARENQTTQKGQKNSRERMKRIEEGIKELGSQILKEHPVENTQLQNEKLYLYYLQNGRDMYVDQELDINRLSDYDVDHIVPQSFLKDDSIDNKVLTRSDKARGKSDNVPSEEVVKKMKNYWRQLLNAKLITQRKFDNLTKAERGGLSELDKAGFIKRQLVETRQITKHVAQILDSRMNTKYDENDKLIREVKVITLKSKLVSDFRKDFQFYKVREINNYHHAHDAYLNAVVGTALIKKYPKLESEFVYGDYKVYDVRKMIAKSEQEIGKATAKYFFYSNIMNFFKTEITLANGEIRKRPLIETNGETGEIVWDKGRDFATVRKVLSMPQVNIVKKTEVQTGGFSKESILPKRNSDKLIARKKDWDPKKYGGFDSPTVAYSVLVVAKVEKGKSKKLKSVKELLGITIMERSSFEKNPIDFLEAKGYKEVKKDLIIKLPKYSLFELENGRKRMLASAGELQKGNELALPSKYVNFLYLASHYEKLKGSPEDNEQKQLFVEQHKHYLDEIIEQISEFSKRVILADANLDKVLSAYNKHRDKPIREQAENIIHLFTLTNLGAPAAFKYFDTTIDRKRYTSTKEVLDATLIHQSITGLYETRIDLSQLGGDGGPAPGGSGGTLNIEDEYRLHETSKEPDVSLGSTWLSDFPQAWAETGGMGLAVRQAPLIIPLKATSTPVSIKQYPMSQEARLGIKPHIQRLLDQGILVPCQSPWNTPLLPVKKPGTNDYRPVQDLREVNKRVEDIHPTVPNPYNLLSGLPPSHQWYTVLDLKDAFFCLRLHPTSQPLFAFEWRDPEMGISGQLTWTRLPQGFKNSPTLFNEALHRDLAGFRIQHPDLILLQYVDDLLLAATSELDCQQGTRALLQTLGDLGYRASAKKAQICQKQVKYLGYLLKEGQRWLTEARKETVMGQPIPKTPRQLREFLGKAGFCRLFIPGFAEMAAPLYPLTKPGTLFNWGPDQQKAFQEIKQALLTAPALGLPDLTKPFELFVDEKQGYAKGVLTQKLGPWRRPVAYLSKKLDPVAAGWPPCLRMVAAIAVLTKDAGKLTMGQPLVILAPHAVEALVKQPPDRWLSNARMTHYQALLLDTDRVQFGPVVALNPATLLPLPEEGLQHDCLDILAEAHGTRSDLMDQPLPDADHTWYTDGSSFLQEGQRKAGAAVTTETEVIWARALPAGTSAQRAELIALTQALKMAEGKKLNVYTDSRYAFATAHIHGEIYRRRGWLTSEGKEIKNKDEILALLKALFLPKRLSIIHCPGHQKGNSAEARGNRMADQAAREVATRETPETSTLLAGKRTADGSEFEKRTADGSEFESPKKKAKVE

SEQ ID NO: 2341 - protein, 2093 aa, synthetic construct
MPAAKRVKLDGGDKKYSIGLDIGTNSVGWAVITDEYKVPSKKFKVLGNTDRHSIKKNLIGALLFDSGETAEATRLKRTARRRYTRRKNRICYLQEIFSNEMAKVDDSFFHRLEESFLVEEDKKHERHPIFGNIVDEVAYHEKYPTIYHLRKKLVDSTDKADLRLIYLALAHMIKFRGHFLIEGDLNPDNSDVDKLFIQLVQTYNQLFEENPINASGVDAKAILSARLSKSRRLENLIAQLPGEKKNGLFGNLIALSLGLTPNFKSNFDLAEDAKLQLSKDTYDDDLDNLLAQIGDQYADLFLAAKNLSDAILLSDILRVNTEITKAPLSASMIKRYDEHHQDLTLLKALVRQQLPEKYKEIFFDQSKNGYAGYIDGGASQEEFYKFIKPILEKMDGTEELLVKLNREDLLRKQRTFDNGSIPHQIHLGELHAILRRQEDFYPFLKDNREKIEKILTFRIPYYVGPLARGNSRFAWMTRKSEETITPWNFEEVVDKGASAQSFIERMTNFDKNLPNEKVLPKHSLLYEYFTVYNELTKVKYVTEGMRKPAFLSGEQKKAIVDLLFKTNRKVTVKQLKEDYFKKIECFDSVEISGVEDRFNASLGTYHDLLKIIKDKDFLDNEENEDILEDIVLTLTLFEDREMIEERLKTYAHLFDDKVMKQLKRRRYTGWGRLSRKLINGIRDKQSGKTILDFLKSDGFANRNFMQLIHDDSLTFKEDIQKAQVSGQGDSLHEHIANLAGSPAIKKGILQTVKVVDELVKVMGRHKPENIVIEMARENQTTQKGQKNSRERMKRIEEGIKELGSQILKEHPVENTQLQNEKLYLYYLQNGRDMYVDQELDINRLSDYDVDHIVPQSFLKDDSIDNKVLTRSDKARGKSDNVPSEEVVKKMKNYWRQLLNAKLITQRKFDNLTKAERGGLSELDKAGFIKRQLVETRQITKHVAQILDSRMNTKYDENDKLIREVKVITLKSKLVSDFRKDFQFYKVREINNYHHAHDAYLNAVVGTALIKKYPKLESEFVYGDYKVYDVRKMIAKSEQEIGKATAKYFFYSNIMNFFKTEITLANGEIRKRPLIETNGETGEIVWDKGRDFATVRKVLSMPQVNIVKKTEVQTGGFSKESILPKRNSDKLIARKKDWDPKKYGGFDSPTVAYSVLVVAKVEKGKSKKLKSVKELLGITIMERSSFEKNPIDFLEAKGYKEVKKDLIIKLPKYSLFELENGRKRMLASAGELQKGNELALPSKYVNFLYLASHYEKLKGSPEDNEQKQLFVEQHKHYLDEIIEQISEFSKRVILADANLDKVLSAYNKHRDKPIREQAENIIHLFTLTNLGAPAAFKYFDTTIDRKRYTSTKEVLDATLIHQSITGLYETRIDLSQLGGDGGEAAAKGGSGGTLNIEDEYRLHETSKEPDVSLGSTWLSDFPQAWAETGGMGLAVRQAPLIIPLKATSTPVSIKQYPMSQEARLGIKPHIQRLLDQGILVPCQSPWNTPLLPVKKPGTNDYRPVQDLREVNKRVEDIHPTVPNPYNLLSGLPPSHQWYTVLDLKDAFFCLRLHPTSQPLFAFEWRDPEMGISGQLTWTRLPQGFKNSPTLFNEALHRDLAGFRIQHPDLILLQYVDDLLLAATSELDCQQGTRALLQTLGDLGYRASAKKAQICQKQVKYLGYLLKEGQRWLTEARKETVMGQPIPKTPRQLREFLGKAGFCRLFIPGFAEMAAPLYPLTKPGTLFNWGPDQQKAFQEIKQALLTAPALGLPDLTKPFELFVDEKQGYAKGVLTQKLGPWRRPVAYLSKKLDPVAAGWPPCLRMVAAIAVLTKDAGKLTMGQPLVILAPHAVEALVKQPPDRWLSNARMTHYQALLLDTDRVQFGPVVALNPATLLPLPEEGLQHDCLDILAEAHGTRSDLMDQPLPDADHTWYTDGSSFLQEGQRKAGAAVTTETEVIWARALPAGTSAQRAELIALTQALKMAEGKKLNVYTDSRYAFATAHIHGEIYRRRGWLTSEGKEIKNKDEILALLKALFLPKRLSIIHCPGHQKGNSAEARGNRMADQAAREVATRETPETSTLLAGKRTADGSEFEKRTADGSEFESPKKKAKVE

SEQ ID NO: 2342 - protein, 2093 aa, synthetic construct
MPAAKRVKLDGGDKKYSIGLDIGTNSVGWAVITDEYKVPSKKFKVLGNTDRHSIKKNLIGALLFDSGETAEATRLKRTARRRYTRRKNRICYLQEIFSNEMAKVDDSFFHRLEESFLVEEDKKHERHPIFGNIVDEVAYHEKYPTIYHLRKKLVDSTDKADLRLIYLALAHMIKFRGHFLIEGDLNPDNSDVDKLFIQLVQTYNQLFEENPINASGVDAKAILSARLSKSRRLENLIAQLPGEKKNGLFGNLIALSLGLTPNFKSNFDLAEDAKLQLSKDTYDDDLDNLLAQIGDQYADLFLAAKNLSDAILLSDILRVNTEITKAPLSASMIKRYDEHHQDLTLLKALVRQQLPEKYKEIFFDQSKNGYAGYIDGGASQEEFYKFIKPILEKMDGTEELLVKLNREDLLRKQRTFDNGSIPHQIHLGELHAILRRQEDFYPFLKDNREKIEKILTFRIPYYVGPLARGNSRFAWMTRKSEETITPWNFEEVVDKGASAQSFIERMTNFDKNLPNEKVLPKHSLLYEYFTVYNELTKVKYVTEGMRKPAFLSGEQKKAIVDLLFKTNRKVTVKQLKEDYFKKIECFDSVEISGVEDRFNASLGTYHDLLKIIKDKDFLDNEENEDILEDIVLTLTLFEDREMIEERLKTYAHLFDDKVMKQLKRRRYTGWGRLSRKLINGIRDKQSGKTILDFLKSDGFANRNFMQLIHDDSLTFKEDIQKAQVSGQGDSLHEHIANLAGSPAIKKGILQTVKVVDELVKVMGRHKPENIVIEMARENQTTQKGQKNSRERMKRIEEGIKELGSQILKEHPVENTQLQNEKLYLYYLQNGRDMYVDQELDINRLSDYDVDHIVPQSFLKDDSIDNKVLTRSDKARGKSDNVPSEEVVKKMKNYWRQLLNAKLITQRKFDNLTKAERGGLSELDKAGFIKRQLVETRQITKHVAQILDSRMNTKYDENDKLIREVKVITLKSKLVSDFRKDFQFYKVREINNYHHAHDAYLNAVVGTALIKKYPKLESEFVYGDYKVYDVRKMIAKSEQEIGKATAKYFFYSNIMNFFKTEITLANGEIRKRPLIETNGETGEIVWDKGRDFATVRKVLSMPQVNIVKKTEVQTGGFSKESILPKRNSDKLIARKKDWDPKKYGGFDSPTVAYSVLVVAKVEKGKSKKLKSVKELLGITIMERSSFEKNPIDFLEAKGYKEVKKDLIIKLPKYSLFELENGRKRMLASAGELQKGNELALPSKYVNFLYLASHYEKLKGSPEDNEQKQLFVEQHKHYLDEIIEQISEFSKRVILADANLDKVLSAYNKHRDKPIREQAENIIHLFTLTNLGAPAAFKYFDTTIDRKRYTSTKEVLDATLIHQSITGLYETRIDLSQLGGDGGGGGEAAAKGGTLNIEDEYRLHETSKEPDVSLGSTWLSDFPQAWAETGGMGLAVRQAPLIIPLKATSTPVSIKQYPMSQEARLGIKPHIQRLLDQGILVPCQSPWNTPLLPVKKPGTNDYRPVQDLREVNKRVEDIHPTVPNPYNLLSGLPPSHQWYTVLDLKDAFFCLRLHPTSQPLFAFEWRDPEMGISGQLTWTRLPQGFKNSPTLFNEALHRDLAGFRIQHPDLILLQYVDDLLLAATSELDCQQGTRALLQTLGDLGYRASAKKAQICQKQVKYLGYLLKEGQRWLTEARKETVMGQPIPKTPRQLREFLGKAGFCRLFIPGFAEMAAPLYPLTKPGTLFNWGPDQQKAFQEIKQALLTAPALGLPDLTKPFELFVDEKQGYAKGVLTQKLGPWRRPVAYLSKKLDPVAAGWPPCLRMVAAIAVLTKDAGKLTMGQPLVILAPHAVEALVKQPPDRWLSNARMTHYQALLLDTDRVQFGPVVALNPATLLPLPEEGLQHDCLDILAEAHGTRSDLMDQPLPDADHTWYTDGSSFLQEGQRKAGAAVTTETEVIWARALPAGTSAQRAELIALTQALKMAEGKKLNVYTDSRYAFATAHIHGEIYRRRGWLTSEGKEIKNKDEILALLKALFLPKRLSIIHCPGHQKGNSAEARGNRMADQAAREVATRETPETSTLLAGKRTADGSEFEKRTADGSEFESPKKKAKVE

SEQ ID NO: 2343 - protein, 2131 aa, synthetic construct
MPAAKRVKLDGGDKKYSIGLDIGTNSVGWAVITDEYKVPSKKFKVLGNTDRHSIKKNLIGALLFDSGETAEATRLKRTARRRYTRRKNRICYLQEIFSNEMAKVDDSFFHRLEESFLVEEDKKHERHPIFGNIVDEVAYHEKYPTIYHLRKKLVDSTDKADLRLIYLALAHMIKFRGHFLIEGDLNPDNSDVDKLFIQLVQTYNQLFEENPINASGVDAKAILSARLSKSRRLENLIAQLPGEKKNGLFGNLIALSLGLTPNFKSNFDLAEDAKLQLSKDTYDDDLDNLLAQIGDQYADLFLAAKNLSDAILLSDILRVNTEITKAPLSASMIKRYDEHHQDLTLLKALVRQQLPEKYKEIFFDQSKNGYAGYIDGGASQEEFYKFIKPILEKMDGTEELLVKLNREDLLRKQRTFDNGSIPHQIHLGELHAILRRQEDFYPFLKDNREKIEKILTFRIPYYVGPLARGNSRFAWMTRKSEETITPWNFEEVVDKGASAQSFIERMTNFDKNLPNEKVLPKHSLLYEYFTVYNELTKVKYVTEGMRKPAFLSGEQKKAIVDLLFKTNRKVTVKQLKEDYFKKIECFDSVEISGVEDRFNASLGTYHDLLKIIKDKDFLDNEENEDILEDIVLTLTLFEDREMIEERLKTYAHLFDDKVMKQLKRRRYTGWGRLSRKLINGIRDKQSGKTILDFLKSDGFANRNFMQLIHDDSLTFKEDIQKAQVSGQGDSLHEHIANLAGSPAIKKGILQTVKVVDELVKVMGRHKPENIVIEMARENQTTQKGQKNSRERMKRIEEGIKELGSQILKEHPVENTQLQNEKLYLYYLQNGRDMYVDQELDINRLSDYDVDHIVPQSFLKDDSIDNKVLTRSDKARGKSDNVPSEEVVKKMKNYWRQLLNAKLITQRKFDNLTKAERGGLSELDKAGFIKRQLVETRQITKHVAQILDSRMNTKYDENDKLIREVKVITLKSKLVSDFRKDFQFYKVREINNYHHAHDAYLNAVVGTALIKKYPKLESEFVYGDYKVYDVRKMIAKSEQEIGKATAKYFFYSNIMNFFKTEITLANGEIRKRPLIETNGETGEIVWDKGRDFATVRKVLSMPQVNIVKKTEVQTGGFSKESILPKRNSDKLIARKKDWDPKKYGGFDSPTVAYSVLVVAKVEKGKSKKLKSVKELLGITIMERSSFEKNPIDFLEAKGYKEVKKDLIIKLPKYSLFELENGRKRMLASAGELQKGNELALPSKYVNFLYLASHYEKLKGSPEDNEQKQLFVEQHKHYLDEIIEQISEFSKRVILADANLDKVLSAYNKHRDKPIREQAENIIHLFTLTNLGAPAAFKYFDTTIDRKRYTSTKEVLDATLIHQSITGLYETRIDLSQLGGDGGAEAAAKEAAAKEAAAKEAAAKALEAEAAAKEAAAKEAAAKEAAAKAGGTLNIEDEYRLHETSKEPDVSLGSTWLSDFPQAWAETGGMGLAVRQAPLIIPLKATSTPVSIKQYPMSQEARLGIKPHIQRLLDQGILVPCQSPWNTPLLPVKKPGTNDYRPVQDLREVNKRVEDIHPTVPNPYNLLSGLPPSHQWYTVLDLKDAFFCLRLHPTSQPLFAFEWRDPEMGISGQLTWTRLPQGFKNSPTLFNEALHRDLAGFRIQHPDLILLQYVDDLLLAATSELDCQQGTRALLQTLGDLGYRASAKKAQICQKQVKYLGYLLKEGQRWLTEARKETVMGQPIPKTPRQLREFLGKAGFCRLFIPGFAEMAAPLYPLTKPGTLFNWGPDQQKAFQEIKQALLTAPALGLPDLTKPFELFVDEKQGYAKGVLTQKLGPWRRPVAYLSKKLDPVAAGWPPCLRMVAAIAVLTKDAGKLTMGQPLVILAPHAVEALVKQPPDRWLSNARMTHYQALLLDTDRVQFGPVVALNPATLLPLPEEGLQHDCLDILAEAHGTRSDLMDQPLPDADHTWYTDGSSFLQEGQRKAGAAVTTETEVIWARALPAGTSAQRAELIALTQALKMAEGKKLNVYTDSRYAFATAHIHGEIYRRRGWLTSEGKEIKNKDEILALLKALFLPKRLSIIHCPGHQKGNSAEARGNRMADQAAREVATRETPETSTLLAGKRTADGSEFEKRTADGSEFESPKKKAKVE

SEQ ID NO: 2344 - protein, 2096 aa, synthetic construct
MPAAKRVKLDGGDKKYSIGLDIGTNSVGWAVITDEYKVPSKKFKVLGNTDRHSIKKNLIGALLFDSGETAEATRLKRTARRRYTRRKNRICYLQEIFSNEMAKVDDSFFHRLEESFLVEEDKKHERHPIFGNIVDEVAYHEKYPTIYHLRKKLVDSTDKADLRLIYLALAHMIKFRGHFLIEGDLNPDNSDVDKLFIQLVQTYNQLFEENPINASGVDAKAILSARLSKSRRLENLIAQLPGEKKNGLFGNLIALSLGLTPNFKSNFDLAEDAKLQLSKDTYDDDLDNLLAQIGDQYADLFLAAKNLSDAILLSDILRVNTEITKAPLSASMIKRYDEHHQDLTLLKALVRQQLPEKYKEIFFDQSKNGYAGYIDGGASQEEFYKFIKPILEKMDGTEELLVKLNREDLLRKQRTFDNGSIPHQIHLGELHAILRRQEDFYPFLKDNREKIEKILTFRIPYYVGPLARGNSRFAWMTRKSEETITPWNFEEVVDKGASAQSFIERMTNFDKNLPNEKVLPKHSLLYEYFTVYNELTKVKYVTEGMRKPAFLSGEQKKAIVDLLFKTNRKVTVKQLKEDYFKKIECFDSVEISGVEDRFNASLGTYHDLLKIIKDKDFLDNEENEDILEDIVLTLTLFEDREMIEERLKTYAHLFDDKVMKQLKRRRYTGWGRLSRKLINGIRDKQSGKTILDFLKSDGFANRNFMQLIHDDSLTFKEDIQKAQVSGQGDSLHEHIANLAGSPAIKKGILQTVKVVDELVKVMGRHKPENIVIEMARENQTTQKGQKNSRERMKRIEEGIKELGSQILKEHPVENTQLQNEKLYLYYLQNGRDMYVDQELDINRLSDYDVDHIVPQSFLKDDSIDNKVLTRSDKARGKSDNVPSEEVVKKMKNYWRQLLNAKLITQRKFDNLTKAERGGLSELDKAGFIKRQLVETRQITKHVAQILDSRMNTKYDENDKLIREVKVITLKSKLVSDFRKDFQFYKVREINNYHHAHDAYLNAVVGTALIKKYPKLESEFVYGDYKVYDVRKMIAKSEQEIGKATAKYFFYSNIMNFFKTEITLANGEIRKRPLIETNGETGEIVWDKGRDFATVRKVLSMPQVNIVKKTEVQTGGFSKESILPKRNSDKLIARKKDWDPKKYGGFDSPTVAYSVLVVAKVEKGKSKKLKSVKELLGITIMERSSFEKNPIDFLEAKGYKEVKKDLIIKLPKYSLFELENGRKRMLASAGELQKGNELALPSKYVNFLYLASHYEKLKGSPEDNEQKQLFVEQHKHYLDEIIEQISEFSKRVILADANLDKVLSAYNKHRDKPIREQAENIIHLFTLTNLGAPAAFKYFDTTIDRKRYTSTKEVLDATLIHQSITGLYETRIDLSQLGGDGGEAAAKGGGGGSGGTLNIEDEYRLHETSKEPDVSLGSTWLSDFPQAWAETGGMGLAVRQAPLIIPLKATSTPVSIKQYPMSQEARLGIKPHIQRLLDQGILVPCQSPWNTPLLPVKKPGTNDYRPVQDLREVNKRVEDIHPTVPNPYNLLSGLPPSHQWYTVLDLKDAFFCLRLHPTSQPLFAFEWRDPEMGISGQLTWTRLPQGFKNSPTLFNEALHRDLAGFRIQHPDLILLQYVDDLLLAATSELDCQQGTRALLQTLGDLGYRASAKKAQICQKQVKYLGYLLKEGQRWLTEARKETVMGQPIPKTPRQLREFLGKAGFCRLFIPGFAEMAAPLYPLTKPGTLFNWGPDQQKAFQEIKQALLTAPALGLPDLTKPFELFVDEKQGYAKGVLTQKLGPWRRPVAYLSKKLDPVAAGWPPCLRMVAAIAVLTKDAGKLTMGQPLVILAPHAVEALVKQPPDRWLSNARMTHYQALLLDTDRVQFGPVVALNPATLLPLPEEGLQHDCLDILAEAHGTRSDLMDQPLPDADHTWYTDGSSFLQEGQRKAGAAVTTETEVIWARALPAGTSAQRAELIALTQALKMAEGKKLNVYTDSRYAFATAHIHGEIYRRRGWLTSEGKEIKNKDEILALLKALFLPKRLSIIHCPGHQKGNSAEARGNRMADQAAREVATRETPETSTLLAGKRTADGSEFEKRTADGSEFESPKKKAKVE

SEQ ID NO: 2345 - protein, 2096 aa, synthetic construct
MPAAKRVKLDGGDKKYSIGLDIGTNSVGWAVITDEYKVPSKKFKVLGNTDRHSIKKNLIGALLFDSGETAEATRLKRTARRRYTRRKNRICYLQEIFSNEMAKVDDSFFHRLEESFLVEEDKKHERHPIFGNIVDEVAYHEKYPTIYHLRKKLVDSTDKADLRLIYLALAHMIKFRGHFLIEGDLNPDNSDVDKLFIQLVQTYNQLFEENPINASGVDAKAILSARLSKSRRLENLIAQLPGEKKNGLFGNLIALSLGLTPNFKSNFDLAEDAKLQLSKDTYDDDLDNLLAQIGDQYADLFLAAKNLSDAILLSDILRVNTEITKAPLSASMIKRYDEHHQDLTLLKALVRQQLPEKYKEIFFDQSKNGYAGYIDGGASQEEFYKFIKPILEKMDGTEELLVKLNREDLLRKQRTFDNGSIPHQIHLGELHAILRRQEDFYPFLKDNREKIEKILTFRIPYYVGPLARGNSRFAWMTRKSEETITPWNFEEVVDKGASAQSFIERMTNFDKNLPNEKVLPKHSLLYEYFTVYNELTKVKYVTEGMRKPAFLSGEQKKAIVDLLFKTNRKVTVKQLKEDYFKKIECFDSVEISGVEDRFNASLGTYHDLLKIIKDKDFLDNEENEDILEDIVLTLTLFEDREMIEERLKTYAHLFDDKVMKQLKRRRYTGWGRLSRKLINGIRDKQSGKTILDFLKSDGFANRNFMQLIHDDSLTFKEDIQKAQVSGQGDSLHEHIANLAGSPAIKKGILQTVKVVDELVKVMGRHKPENIVIEMARENQTTQKGQKNSRERMKRIEEGIKELGSQILKEHPVENTQLQNEKLYLYYLQNGRDMYVDQELDINRLSDYDVDHIVPQSFLKDDSIDNKVLTRSDKARGKSDNVPSEEVVKKMKNYWRQLLNAKLITQRKFDNLTKAERGGLSELDKAGFIKRQLVETRQITKHVAQILDSRMNTKYDENDKLIREVKVITLKSKLVSDFRKDFQFYKVREINNYHHAHDAYLNAVVGTALIKKYPKLESEFVYGDYKVYDVRKMIAKSEQEIGKATAKYFFYSNIMNFFKTEITLANGEIRKRPLIETNGETGEIVWDKGRDFATVRKVLSMPQVNIVKKTEVQTGGFSKESILPKRNSDKLIARKKDWDPKKYGGFDSPTVAYSVLVVAKVEKGKSKKLKSVKELLGITIMERSSFEKNPIDFLEAKGYKEVKKDLIIKLPKYSLFELENGRKRMLASAGELQKGNELALPSKYVNFLYLASHYEKLKGSPEDNEQKQLFVEQHKHYLDEIIEQISEFSKRVILADANLDKVLSAYNKHRDKPIREQAENIIHLFTLTNLGAPAAFKYFDTTIDRKRYTSTKEVLDATLIHQSITGLYETRIDLSQLGGDGGGSSPAPEAAAKGGTLNIEDEYRLHETSKEPDVSLGSTWLSDFPQAWAETGGMGLAVRQAPLIIPLKATSTPVSIKQYPMSQEARLGIKPHIQRLLDQGILVPCQSPWNTPLLPVKKPGTNDYRPVQDLREVNKRVEDIHPTVPNPYNLLSGLPPSHQWYTVLDLKDAFFCLRLHPTSQPLFAFEWRDPEMGISGQLTWTRLPQGFKNSPTLFNEALHRDLAGFRIQHPDLILLQYVDDLLLAATSELDCQQGTRALLQTLGDLGYRASAKKAQICQKQVKYLGYLLKEGQRWLTEARKETVMGQPIPKTPRQLREFLGKAGFCRLFIPGFAEMAAPLYPLTKPGTLFNWGPDQQKAFQEIKQALLTAPALGLPDLTKPFELFVDEKQGYAKGVLTQKLGPWRRPVAYLSKKLDPVAAGWPPCLRMVAAIAVLTKDAGKLTMGQPLVILAPHAVEALVKQPPDRWLSNARMTHYQALLLDTDRVQFGPVVALNPATLLPLPEEGLQHDCLDILAEAHGTRSDLMDQPLPDADHTWYTDGSSFLQEGQRKAGAAVTTETEVIWARALPAGTSAQRAELIALTQALKMAEGKKLNVYTDSRYAFATAHIHGEIYRRRGWLTSEGKEIKNKDEILALLKALFLPKRLSIIHCPGHQKGNSAEARGNRMADQAAREVATRETPETSTLLAGKRTADGSEFEKRTADGSEFESPKKKAKVE

SEQ ID NO: 2346 - protein, 2094 aa, synthetic construct
MPAAKRVKLDGGDKKYSIGLDIGTNSVGWAVITDEYKVPSKKFKVLGNTDRHSIKKNLIGALLFDSGETAEATRLKRTARRRYTRRKNRICYLQEIFSNEMAKVDDSFFHRLEESFLVEEDKKHERHPIFGNIVDEVAYHEKYPTIYHLRKKLVDSTDKADLRLIYLALAHMIKFRGHFLIEGDLNPDNSDVDKLFIQLVQTYNQLFEENPINASGVDAKAILSARLSKSRRLENLIAQLPGEKKNGLFGNLIALSLGLTPNFKSNFDLAEDAKLQLSKDTYDDDLDNLLAQIGDQYADLFLAAKNLSDAILLSDILRVNTEITKAPLSASMIKRYDEHHQDLTLLKALVRQQLPEKYKEIFFDQSKNGYAGYIDGGASQEEFYKFIKPILEKMDGTEELLVKLNREDLLRKQRTFDNGSIPHQIHLGELHAILRRQEDFYPFLKDNREKIEKILTFRIPYYVGPLARGNSRFAWMTRKSEETITPWNFEEVVDKGASAQSFIERMTNFDKNLPNEKVLPKHSLLYEYFTVYNELTKVKYVTEGMRKPAFLSGEQKKAIVDLLFKTNRKVTVKQLKEDYFKKIECFDSVEISGVEDRFNASLGTYHDLLKIIKDKDFLDNEENEDILEDIVLTLTLFEDREMIEERLKTYAHLFDDKVMKQLKRRRYTGWGRLSRKLINGIRDKQSGKTILDFLKSDGFANRNFMQLIHDDSLTFKEDIQKAQVSGQGDSLHEHIANLAGSPAIKKGILQTVKVVDELVKVMGRHKPENIVIEMARENQTTQKGQKNSRERMKRIEEGIKELGSQILKEHPVENTQLQNEKLYLYYLQNGRDMYVDQELDINRLSDYDVDHIVPQSFLKDDSIDNKVLTRSDKARGKSDNVPSEEVVKKMKNYWRQLLNAKLITQRKFDNLTKAERGGLSELDKAGFIKRQLVETRQITKHVAQILDSRMNTKYDENDKLIREVKVITLKSKLVSDFRKDFQFYKVREINNYHHAHDAYLNAVVGTALIKKYPKLESEFVYGDYKVYDVRKMIAKSEQEIGKATAKYFFYSNIMNFFKTEITLANGEIRKRPLIETNGETGEIVWDKGRDFATVRKVLSMPQVNIVKKTEVQTGGFSKESILPKRNSDKLIARKKDWDPKKYGGFDSPTVAYSVLVVAKVEKGKSKKLKSVKELLGITIMERSSFEKNPIDFLEAKGYKEVKKDLIIKLPKYSLFELENGRKRMLASAGELQKGNELALPSKYVNFLYLASHYEKLKGSPEDNEQKQLFVEQHKHYLDEIIEQISEFSKRVILADANLDKVLSAYNKHRDKPIREQAENIIHLFTLTNLGAPAAFKYFDTTIDRKRYTSTKEVLDATLIHQSITGLYETRIDLSQLGGDGGGGGGSSPAPGGTLNIEDEYRLHETSKEPDVSLGSTWLSDFPQAWAETGGMGLAVRQAPLIIPLKATSTPVSIKQYPMSQEARLGIKPHIQRLLDQGILVPCQSPWNTPLLPVKKPGTNDYRPVQDLREVNKRVEDIHPTVPNPYNLLSGLPPSHQWYTVLDLKDAFFCLRLHPTSQPLFAFEWRDPEMGISGQLTWTRLPQGFKNSPTLFNEALHRDLAGFRIQHPDLILLQYVDDLLLAATSELDCQQGTRALLQTLGDLGYRASAKKAQICQKQVKYLGYLLKEGQRWLTEARKETVMGQPIPKTPRQLREFLGKAGFCRLFIPGFAEMAAPLYPLTKPGTLFNWGPDQQKAFQEIKQALLTAPALGLPDLTKPFELFVDEKQGYAKGVLTQKLGPWRRPVAYLSKKLDPVAAGWPPCLRMVAAIAVLTKDAGKLTMGQPLVILAPHAVEALVKQPPDRWLSNARMTHYQALLLDTDRVQFGPVVALNPATLLPLPEEGLQHDCLDILAEAHGTRSDLMDQPLPDADHTWYTDGSSFLQEGQRKAGAAVTTETEVIWARALPAGTSAQRAELIALTQALKMAEGKKLNVYTDSRYAFATAHIHGEIYRRRGWLTSEGKEIKNKDEILALLKALFLPKRLSIIHCPGHQKGNSAEARGNRMADQAAREVATRETPETSTLLAGKRTADGSEFEKRTADGSEFESPKKKAKVE

SEQ ID NO: 2347 - protein, 2096 aa, synthetic construct
MPAAKRVKLDGGDKKYSIGLDIGTNSVGWAVITDEYKVPSKKFKVLGNTDRHSIKKNLIGALLFDSGETAEATRLKRTARRRYTRRKNRICYLQEIFSNEMAKVDDSFFHRLEESFLVEEDKKHERHPIFGNIVDEVAYHEKYPTIYHLRKKLVDSTDKADLRLIYLALAHMIKFRGHFLIEGDLNPDNSDVDKLFIQLVQTYNQLFEENPINASGVDAKAILSARLSKSRRLENLIAQLPGEKKNGLFGNLIALSLGLTPNFKSNFDLAEDAKLQLSKDTYDDDLDNLLAQIGDQYADLFLAAKNLSDAILLSDILRVNTEITKAPLSASMIKRYDEHHQDLTLLKALVRQQLPEKYKEIFFDQSKNGYAGYIDGGASQEEFYKFIKPILEKMDGTEELLVKLNREDLLRKQRTFDNGSIPHQIHLGELHAILRRQEDFYPFLKDNREKIEKILTFRIPYYVGPLARGNSRFAWMTRKSEETITPWNFEEVVDKGASAQSFIERMTNFDKNLPNEKVLPKHSLLYEYFTVYNELTKVKYVTEGMRKPAFLSGEQKKAIVDLLFKTNRKVTVKQLKEDYFKKIECFDSVEISGVEDRFNASLGTYHDLLKIIKDKDFLDNEENEDILEDIVLTLTLFEDREMIEERLKTYAHLFDDKVMKQLKRRRYTGWGRLSRKLINGIRDKQSGKTILDFLKSDGFANRNFMQLIHDDSLTFKEDIQKAQVSGQGDSLHEHIANLAGSPAIKKGILQTVKVVDELVKVMGRHKPENIVIEMARENQTTQKGQKNSRERMKRIEEGIKELGSQILKEHPVENTQLQNEKLYLYYLQNGRDMYVDQELDINRLSDYDVDHIVPQSFLKDDSIDNKVLTRSDKARGKSDNVPSEEVVKKMKNYWRQLLNAKLITQRKFDNLTKAERGGLSELDKAGFIKRQLVETRQITKHVAQILDSRMNTKYDENDKLIREVKVITLKSKLVSDFRKDFQFYKVREINNYHHAHDAYLNAVVGTALIKKYPKLESEFVYGDYKVYDVRKMIAKSEQEIGKATAKYFFYSNIMNFFKTEITLANGEIRKRPLIETNGETGEIVWDKGRDFATVRKVLSMPQVNIVKKTEVQTGGFSKESILPKRNSDKLIARKKDWDPKKYGGFDSPTVAYSVLVVAKVEKGKSKKLKSVKELLGITIMERSSFEKNPIDFLEAKGYKEVKKDLIIKLPKYSLFELENGRKRMLASAGELQKGNELALPSKYVNFLYLASHYEKLKGSPEDNEQKQLFVEQHKHYLDEIIEQISEFSKRVILADANLDKVLSAYNKHRDKPIREQAENIIHLFTLTNLGAPAAFKYFDTTIDRKRYTSTKEVLDATLIHQSITGLYETRIDLSQLGGDGGPAPEAAAKGSSGGTLNIEDEYRLHETSKEPDVSLGSTWLSDFPQAWAETGGMGLAVRQAPLIIPLKATSTPVSIKQYPMSQEARLGIKPHIQRLLDQGILVPCQSPWNTPLLPVKKPGTNDYRPVQDLREVNKRVEDIHPTVPNPYNLLSGLPPSHQWYTVLDLKDAFFCLRLHPTSQPLFAFEWRDPEMGISGQLTWTRLPQGFKNSPTLFNEALHRDLAGFRIQHPDLILLQYVDDLLLAATSELDCQQGTRALLQTLGDLGYRASAKKAQICQKQVKYLGYLLKEGQRWLTEARKETVMGQPIPKTPRQLREFLGKAGFCRLFIPGFAEMAAPLYPLTKPGTLFNWGPDQQKAFQEIKQALLTAPALGLPDLTKPFELFVDEKQGYAKGVLTQKLGPWRRPVAYLSKKLDPVAAGWPPCLRMVAAIAVLTKDAGKLTMGQPLVILAPHAVEALVKQPPDRWLSNARMTHYQALLLDTDRVQFGPVVALNPATLLPLPEEGLQHDCLDILAEAHGTRSDLMDQPLPDADHTWYTDGSSFLQEGQRKAGAAVTTETEVIWARALPAGTSAQRAELIALTQALKMAEGKKLNVYTDSRYAFATAHIHGEIYRRRGWLTSEGKEIKNKDEILALLKALFLPKRLSIIHCPGHQKGNSAEARGNRMADQAAREVATRETPETSTLLAGKRTADGSEFEKRTADGSEFESPKKKAKVE

SEQ ID NO: 2348 - protein, 2093 aa, synthetic construct
MPAAKRVKLDGGDKKYSIGLDIGTNSVGWAVITDEYKVPSKKFKVLGNTDRHSIKKNLIGALLFDSGETAEATRLKRTARRRYTRRKNRICYLQEIFSNEMAKVDDSFFHRLEESFLVEEDKKHERHPIFGNIVDEVAYHEKYPTIYHLRKKLVDSTDKADLRLIYLALAHMIKFRGHFLIEGDLNPDNSDVDKLFIQLVQTYNQLFEENPINASGVDAKAILSARLSKSRRLENLIAQLPGEKKNGLFGNLIALSLGLTPNFKSNFDLAEDAKLQLSKDTYDDDLDNLLAQIGDQYADLFLAAKNLSDAILLSDILRVNTEITKAPLSASMIKRYDEHHQDLTLLKALVRQQLPEKYKEIFFDQSKNGYAGYIDGGASQEEFYKFIKPILEKMDGTEELLVKLNREDLLRKQRTFDNGSIPHQIHLGELHAILRRQEDFYPFLKDNREKIEKILTFRIPYYVGPLARGNSRFAWMTRKSEETITPWNFEEVVDKGASAQSFIERMTNFDKNLPNEKVLPKHSLLYEYFTVYNELTKVKYVTEGMRKPAFLSGEQKKAIVDLLFKTNRKVTVKQLKEDYFKKIECFDSVEISGVEDRFNASLGTYHDLLKIIKDKDFLDNEENEDILEDIVLTLTLFEDREMIEERLKTYAHLFDDKVMKQLKRRRYTGWGRLSRKLINGIRDKQSGKTILDFLKSDGFANRNFMQLIHDDSLTFKEDIQKAQVSGQGDSLHEHIANLAGSPAIKKGILQTVKVVDELVKVMGRHKPENIVIEMARENQTTQKGQKNSRERMKRIEEGIKELGSQILKEHPVENTQLQNEKLYLYYLQNGRDMYVDQELDINRLSDYDVDHIVPQSFLKDDSIDNKVLTRSDKARGKSDNVPSEEVVKKMKNYWRQLLNAKLITQRKFDNLTKAERGGLSELDKAGFIKRQLVETRQITKHVAQILDSRMNTKYDENDKLIREVKVITLKSKLVSDFRKDFQFYKVREINNYHHAHDAYLNAVVGTALIKKYPKLESEFVYGDYKVYDVRKMIAKSEQEIGKATAKYFFYSNIMNFFKTEITLANGEIRKRPLIETNGETGEIVWDKGRDFATVRKVLSMPQVNIVKKTEVQTGGFSKESILPKRNSDKLIARKKDWDPKKYGGFDSPTVAYSVLVVAKVEKGKSKKLKSVKELLGITIMERSSFEKNPIDFLEAKGYKEVKKDLIIKLPKYSLFELENGRKRMLASAGELQKGNELALPSKYVNFLYLASHYEKLKGSPEDNEQKQLFVEQHKHYLDEIIEQISEFSKRVILADANLDKVLSAYNKHRDKPIREQAENIIHLFTLTNLGAPAAFKYFDTTIDRKRYTSTKEVLDATLIHQSITGLYETRIDLSQLGGDGGEAAAKGGGGGTLNIEDEYRLHETSKEPDVSLGSTWLSDFPQAWAETGGMGLAVRQAPLIIPLKATSTPVSIKQYPMSQEARLGIKPHIQRLLDQGILVPCQSPWNTPLLPVKKPGTNDYRPVQDLREVNKRVEDIHPTVPNPYNLLSGLPPSHQWYTVLDLKDAFFCLRLHPTSQPLFAFEWRDPEMGISGQLTWTRLPQGFKNSPTLFNEALHRDLAGFRIQHPDLILLQYVDDLLLAATSELDCQQGTRALLQTLGDLGYRASAKKAQICQKQVKYLGYLLKEGQRWLTEARKETVMGQPIPKTPRQLREFLGKAGFCRLFIPGFAEMAAPLYPLTKPGTLFNWGPDQQKAFQEIKQALLTAPALGLPDLTKPFELFVDEKQGYAKGVLTQKLGPWRRPVAYLSKKLDPVAAGWPPCLRMVAAIAVLTKDAGKLTMGQPLVILAPHAVEALVKQPPDRWLSNARMTHYQALLLDTDRVQFGPVVALNPATLLPLPEEGLQHDCLDILAEAHGTRSDLMDQPLPDADHTWYTDGSSFLQEGQRKAGAAVTTETEVIWARALPAGTSAQRAELIALTQALKMAEGKKLNVYTDSRYAFATAHIHGEIYRRRGWLTSEGKEIKNKDEILALLKALFLPKRLSIIHCPGHQKGNSAEARGNRMADQAAREVATRETPETSTLLAGKRTADGSEFEKRTADGSEFESPKKKAKVE

SEQ ID NO: 2349 - protein, 2093 aa, synthetic construct
MPAAKRVKLDGGDKKYSIGLDIGTNSVGWAVITDEYKVPSKKFKVLGNTDRHSIKKNLIGALLFDSGETAEATRLKRTARRRYTRRKNRICYLQEIFSNEMAKVDDSFFHRLEESFLVEEDKKHERHPIFGNIVDEVAYHEKYPTIYHLRKKLVDSTDKADLRLIYLALAHMIKFRGHFLIEGDLNPDNSDVDKLFIQLVQTYNQLFEENPINASGVDAKAILSARLSKSRRLENLIAQLPGEKKNGLFGNLIALSLGLTPNFKSNFDLAEDAKLQLSKDTYDDDLDNLLAQIGDQYADLFLAAKNLSDAILLSDILRVNTEITKAPLSASMIKRYDEHHQDLTLLKALVRQQLPEKYKEIFFDQSKNGYAGYIDGGASQEEFYKFIKPILEKMDGTEELLVKLNREDLLRKQRTFDNGSIPHQIHLGELHAILRRQEDFYPFLKDNREKIEKILTFRIPYYVGPLARGNSRFAWMTRKSEETITPWNFEEVVDKGASAQSFIERMTNFDKNLPNEKVLPKHSLLYEYFTVYNELTKVKYVTEGMRKPAFLSGEQKKAIVDLLFKTNRKVTVKQLKEDYFKKIECFDSVEISGVEDRFNASLGTYHDLLKIIKDKDFLDNEENEDILEDIVLTLTLFEDREMIEERLKTYAHLFDDKVMKQLKRRRYTGWGRLSRKLINGIRDKQSGKTILDFLKSDGFANRNFMQLIHDDSLTFKEDIQKAQVSGQGDSLHEHIANLAGSPAIKKGILQTVKVVDELVKVMGRHKPENIVIEMARENQTTQKGQKNSRERMKRIEEGIKELGSQILKEHPVENTQLQNEKLYLYYLQNGRDMYVDQELDINRLSDYDVDHIVPQSFLKDDSIDNKVLTRSDKARGKSDNVPSEEVVKKMKNYWRQLLNAKLITQRKFDNLTKAERGGLSELDKAGFIKRQLVETRQITKHVAQILDSRMNTKYDENDKLIREVKVITLKSKLVSDFRKDFQFYKVREINNYHHAHDAYLNAVVGTALIKKYPKLESEFVYGDYKVYDVRKMIAKSEQEIGKATAKYFFYSNIMNFFKTEITLANGEIRKRPLIETNGETGEIVWDKGRDFATVRKVLSMPQVNIVKKTEVQTGGFSKESILPKRNSDKLIARKKDWDPKKYGGFDSPTVAYSVLVVAKVEKGKSKKLKSVKELLGITIMERSSFEKNPIDFLEAKGYKEVKKDLIIKLPKYSLFELENGRKRMLASAGELQKGNELALPSKYVNFLYLASHYEKLKGSPEDNEQKQLFVEQHKHYLDEIIEQISEFSKRVILADANLDKVLSAYNKHRDKPIREQAENIIHLFTLTNLGAPAAFKYFDTTIDRKRYTSTKEVLDATLIHQSITGLYETRIDLSQLGGDGGGGGGGGGGGGTLNIEDEYRLHETSKEPDVSLGSTWLSDFPQAWAETGGMGLAVRQAPLIIPLKATSTPVSIKQYPMSQEARLGIKPHIQRLLDQGILVPCQSPWNTPLLPVKKPGTNDYRPVQDLREVNKRVEDIHPTVPNPYNLLSGLPPSHQWYTVLDLKDAFFCLRLHPTSQPLFAFEWRDPEMGISGQLTWTRLPQGFKNSPTLFNEALHRDLAGFRIQHPDLILLQYVDDLLLAATSELDCQQGTRALLQTLGDLGYRASAKKAQICQKQVKYLGYLLKEGQRWLTEARKETVMGQPIPKTPRQLREFLGKAGFCRLFIPGFAEMAAPLYPLTKPGTLFNWGPDQQKAFQEIKQALLTAPALGLPDLTKPFELFVDEKQGYAKGVLTQKLGPWRRPVAYLSKKLDPVAAGWPPCLRMVAAIAVLTKDAGKLTMGQPLVILAPHAVEALVKQPPDRWLSNARMTHYQALLLDTDRVQFGPVVALNPATLLPLPEEGLQHDCLDILAEAHGTRSDLMDQPLPDADHTWYTDGSSFLQEGQRKAGAAVTTETEVIWARALPAGTSAQRAELIALTQALKMAEGKKLNVYTDSRYAFATAHIHGEIYRRRGWLTSEGKEIKNKDEILALLKALFLPKRLSIIHCPGHQKGNSAEARGNRMADQAAREVATRETPETSTLLAGKRTADGSEFEKRTADGSEFESPKKKAKVE

SEQ ID NO: 2350 - protein, 2093 aa, synthetic construct
MPAAKRVKLDGGDKKYSIGLDIGTNSVGWAVITDEYKVPSKKFKVLGNTDRHSIKKNLIGALLFDSGETAEATRLKRTARRRYTRRKNRICYLQEIFSNEMAKVDDSFFHRLEESFLVEEDKKHERHPIFGNIVDEVAYHEKYPTIYHLRKKLVDSTDKADLRLIYLALAHMIKFRGHFLIEGDLNPDNSDVDKLFIQLVQTYNQLFEENPINASGVDAKAILSARLSKSRRLENLIAQLPGEKKNGLFGNLIALSLGLTPNFKSNFDLAEDAKLQLSKDTYDDDLDNLLAQIGDQYADLFLAAKNLSDAILLSDILRVNTEITKAPLSASMIKRYDEHHQDLTLLKALVRQQLPEKYKEIFFDQSKNGYAGYIDGGASQEEFYKFIKPILEKMDGTEELLVKLNREDLLRKQRTFDNGSIPHQIHLGELHAILRRQEDFYPFLKDNREKIEKILTFRIPYYVGPLARGNSRFAWMTRKSEETITPWNFEEVVDKGASAQSFIERMTNFDKNLPNEKVLPKHSLLYEYFTVYNELTKVKYVTEGMRKPAFLSGEQKKAIVDLLFKTNRKVTVKQLKEDYFKKIECFDSVEISGVEDRFNASLGTYHDLLKIIKDKDFLDNEENEDILEDIVLTLTLFEDREMIEERLKTYAHLFDDKVMKQLKRRRYTGWGRLSRKLINGIRDKQSGKTILDFLKSDGFANRNFMQLIHDDSLTFKEDIQKAQVSGQGDSLHEHIANLAGSPAIKKGILQTVKVVDELVKVMGRHKPENIVIEMARENQTTQKGQKNSRERMKRIEEGIKELGSQILKEHPVENTQLQNEKLYLYYLQNGRDMYVDQELDINRLSDYDVDHIVPQSFLKDDSIDNKVLTRSDKARGKSDNVPSEEVVKKMKNYWRQLLNAKLITQRKFDNLTKAERGGLSELDKAGFIKRQLVETRQITKHVAQILDSRMNTKYDENDKLIREVKVITLKSKLVSDFRKDFQFYKVREINNYHHAHDAYLNAVVGTALIKKYPKLESEFVYGDYKVYDVRKMIAKSEQEIGKATAKYFFYSNIMNFFKTEITLANGEIRKRPLIETNGETGEIVWDKGRDFATVRKVLSMPQVNIVKKTEVQTGGFSKESILPKRNSDKLIARKKDWDPKKYGGFDSPTVAYSVLVVAKVEKGKSKKLKSVKELLGITIMERSSFEKNPIDFLEAKGYKEVKKDLIIKLPKYSLFELENGRKRMLASAGELQKGNELALPSKYVNFLYLASHYEKLKGSPEDNEQKQLFVEQHKHYLDEIIEQISEFSKRVILADANLDKVLSAYNKHRDKPIREQAENIIHLFTLTNLGAPAAFKYFDTTIDRKRYTSTKEVLDATLIHQSITGLYETRIDLSQLGGDGGEAAAKGSSGGTLNIEDEYRLHETSKEPDVSLGSTWLSDFPQAWAETGGMGLAVRQAPLIIPLKATSTPVSIKQYPMSQEARLGIKPHIQRLLDQGILVPCQSPWNTPLLPVKKPGTNDYRPVQDLREVNKRVEDIHPTVPNPYNLLSGLPPSHQWYTVLDLKDAFFCLRLHPTSQPLFAFEWRDPEMGISGQLTWTRLPQGFKNSPTLFNEALHRDLAGFRIQHPDLILLQYVDDLLLAATSELDCQQGTRALLQTLGDLGYRASAKKAQICQKQVKYLGYLLKEGQRWLTEARKETVMGQPIPKTPRQLREFLGKAGFCRLFIPGFAEMAAPLYPLTKPGTLFNWGPDQQKAFQEIKQALLTAPALGLPDLTKPFELFVDEKQGYAKGVLTQKLGPWRRPVAYLSKKLDPVAAGWPPCLRMVAAIAVLTKDAGKLTMGQPLVILAPHAVEALVKQPPDRWLSNARMTHYQALLLDTDRVQFGPVVALNPATLLPLPEEGLQHDCLDILAEAHGTRSDLMDQPLPDADHTWYTDGSSFLQEGQRKAGAAVTTETEVIWARALPAGTSAQRAELIALTQALKMAEGKKLNVYTDSRYAFATAHIHGEIYRRRGWLTSEGKEIKNKDEILALLKALFLPKRLSIIHCPGHQKGNSAEARGNRMADQAAREVATRETPETSTLLAGKRTADGSEFEKRTADGSEFESPKKKAKVE

SEQ ID NO: 2351 - protein, 2096 aa, synthetic construct
MPAAKRVKLDGGDKKYSIGLDIGTNSVGWAVITDEYKVPSKKFKVLGNTDRHSIKKNLIGALLFDSGETAEATRLKRTARRRYTRRKNRICYLQEIFSNEMAKVDDSFFHRLEESFLVEEDKKHERHPIFGNIVDEVAYHEKYPTIYHLRKKLVDSTDKADLRLIYLALAHMIKFRGHFLIEGDLNPDNSDVDKLFIQLVQTYNQLFEENPINASGVDAKAILSARLSKSRRLENLIAQLPGEKKNGLFGNLIALSLGLTPNFKSNFDLAEDAKLQLSKDTYDDDLDNLLAQIGDQYADLFLAAKNLSDAILLSDILRVNTEITKAPLSASMIKRYDEHHQDLTLLKALVRQQLPEKYKEIFFDQSKNGYAGYIDGGASQEEFYKFIKPILEKMDGTEELLVKLNREDLLRKQRTFDNGSIPHQIHLGELHAILRRQEDFYPFLKDNREKIEKILTFRIPYYVGPLARGNSRFAWMTRKSEETITPWNFEEVVDKGASAQSFIERMTNFDKNLPNEKVLPKHSLLYEYFTVYNELTKVKYVTEGMRKPAFLSGEQKKAIVDLLFKTNRKVTVKQLKEDYFKKIECFDSVEISGVEDRFNASLGTYHDLLKIIKDKDFLDNEENEDILEDIVLTLTLFEDREMIEERLKTYAHLFDDKVMKQLKRRRYTGWGRLSRKLINGIRDKQSGKTILDFLKSDGFANRNFMQLIHDDSLTFKEDIQKAQVSGQGDSLHEHIANLAGSPAIKKGILQTVKVVDELVKVMGRHKPENIVIEMARENQTTQKGQKNSRERMKRIEEGIKELGSQILKEHPVENTQLQNEKLYLYYLQNGRDMYVDQELDINRLSDYDVDHIVPQSFLKDDSIDNKVLTRSDKARGKSDNVPSEEVVKKMKNYWRQLLNAKLITQRKFDNLTKAERGGLSELDKAGFIKRQLVETRQITKHVAQILDSRMNTKYDENDKLIREVKVITLKSKLVSDFRKDFQFYKVREINNYHHAHDAYLNAVVGTALIKKYPKLESEFVYGDYKVYDVRKMIAKSEQEIGKATAKYFFYSNIMNFFKTEITLANGEIRKRPLIETNGETGEIVWDKGRDFATVRKVLSMPQVNIVKKTEVQTGGFSKESILPKRNSDKLIARKKDWDPKKYGGFDSPTVAYSVLVVAKVEKGKSKKLKSVKELLGITIMERSSFEKNPIDFLEAKGYKEVKKDLIIKLPKYSLFELENGRKRMLASAGELQKGNELALPSKYVNFLYLASHYEKLKGSPEDNEQKQLFVEQHKHYLDEIIEQISEFSKRVILADANLDKVLSAYNKHRDKPIREQAENIIHLFTLTNLGAPAAFKYFDTTIDRKRYTSTKEVLDATLIHQSITGLYETRIDLSQLGGDGGGGGGGSEAAAKGGTLNIEDEYRLHETSKEPDVSLGSTWLSDFPQAWAETGGMGLAVRQAPLIIPLKATSTPVSIKQYPMSQEARLGIKPHIQRLLDQGILVPCQSPWNTPLLPVKKPGTNDYRPVQDLREVNKRVEDIHPTVPNPYNLLSGLPPSHQWYTVLDLKDAFFCLRLHPTSQPLFAFEWRDPEMGISGQLTWTRLPQGFKNSPTLFNEALHRDLAGFRIQHPDLILLQYVDDLLLAATSELDCQQGTRALLQTLGDLGYRASAKKAQICQKQVKYLGYLLKEGQRWLTEARKETVMGQPIPKTPRQLREFLGKAGFCRLFIPGFAEMAAPLYPLTKPGTLFNWGPDQQKAFQEIKQALLTAPALGLPDLTKPFELFVDEKQGYAKGVLTQKLGPWRRPVAYLSKKLDPVAAGWPPCLRMVAAIAVLTKDAGKLTMGQPLVILAPHAVEALVKQPPDRWLSNARMTHYQALLLDTDRVQFGPVVALNPATLLPLPEEGLQHDCLDILAEAHGTRSDLMDQPLPDADHTWYTDGSSFLQEGQRKAGAAVTTETEVIWARALPAGTSAQRAELIALTQALKMAEGKKLNVYTDSRYAFATAHIHGEIYRRRGWLTSEGKEIKNKDEILALLKALFLPKRLSIIHCPGHQKGNSAEARGNRMADQAAREVATRETPETSTLLAGKRTADGSEFEKRTADGSEFESPKKKAKVE

SEQ ID NO: 2352 - protein, 2096 aa, synthetic construct
MPAAKRVKLDGGDKKYSIGLDIGTNSVGWAVITDEYKVPSKKFKVLGNTDRHSIKKNLIGALLFDSGETAEATRLKRTARRRYTRRKNRICYLQEIFSNEMAKVDDSFFHRLEESFLVEEDKKHERHPIFGNIVDEVAYHEKYPTIYHLRKKLVDSTDKADLRLIYLALAHMIKFRGHFLIEGDLNPDNSDVDKLFIQLVQTYNQLFEENPINASGVDAKAILSARLSKSRRLENLIAQLPGEKKNGLFGNLIALSLGLTPNFKSNFDLAEDAKLQLSKDTYDDDLDNLLAQIGDQYADLFLAAKNLSDAILLSDILRVNTEITKAPLSASMIKRYDEHHQDLTLLKALVRQQLPEKYKEIFFDQSKNGYAGYIDGGASQEEFYKFIKPILEKMDGTEELLVKLNREDLLRKQRTFDNGSIPHQIHLGELHAILRRQEDFYPFLKDNREKIEKILTFRIPYYVGPLARGNSRFAWMTRKSEETITPWNFEEVVDKGASAQSFIERMTNFDKNLPNEKVLPKHSLLYEYFTVYNELTKVKYVTEGMRKPAFLSGEQKKAIVDLLFKTNRKVTVKQLKEDYFKKIECFDSVEISGVEDRFNASLGTYHDLLKIIKDKDFLDNEENEDILEDIVLTLTLFEDREMIEERLKTYAHLFDDKVMKQLKRRRYTGWGRLSRKLINGIRDKQSGKTILDFLKSDGFANRNFMQLIHDDSLTFKEDIQKAQVSGQGDSLHEHIANLAGSPAIKKGILQTVKVVDELVKVMGRHKPENIVIEMARENQTTQKGQKNSRERMKRIEEGIKELGSQILKEHPVENTQLQNEKLYLYYLQNGRDMYVDQELDINRLSDYDVDHIVPQSFLKDDSIDNKVLTRSDKARGKSDNVPSEEVVKKMKNYWRQLLNAKLITQRKFDNLTKAERGGLSELDKAGFIKRQLVETRQITKHVAQILDSRMNTKYDENDKLIREVKVITLKSKLVSDFRKDFQFYKVREINNYHHAHDAYLNAVVGTALIKKYPKLESEFVYGDYKVYDVRKMIAKSEQEIGKATAKYFFYSNIMNFFKTEITLANGEIRKRPLIETNGETGEIVWDKGRDFATVRKVLSMPQVNIVKKTEVQTGGFSKESILPKRNSDKLIARKKDWDPKKYGGFDSPTVAYSVLVVAKVEKGKSKKLKSVKELLGITIMERSSFEKNPIDFLEAKGYKEVKKDLIIKLPKYSLFELENGRKRMLASAGELQKGNELALPSKYVNFLYLASHYEKLKGSPEDNEQKQLFVEQHKHYLDEIIEQISEFSKRVILADANLDKVLSAYNKHRDKPIREQAENIIHLFTLTNLGAPAAFKYFDTTIDRKRYTSTKEVLDATLIHQSITGLYETRIDLSQLGGDGGGSSEAAAKGGSGGTLNIEDEYRLHETSKEPDVSLGSTWLSDFPQAWAETGGMGLAVRQAPLIIPLKATSTPVSIKQYPMSQEARLGIKPHIQRLLDQGILVPCQSPWNTPLLPVKKPGTNDYRPVQDLREVNKRVEDIHPTVPNPYNLLSGLPPSHQWYTVLDLKDAFFCLRLHPTSQPLFAFEWRDPEMGISGQLTWTRLPQGFKNSPTLFNEALHRDLAGFRIQHPDLILLQYVDDLLLAATSELDCQQGTRALLQTLGDLGYRASAKKAQICQKQVKYLGYLLKEGQRWLTEARKETVMGQPIPKTPRQLREFLGKAGFCRLFIPGFAEMAAPLYPLTKPGTLFNWGPDQQKAFQEIKQALLTAPALGLPDLTKPFELFVDEKQGYAKGVLTQKLGPWRRPVAYLSKKLDPVAAGWPPCLRMVAAIAVLTKDAGKLTMGQPLVILAPHAVEALVKQPPDRWLSNARMTHYQALLLDTDRVQFGPVVALNPATLLPLPEEGLQHDCLDILAEAHGTRSDLMDQPLPDADHTWYTDGSSFLQEGQRKAGAAVTTETEVIWARALPAGTSAQRAELIALTQALKMAEGKKLNVYTDSRYAFATAHIHGEIYRRRGWLTSEGKEIKNKDEILALLKALFLPKRLSIIHCPGHQKGNSAEARGNRMADQAAREVATRETPETSTLLAGKRTADGSEFEKRTADGSEFESPKKKAKVE

SEQ ID NO: 2353 - protein, 2091 aa, synthetic construct
MPAAKRVKLDGGDKKYSIGLDIGTNSVGWAVITDEYKVPSKKFKVLGNTDRHSIKKNLIGALLFDSGETAEATRLKRTARRRYTRRKNRICYLQEIFSNEMAKVDDSFFHRLEESFLVEEDKKHERHPIFGNIVDEVAYHEKYPTIYHLRKKLVDSTDKADLRLIYLALAHMIKFRGHFLIEGDLNPDNSDVDKLFIQLVQTYNQLFEENPINASGVDAKAILSARLSKSRRLENLIAQLPGEKKNGLFGNLIALSLGLTPNFKSNFDLAEDAKLQLSKDTYDDDLDNLLAQIGDQYADLFLAAKNLSDAILLSDILRVNTEITKAPLSASMIKRYDEHHQDLTLLKALVRQQLPEKYKEIFFDQSKNGYAGYIDGGASQEEFYKFIKPILEKMDGTEELLVKLNREDLLRKQRTFDNGSIPHQIHLGELHAILRRQEDFYPFLKDNREKIEKILTFRIPYYVGPLARGNSRFAWMTRKSEETITPWNFEEVVDKGASAQSFIERMTNFDKNLPNEKVLPKHSLLYEYFTVYNELTKVKYVTEGMRKPAFLSGEQKKAIVDLLFKTNRKVTVKQLKEDYFKKIECFDSVEISGVEDRFNASLGTYHDLLKIIKDKDFLDNEENEDILEDIVLTLTLFEDREMIEERLKTYAHLFDDKVMKQLKRRRYTGWGRLSRKLINGIRDKQSGKTILDFLKSDGFANRNFMQLIHDDSLTFKEDIQKAQVSGQGDSLHEHIANLAGSPAIKKGILQTVKVVDELVKVMGRHKPENIVIEMARENQTTQKGQKNSRERMKRIEEGIKELGSQILKEHPVENTQLQNEKLYLYYLQNGRDMYVDQELDINRLSDYDVDHIVPQSFLKDDSIDNKVLTRSDKARGKSDNVPSEEVVKKMKNYWRQLLNAKLITQRKFDNLTKAERGGLSELDKAGFIKRQLVETRQITKHVAQILDSRMNTKYDENDKLIREVKVITLKSKLVSDFRKDFQFYKVREINNYHHAHDAYLNAVVGTALIKKYPKLESEFVYGDYKVYDVRKMIAKSEQEIGKATAKYFFYSNIMNFFKTEITLANGEIRKRPLIETNGETGEIVWDKGRDFATVRKVLSMPQVNIVKKTEVQTGGFSKESILPKRNSDKLIARKKDWDPKKYGGFDSPTVAYSVLVVAKVEKGKSKKLKSVKELLGITIMERSSFEKNPIDFLEAKGYKEVKKDLIIKLPKYSLFELENGRKRMLASAGELQKGNELALPSKYVNFLYLASHYEKLKGSPEDNEQKQLFVEQHKHYLDEIIEQISEFSKRVILADANLDKVLSAYNKHRDKPIREQAENIIHLFTLTNLGAPAAFKYFDTTIDRKRYTSTKEVLDATLIHQSITGLYETRIDLSQLGGDGGGGSGSSGGTLNIEDEYRLHETSKEPDVSLGSTWLSDFPQAWAETGGMGLAVRQAPLIIPLKATSTPVSIKQYPMSQEARLGIKPHIQRLLDQGILVPCQSPWNTPLLPVKKPGTNDYRPVQDLREVNKRVEDIHPTVPNPYNLLSGLPPSHQWYTVLDLKDAFFCLRLHPTSQPLFAFEWRDPEMGISGQLTWTRLPQGFKNSPTLFNEALHRDLAGFRIQHPDLILLQYVDDLLLAATSELDCQQGTRALLQTLGDLGYRASAKKAQICQKQVKYLGYLLKEGQRWLTEARKETVMGQPIPKTPRQLREFLGKAGFCRLFIPGFAEMAAPLYPLTKPGTLFNWGPDQQKAFQEIKQALLTAPALGLPDLTKPFELFVDEKQGYAKGVLTQKLGPWRRPVAYLSKKLDPVAAGWPPCLRMVAAIAVLTKDAGKLTMGQPLVILAPHAVEALVKQPPDRWLSNARMTHYQALLLDTDRVQFGPVVALNPATLLPLPEEGLQHDCLDILAEAHGTRSDLMDQPLPDADHTWYTDGSSFLQEGQRKAGAAVTTETEVIWARALPAGTSAQRAELIALTQALKMAEGKKLNVYTDSRYAFATAHIHGEIYRRRGWLTSEGKEIKNKDEILALLKALFLPKRLSIIHCPGHQKGNSAEARGNRMADQAAREVATRETPETSTLLAGKRTADGSEFEKRTADGSEFESPKKKAKVE

SEQ ID NO: 2354 - protein, 2091 aa, synthetic construct
MPAAKRVKLDGGDKKYSIGLDIGTNSVGWAVITDEYKVPSKKFKVLGNTDRHSIKKNLIGALLFDSGETAEATRLKRTARRRYTRRKNRICYLQEIFSNEMAKVDDSFFHRLEESFLVEEDKKHERHPIFGNIVDEVAYHEKYPTIYHLRKKLVDSTDKADLRLIYLALAHMIKFRGHFLIEGDLNPDNSDVDKLFIQLVQTYNQLFEENPINASGVDAKAILSARLSKSRRLENLIAQLPGEKKNGLFGNLIALSLGLTPNFKSNFDLAEDAKLQLSKDTYDDDLDNLLAQIGDQYADLFLAAKNLSDAILLSDILRVNTEITKAPLSASMIKRYDEHHQDLTLLKALVRQQLPEKYKEIFFDQSKNGYAGYIDGGASQEEFYKFIKPILEKMDGTEELLVKLNREDLLRKQRTFDNGSIPHQIHLGELHAILRRQEDFYPFLKDNREKIEKILTFRIPYYVGPLARGNSRFAWMTRKSEETITPWNFEEVVDKGASAQSFIERMTNFDKNLPNEKVLPKHSLLYEYFTVYNELTKVKYVTEGMRKPAFLSGEQKKAIVDLLFKTNRKVTVKQLKEDYFKKIECFDSVEISGVEDRFNASLGTYHDLLKIIKDKDFLDNEENEDILEDIVLTLTLFEDREMIEERLKTYAHLFDDKVMKQLKRRRYTGWGRLSRKLINGIRDKQSGKTILDFLKSDGFANRNFMQLIHDDSLTFKEDIQKAQVSGQGDSLHEHIANLAGSPAIKKGILQTVKVVDELVKVMGRHKPENIVIEMARENQTTQKGQKNSRERMKRIEEGIKELGSQILKEHPVENTQLQNEKLYLYYLQNGRDMYVDQELDINRLSDYDVDHIVPQSFLKDDSIDNKVLTRSDKARGKSDNVPSEEVVKKMKNYWRQLLNAKLITQRKFDNLTKAERGGLSELDKAGFIKRQLVETRQITKHVAQILDSRMNTKYDENDKLIREVKVITLKSKLVSDFRKDFQFYKVREINNYHHAHDAYLNAVVGTALIKKYPKLESEFVYGDYKVYDVRKMIAKSEQEIGKATAKYFFYSNIMNFFKTEITLANGEIRKRPLIETNGETGEIVWDKGRDFATVRKVLSMPQVNIVKKTEVQTGGFSKESILPKRNSDKLIARKKDWDPKKYGGFDSPTVAYSVLVVAKVEKGKSKKLKSVKELLGITIMERSSFEKNPIDFLEAKGYKEVKKDLIIKLPKYSLFELENGRKRMLASAGELQKGNELALPSKYVNFLYLASHYEKLKGSPEDNEQKQLFVEQHKHYLDEIIEQISEFSKRVILADANLDKVLSAYNKHRDKPIREQAENIIHLFTLTNLGAPAAFKYFDTTIDRKRYTSTKEVLDATLIHQSITGLYETRIDLSQLGGDGGGGGGGGGGTLNIEDEYRLHETSKEPDVSLGSTWLSDFPQAWAETGGMGLAVRQAPLIIPLKATSTPVSIKQYPMSQEARLGIKPHIQRLLDQGILVPCQSPWNTPLLPVKKPGTNDYRPVQDLREVNKRVEDIHPTVPNPYNLLSGLPPSHQWYTVLDLKDAFFCLRLHPTSQPLFAFEWRDPEMGISGQLTWTRLPQGFKNSPTLFNEALHRDLAGFRIQHPDLILLQYVDDLLLAATSELDCQQGTRALLQTLGDLGYRASAKKAQICQKQVKYLGYLLKEGQRWLTEARKETVMGQPIPKTPRQLREFLGKAGFCRLFIPGFAEMAAPLYPLTKPGTLFNWGPDQQKAFQEIKQALLTAPALGLPDLTKPFELFVDEKQGYAKGVLTQKLGPWRRPVAYLSKKLDPVAAGWPPCLRMVAAIAVLTKDAGKLTMGQPLVILAPHAVEALVKQPPDRWLSNARMTHYQALLLDTDRVQFGPVVALNPATLLPLPEEGLQHDCLDILAEAHGTRSDLMDQPLPDADHTWYTDGSSFLQEGQRKAGAAVTTETEVIWARALPAGTSAQRAELIALTQALKMAEGKKLNVYTDSRYAFATAHIHGEIYRRRGWLTSEGKEIKNKDEILALLKALFLPKRLSIIHCPGHQKGNSAEARGNRMADQAAREVATRETPETSTLLAGKRTADGSEFEKRTADGSEFESPKKKAKVE

SEQ ID NO: 2355 - protein, 2096 aa, synthetic construct
MPAAKRVKLDGGDKKYSIGLDIGTNSVGWAVITDEYKVPSKKFKVLGNTDRHSIKKNLIGALLFDSGETAEATRLKRTARRRYTRRKNRICYLQEIFSNEMAKVDDSFFHRLEESFLVEEDKKHERHPIFGNIVDEVAYHEKYPTIYHLRKKLVDSTDKADLRLIYLALAHMIKFRGHFLIEGDLNPDNSDVDKLFIQLVQTYNQLFEENPINASGVDAKAILSARLSKSRRLENLIAQLPGEKKNGLFGNLIALSLGLTPNFKSNFDLAEDAKLQLSKDTYDDDLDNLLAQIGDQYADLFLAAKNLSDAILLSDILRVNTEITKAPLSASMIKRYDEHHQDLTLLKALVRQQLPEKYKEIFFDQSKNGYAGYIDGGASQEEFYKFIKPILEKMDGTEELLVKLNREDLLRKQRTFDNGSIPHQIHLGELHAILRRQEDFYPFLKDNREKIEKILTFRIPYYVGPLARGNSRFAWMTRKSEETITPWNFEEVVDKGASAQSFIERMTNFDKNLPNEKVLPKHSLLYEYFTVYNELTKVKYVTEGMRKPAFLSGEQKKAIVDLLFKTNRKVTVKQLKEDYFKKIECFDSVEISGVEDRFNASLGTYHDLLKIIKDKDFLDNEENEDILEDIVLTLTLFEDREMIEERLKTYAHLFDDKVMKQLKRRRYTGWGRLSRKLINGIRDKQSGKTILDFLKSDGFANRNFMQLIHDDSLTFKEDIQKAQVSGQGDSLHEHIANLAGSPAIKKGILQTVKVVDELVKVMGRHKPENIVIEMARENQTTQKGQKNSRERMKRIEEGIKELGSQILKEHPVENTQLQNEKLYLYYLQNGRDMYVDQELDINRLSDYDVDHIVPQSFLKDDSIDNKVLTRSDKARGKSDNVPSEEVVKKMKNYWRQLLNAKLITQRKFDNLTKAERGGLSELDKAGFIKRQLVETRQITKHVAQILDSRMNTKYDENDKLIREVKVITLKSKLVSDFRKDFQFYKVREINNYHHAHDAYLNAVVGTALIKKYPKLESEFVYGDYKVYDVRKMIAKSEQEIGKATAKYFFYSNIMNFFKTEITLANGEIRKRPLIETNGETGEIVWDKGRDFATVRKVLSMPQVNIVKKTEVQTGGFSKESILPKRNSDKLIARKKDWDPKKYGGFDSPTVAYSVLVVAKVEKGKSKKLKSVKELLGITIMERSSFEKNPIDFLEAKGYKEVKKDLIIKLPKYSLFELENGRKRMLASAGELQKGNELALPSKYVNFLYLASHYEKLKGSPEDNEQKQLFVEQHKHYLDEIIEQISEFSKRVILADANLDKVLSAYNKHRDKPIREQAENIIHLFTLTNLGAPAAFKYFDTTIDRKRYTSTKEVLDATLIHQSITGLYETRIDLSQLGGDGGPAPGSSEAAAKGGTLNIEDEYRLHETSKEPDVSLGSTWLSDFPQAWAETGGMGLAVRQAPLIIPLKATSTPVSIKQYPMSQEARLGIKPHIQRLLDQGILVPCQSPWNTPLLPVKKPGTNDYRPVQDLREVNKRVEDIHPTVPNPYNLLSGLPPSHQWYTVLDLKDAFFCLRLHPTSQPLFAFEWRDPEMGISGQLTWTRLPQGFKNSPTLFNEALHRDLAGFRIQHPDLILLQYVDDLLLAATSELDCQQGTRALLQTLGDLGYRASAKKAQICQKQVKYLGYLLKEGQRWLTEARKETVMGQPIPKTPRQLREFLGKAGFCRLFIPGFAEMAAPLYPLTKPGTLFNWGPDQQKAFQEIKQALLTAPALGLPDLTKPFELFVDEKQGYAKGVLTQKLGPWRRPVAYLSKKLDPVAAGWPPCLRMVAAIAVLTKDAGKLTMGQPLVILAPHAVEALVKQPPDRWLSNARMTHYQALLLDTDRVQFGPVVALNPATLLPLPEEGLQHDCLDILAEAHGTRSDLMDQPLPDADHTWYTDGSSFLQEGQRKAGAAVTTETEVIWARALPAGTSAQRAELIALTQALKMAEGKKLNVYTDSRYAFATAHIHGEIYRRRGWLTSEGKEIKNKDEILALLKALFLPKRLSIIHCPGHQKGNSAEARGNRMADQAAREVATRETPETSTLLAGKRTADGSEFEKRTADGSEFESPKKKAKVE

SEQ ID NO: 2356 - protein, 2093 aa, synthetic construct
MPAAKRVKLDGGDKKYSIGLDIGTNSVGWAVITDEYKVPSKKFKVLGNTDRHSIKKNLIGALLFDSGETAEATRLKRTARRRYTRRKNRICYLQEIFSNEMAKVDDSFFHRLEESFLVEEDKKHERHPIFGNIVDEVAYHEKYPTIYHLRKKLVDSTDKADLRLIYLALAHMIKFRGHFLIEGDLNPDNSDVDKLFIQLVQTYNQLFEENPINASGVDAKAILSARLSKSRRLENLIAQLPGEKKNGLFGNLIALSLGLTPNFKSNFDLAEDAKLQLSKDTYDDDLDNLLAQIGDQYADLFLAAKNLSDAILLSDILRVNTEITKAPLSASMIKRYDEHHQDLTLLKALVRQQLPEKYKEIFFDQSKNGYAGYIDGGASQEEFYKFIKPILEKMDGTEELLVKLNREDLLRKQRTFDNGSIPHQIHLGELHAILRRQEDFYPFLKDNREKIEKILTFRIPYYVGPLARGNSRFAWMTRKSEETITPWNFEEVVDKGASAQSFIERMTNFDKNLPNEKVLPKHSLLYEYFTVYNELTKVKYVTEGMRKPAFLSGEQKKAIVDLLFKTNRKVTVKQLKEDYFKKIECFDSVEISGVEDRFNASLGTYHDLLKIIKDKDFLDNEENEDILEDIVLTLTLFEDREMIEERLKTYAHLFDDKVMKQLKRRRYTGWGRLSRKLINGIRDKQSGKTILDFLKSDGFANRNFMQLIHDDSLTFKEDIQKAQVSGQGDSLHEHIANLAGSPAIKKGILQTVKVVDELVKVMGRHKPENIVIEMARENQTTQKGQKNSRERMKRIEEGIKELGSQILKEHPVENTQLQNEKLYLYYLQNGRDMYVDQELDINRLSDYDVDHIVPQSFLKDDSIDNKVLTRSDKARGKSDNVPSEEVVKKMKNYWRQLLNAKLITQRKFDNLTKAERGGLSELDKAGFIKRQLVETRQITKHVAQILDSRMNTKYDENDKLIREVKVITLKSKLVSDFRKDFQFYKVREINNYHHAHDAYLNAVVGTALIKKYPKLESEFVYGDYKVYDVRKMIAKSEQEIGKATAKYFFYSNIMNFFKTEITLANGEIRKRPLIETNGETGEIVWDKGRDFATVRKVLSMPQVNIVKKTEVQTGGFSKESILPKRNSDKLIARKKDWDPKKYGGFDSPTVAYSVLVVAKVEKGKSKKLKSVKELLGITIMERSSFEKNPIDFLEAKGYKEVKKDLIIKLPKYSLFELENGRKRMLASAGELQKGNELALPSKYVNFLYLASHYEKLKGSPEDNEQKQLFVEQHKHYLDEIIEQISEFSKRVILADANLDKVLSAYNKHRDKPIREQAENIIHLFTLTNLGAPAAFKYFDTTIDRKRYTSTKEVLDATLIHQSITGLYETRIDLSQLGGDGGPAPEAAAKGGTLNIEDEYRLHETSKEPDVSLGSTWLSDFPQAWAETGGMGLAVRQAPLIIPLKATSTPVSIKQYPMSQEARLGIKPHIQRLLDQGILVPCQSPWNTPLLPVKKPGTNDYRPVQDLREVNKRVEDIHPTVPNPYNLLSGLPPSHQWYTVLDLKDAFFCLRLHPTSQPLFAFEWRDPEMGISGQLTWTRLPQGFKNSPTLFNEALHRDLAGFRIQHPDLILLQYVDDLLLAATSELDCQQGTRALLQTLGDLGYRASAKKAQICQKQVKYLGYLLKEGQRWLTEARKETVMGQPIPKTPRQLREFLGKAGFCRLFIPGFAEMAAPLYPLTKPGTLFNWGPDQQKAFQEIKQALLTAPALGLPDLTKPFELFVDEKQGYAKGVLTQKLGPWRRPVAYLSKKLDPVAAGWPPCLRMVAAIAVLTKDAGKLTMGQPLVILAPHAVEALVKQPPDRWLSNARMTHYQALLLDTDRVQFGPVVALNPATLLPLPEEGLQHDCLDILAEAHGTRSDLMDQPLPDADHTWYTDGSSFLQEGQRKAGAAVTTETEVIWARALPAGTSAQRAELIALTQALKMAEGKKLNVYTDSRYAFATAHIHGEIYRRRGWLTSEGKEIKNKDEILALLKALFLPKRLSIIHCPGHQKGNSAEARGNRMADQAAREVATRETPETSTLLAGKRTADGSEFEKRTADGSEFESPKKKAKVE

SEQ ID NO: 2357 - protein, 2096 aa, synthetic construct
MPAAKRVKLDGGDKKYSIGLDIGTNSVGWAVITDEYKVPSKKFKVLGNTDRHSIKKNLIGALLFDSGETAEATRLKRTARRRYTRRKNRICYLQEIFSNEMAKVDDSFFHRLEESFLVEEDKKHERHPIFGNIVDEVAYHEKYPTIYHLRKKLVDSTDKADLRLIYLALAHMIKFRGHFLIEGDLNPDNSDVDKLFIQLVQTYNQLFEENPINASGVDAKAILSARLSKSRRLENLIAQLPGEKKNGLFGNLIALSLGLTPNFKSNFDLAEDAKLQLSKDTYDDDLDNLLAQIGDQYADLFLAAKNLSDAILLSDILRVNTEITKAPLSASMIKRYDEHHQDLTLLKALVRQQLPEKYKEIFFDQSKNGYAGYIDGGASQEEFYKFIKPILEKMDGTEELLVKLNREDLLRKQRTFDNGSIPHQIHLGELHAILRRQEDFYPFLKDNREKIEKILTFRIPYYVGPLARGNSRFAWMTRKSEETITPWNFEEVVDKGASAQSFIERMTNFDKNLPNEKVLPKHSLLYEYFTVYNELTKVKYVTEGMRKPAFLSGEQKKAIVDLLFKTNRKVTVKQLKEDYFKKIECFDSVEISGVEDRFNASLGTYHDLLKIIKDKDFLDNEENEDILEDIVLTLTLFEDREMIEERLKTYAHLFDDKVMKQLKRRRYTGWGRLSRKLINGIRDKQSGKTILDFLKSDGFANRNFMQLIHDDSLTFKEDIQKAQVSGQGDSLHEHIANLAGSPAIKKGILQTVKVVDELVKVMGRHKPENIVIEMARENQTTQKGQKNSRERMKRIEEGIKELGSQILKEHPVENTQLQNEKLYLYYLQNGRDMYVDQELDINRLSDYDVDHIVPQSFLKDDSIDNKVLTRSDKARGKSDNVPSEEVVKKMKNYWRQLLNAKLITQRKFDNLTKAERGGLSELDKAGFIKRQLVETRQITKHVAQILDSRMNTKYDENDKLIREVKVITLKSKLVSDFRKDFQFYKVREINNYHHAHDAYLNAVVGTALIKKYPKLESEFVYGDYKVYDVRKMIAKSEQEIGKATAKYFFYSNIMNFFKTEITLANGEIRKRPLIETNGETGEIVWDKGRDFATVRKVLSMPQVNIVKKTEVQTGGFSKESILPKRNSDKLIARKKDWDPKKYGGFDSPTVAYSVLVVAKVEKGKSKKLKSVKELLGITIMERSSFEKNPIDFLEAKGYKEVKKDLIIKLPKYSLFELENGRKRMLASAGELQKGNELALPSKYVNFLYLASHYEKLKGSPEDNEQKQLFVEQHKHYLDEIIEQISEFSKRVILADANLDKVLSAYNKHRDKPIREQAENIIHLFTLTNLGAPAAFKYFDTTIDRKRYTSTKEVLDATLIHQSITGLYETRIDLSQLGGDGGEAAAKPAPGSSGGTLNIEDEYRLHETSKEPDVSLGSTWLSDFPQAWAETGGMGLAVRQAPLIIPLKATSTPVSIKQYPMSQEARLGIKPHIQRLLDQGILVPCQSPWNTPLLPVKKPGTNDYRPVQDLREVNKRVEDIHPTVPNPYNLLSGLPPSHQWYTVLDLKDAFFCLRLHPTSQPLFAFEWRDPEMGISGQLTWTRLPQGFKNSPTLFNEALHRDLAGFRIQHPDLILLQYVDDLLLAATSELDCQQGTRALLQTLGDLGYRASAKKAQICQKQVKYLGYLLKEGQRWLTEARKETVMGQPIPKTPRQLREFLGKAGFCRLFIPGFAEMAAPLYPLTKPGTLFNWGPDQQKAFQEIKQALLTAPALGLPDLTKPFELFVDEKQGYAKGVLTQKLGPWRRPVAYLSKKLDPVAAGWPPCLRMVAAIAVLTKDAGKLTMGQPLVILAPHAVEALVKQPPDRWLSNARMTHYQALLLDTDRVQFGPVVALNPATLLPLPEEGLQHDCLDILAEAHGTRSDLMDQPLPDADHTWYTDGSSFLQEGQRKAGAAVTTETEVIWARALPAGTSAQRAELIALTQALKMAEGKKLNVYTDSRYAFATAHIHGEIYRRRGWLTSEGKEIKNKDEILALLKALFLPKRLSIIHCPGHQKGNSAEARGNRMADQAAREVATRETPETSTLLAGKRTADGSEFEKRTADGSEFESPKKKAKVE

SEQ ID NO: 2358 - protein, 2096 aa, synthetic construct
MPAAKRVKLDGGDKKYSIGLDIGTNSVGWAVITDEYKVPSKKFKVLGNTDRHSIKKNLIGALLFDSGETAEATRLKRTARRRYTRRKNRICYLQEIFSNEMAKVDDSFFHRLEESFLVEEDKKHERHPIFGNIVDEVAYHEKYPTIYHLRKKLVDSTDKADLRLIYLALAHMIKFRGHFLIEGDLNPDNSDVDKLFIQLVQTYNQLFEENPINASGVDAKAILSARLSKSRRLENLIAQLPGEKKNGLFGNLIALSLGLTPNFKSNFDLAEDAKLQLSKDTYDDDLDNLLAQIGDQYADLFLAAKNLSDAILLSDILRVNTEITKAPLSASMIKRYDEHHQDLTLLKALVRQQLPEKYKEIFFDQSKNGYAGYIDGGASQEEFYKFIKPILEKMDGTEELLVKLNREDLLRKQRTFDNGSIPHQIHLGELHAILRRQEDFYPFLKDNREKIEKILTFRIPYYVGPLARGNSRFAWMTRKSEETITPWNFEEVVDKGASAQSFIERMTNFDKNLPNEKVLPKHSLLYEYFTVYNELTKVKYVTEGMRKPAFLSGEQKKAIVDLLFKTNRKVTVKQLKEDYFKKIECFDSVEISGVEDRFNASLGTYHDLLKIIKDKDFLDNEENEDILEDIVLTLTLFEDREMIEERLKTYAHLFDDKVMKQLKRRRYTGWGRLSRKLINGIRDKQSGKTILDFLKSDGFANRNFMQLIHDDSLTFKEDIQKAQVSGQGDSLHEHIANLAGSPAIKKGILQTVKVVDELVKVMGRHKPENIVIEMARENQTTQKGQKNSRERMKRIEEGIKELGSQILKEHPVENTQLQNEKLYLYYLQNGRDMYVDQELDINRLSDYDVDHIVPQSFLKDDSIDNKVLTRSDKARGKSDNVPSEEVVKKMKNYWRQLLNAKLITQRKFDNLTKAERGGLSELDKAGFIKRQLVETRQITKHVAQILDSRMNTKYDENDKLIREVKVITLKSKLVSDFRKDFQFYKVREINNYHHAHDAYLNAVVGTALIKKYPKLESEFVYGDYKVYDVRKMIAKSEQEIGKATAKYFFYSNIMNFFKTEITLANGEIRKRPLIETNGETGEIVWDKGRDFATVRKVLSMPQVNIVKKTEVQTGGFSKESILPKRNSDKLIARKKDWDPKKYGGFDSPTVAYSVLVVAKVEKGKSKKLKSVKELLGITIMERSSFEKNPIDFLEAKGYKEVKKDLIIKLPKYSLFELENGRKRMLASAGELQKGNELALPSKYVNFLYLASHYEKLKGSPEDNEQKQLFVEQHKHYLDEIIEQISEFSKRVILADANLDKVLSAYNKHRDKPIREQAENIIHLFTLTNLGAPAAFKYFDTTIDRKRYTSTKEVLDATLIHQSITGLYETRIDLSQLGGDGGGGSEAAAKGGGGGTLNIEDEYRLHETSKEPDVSLGSTWLSDFPQAWAETGGMGLAVRQAPLIIPLKATSTPVSIKQYPMSQEARLGIKPHIQRLLDQGILVPCQSPWNTPLLPVKKPGTNDYRPVQDLREVNKRVEDIHPTVPNPYNLLSGLPPSHQWYTVLDLKDAFFCLRLHPTSQPLFAFEWRDPEMGISGQLTWTRLPQGFKNSPTLFNEALHRDLAGFRIQHPDLILLQYVDDLLLAATSELDCQQGTRALLQTLGDLGYRASAKKAQICQKQVKYLGYLLKEGQRWLTEARKETVMGQPIPKTPRQLREFLGKAGFCRLFIPGFAEMAAPLYPLTKPGTLFNWGPDQQKAFQEIKQALLTAPALGLPDLTKPFELFVDEKQGYAKGVLTQKLGPWRRPVAYLSKKLDPVAAGWPPCLRMVAAIAVLTKDAGKLTMGQPLVILAPHAVEALVKQPPDRWLSNARMTHYQALLLDTDRVQFGPVVALNPATLLPLPEEGLQHDCLDILAEAHGTRSDLMDQPLPDADHTWYTDGSSFLQEGQRKAGAAVTTETEVIWARALPAGTSAQRAELIALTQALKMAEGKKLNVYTDSRYAFATAHIHGEIYRRRGWLTSEGKEIKNKDEILALLKALFLPKRLSIIHCPGHQKGNSAEARGNRMADQAAREVATRETPETSTLLAGKRTADGSEFEKRTADGSEFESPKKKAKVE

SEQ ID NO: 2359 - protein, 2096 aa, synthetic construct
MPAAKRVKLDGGDKKYSIGLDIGTNSVGWAVITDEYKVPSKKFKVLGNTDRHSIKKNLIGALLFDSGETAEATRLKRTARRRYTRRKNRICYLQEIFSNEMAKVDDSFFHRLEESFLVEEDKKHERHPIFGNIVDEVAYHEKYPTIYHLRKKLVDSTDKADLRLIYLALAHMIKFRGHFLIEGDLNPDNSDVDKLFIQLVQTYNQLFEENPINASGVDAKAILSARLSKSRRLENLIAQLPGEKKNGLFGNLIALSLGLTPNFKSNFDLAEDAKLQLSKDTYDDDLDNLLAQIGDQYADLFLAAKNLSDAILLSDILRVNTEITKAPLSASMIKRYDEHHQDLTLLKALVRQQLPEKYKEIFFDQSKNGYAGYIDGGASQEEFYKFIKPILEKMDGTEELLVKLNREDLLRKQRTFDNGSIPHQIHLGELHAILRRQEDFYPFLKDNREKIEKILTFRIPYYVGPLARGNSRFAWMTRKSEETITPWNFEEVVDKGASAQSFIERMTNFDKNLPNEKVLPKHSLLYEYFTVYNELTKVKYVTEGMRKPAFLSGEQKKAIVDLLFKTNRKVTVKQLKEDYFKKIECFDSVEISGVEDRFNASLGTYHDLLKIIKDKDFLDNEENEDILEDIVLTLTLFEDREMIEERLKTYAHLFDDKVMKQLKRRRYTGWGRLSRKLINGIRDKQSGKTILDFLKSDGFANRNFMQLIHDDSLTFKEDIQKAQVSGQGDSLHEHIANLAGSPAIKKGILQTVKVVDELVKVMGRHKPENIVIEMARENQTTQKGQKNSRERMKRIEEGIKELGSQILKEHPVENTQLQNEKLYLYYLQNGRDMYVDQELDINRLSDYDVDHIVPQSFLKDDSIDNKVLTRSDKARGKSDNVPSEEVVKKMKNYWRQLLNAKLITQRKFDNLTKAERGGLSELDKAGFIKRQLVETRQITKHVAQILDSRMNTKYDENDKLIREVKVITLKSKLVSDFRKDFQFYKVREINNYHHAHDAYLNAVVGTALIKKYPKLESEFVYGDYKVYDVRKMIAKSEQEIGKATAKYFFYSNIMNFFKTEITLANGEIRKRPLIETNGETGEIVWDKGRDFATVRKVLSMPQVNIVKKTEVQTGGFSKESILPKRNSDKLIARKKDWDPKKYGGFDSPTVAYSVLVVAKVEKGKSKKLKSVKELLGITIMERSSFEKNPIDFLEAKGYKEVKKDLIIKLPKYSLFELENGRKRMLASAGELQKGNELALPSKYVNFLYLASHYEKLKGSPEDNEQKQLFVEQHKHYLDEIIEQISEFSKRVILADANLDKVLSAYNKHRDKPIREQAENIIHLFTLTNLGAPAAFKYFDTTIDRKRYTSTKEVLDATLIHQSITGLYETRIDLSQLGGDGGGSSEAAAKPAPGGTLNIEDEYRLHETSKEPDVSLGSTWLSDFPQAWAETGGMGLAVRQAPLIIPLKATSTPVSIKQYPMSQEARLGIKPHIQRLLDQGILVPCQSPWNTPLLPVKKPGTNDYRPVQDLREVNKRVEDIHPTVPNPYNLLSGLPPSHQWYTVLDLKDAFFCLRLHPTSQPLFAFEWRDPEMGISGQLTWTRLPQGFKNSPTLFNEALHRDLAGFRIQHPDLILLQYVDDLLLAATSELDCQQGTRALLQTLGDLGYRASAKKAQICQKQVKYLGYLLKEGQRWLTEARKETVMGQPIPKTPRQLREFLGKAGFCRLFIPGFAEMAAPLYPLTKPGTLFNWGPDQQKAFQEIKQALLTAPALGLPDLTKPFELFVDEKQGYAKGVLTQKLGPWRRPVAYLSKKLDPVAAGWPPCLRMVAAIAVLTKDAGKLTMGQPLVILAPHAVEALVKQPPDRWLSNARMTHYQALLLDTDRVQFGPVVALNPATLLPLPEEGLQHDCLDILAEAHGTRSDLMDQPLPDADHTWYTDGSSFLQEGQRKAGAAVTTETEVIWARALPAGTSAQRAELIALTQALKMAEGKKLNVYTDSRYAFATAHIHGEIYRRRGWLTSEGKEIKNKDEILALLKALFLPKRLSIIHCPGHQKGNSAEARGNRMADQAAREVATRETPETSTLLAGKRTADGSEFEKRTADGSEFESPKKKAKVE

SEQ ID NO: 2360 - protein, 2094 aa, synthetic construct
MPAAKRVKLDGGDKKYSIGLDIGTNSVGWAVITDEYKVPSKKFKVLGNTDRHSIKKNLIGALLFDSGETAEATRLKRTARRRYTRRKNRICYLQEIFSNEMAKVDDSFFHRLEESFLVEEDKKHERHPIFGNIVDEVAYHEKYPTIYHLRKKLVDSTDKADLRLIYLALAHMIKFRGHFLIEGDLNPDNSDVDKLFIQLVQTYNQLFEENPINASGVDAKAILSARLSKSRRLENLIAQLPGEKKNGLFGNLIALSLGLTPNFKSNFDLAEDAKLQLSKDTYDDDLDNLLAQIGDQYADLFLAAKNLSDAILLSDILRVNTEITKAPLSASMIKRYDEHHQDLTLLKALVRQQLPEKYKEIFFDQSKNGYAGYIDGGASQEEFYKFIKPILEKMDGTEELLVKLNREDLLRKQRTFDNGSIPHQIHLGELHAILRRQEDFYPFLKDNREKIEKILTFRIPYYVGPLARGNSRFAWMTRKSEETITPWNFEEVVDKGASAQSFIERMTNFDKNLPNEKVLPKHSLLYEYFTVYNELTKVKYVTEGMRKPAFLSGEQKKAIVDLLFKTNRKVTVKQLKEDYFKKIECFDSVEISGVEDRFNASLGTYHDLLKIIKDKDFLDNEENEDILEDIVLTLTLFEDREMIEERLKTYAHLFDDKVMKQLKRRRYTGWGRLSRKLINGIRDKQSGKTILDFLKSDGFANRNFMQLIHDDSLTFKEDIQKAQVSGQGDSLHEHIANLAGSPAIKKGILQTVKVVDELVKVMGRHKPENIVIEMARENQTTQKGQKNSRERMKRIEEGIKELGSQILKEHPVENTQLQNEKLYLYYLQNGRDMYVDQELDINRLSDYDVDHIVPQSFLKDDSIDNKVLTRSDKARGKSDNVPSEEVVKKMKNYWRQLLNAKLITQRKFDNLTKAERGGLSELDKAGFIKRQLVETRQITKHVAQILDSRMNTKYDENDKLIREVKVITLKSKLVSDFRKDFQFYKVREINNYHHAHDAYLNAVVGTALIKKYPKLESEFVYGDYKVYDVRKMIAKSEQEIGKATAKYFFYSNIMNFFKTEITLANGEIRKRPLIETNGETGEIVWDKGRDFATVRKVLSMPQVNIVKKTEVQTGGFSKESILPKRNSDKLIARKKDWDPKKYGGFDSPTVAYSVLVVAKVEKGKSKKLKSVKELLGITIMERSSFEKNPIDFLEAKGYKEVKKDLIIKLPKYSLFELENGRKRMLASAGELQKGNELALPSKYVNFLYLASHYEKLKGSPEDNEQKQLFVEQHKHYLDEIIEQISEFSKRVILADANLDKVLSAYNKHRDKPIREQAENIIHLFTLTNLGAPAAFKYFDTTIDRKRYTSTKEVLDATLIHQSITGLYETRIDLSQLGGDGGGGSGGSGGSGGTLNIEDEYRLHETSKEPDVSLGSTWLSDFPQAWAETGGMGLAVRQAPLIIPLKATSTPVSIKQYPMSQEARLGIKPHIQRLLDQGILVPCQSPWNTPLLPVKKPGTNDYRPVQDLREVNKRVEDIHPTVPNPYNLLSGLPPSHQWYTVLDLKDAFFCLRLHPTSQPLFAFEWRDPEMGISGQLTWTRLPQGFKNSPTLFNEALHRDLAGFRIQHPDLILLQYVDDLLLAATSELDCQQGTRALLQTLGDLGYRASAKKAQICQKQVKYLGYLLKEGQRWLTEARKETVMGQPIPKTPRQLREFLGKAGFCRLFIPGFAEMAAPLYPLTKPGTLFNWGPDQQKAFQEIKQALLTAPALGLPDLTKPFELFVDEKQGYAKGVLTQKLGPWRRPVAYLSKKLDPVAAGWPPCLRMVAAIAVLTKDAGKLTMGQPLVILAPHAVEALVKQPPDRWLSNARMTHYQALLLDTDRVQFGPVVALNPATLLPLPEEGLQHDCLDILAEAHGTRSDLMDQPLPDADHTWYTDGSSFLQEGQRKAGAAVTTETEVIWARALPAGTSAQRAELIALTQALKMAEGKKLNVYTDSRYAFATAHIHGEIYRRRGWLTSEGKEIKNKDEILALLKALFLPKRLSIIHCPGHQKGNSAEARGNRMADQAAREVATRETPETSTLLAGKRTADGSEFEKRTADGSEFESPKKKAKVE

SEQ ID NO: 2361 - protein, 2095 aa, synthetic construct
MPAAKRVKLDGGDKKYSIGLDIGTNSVGWAVITDEYKVPSKKFKVLGNTDRHSIKKNLIGALLFDSGETAEATRLKRTARRRYTRRKNRICYLQEIFSNEMAKVDDSFFHRLEESFLVEEDKKHERHPIFGNIVDEVAYHEKYPTIYHLRKKLVDSTDKADLRLIYLALAHMIKFRGHFLIEGDLNPDNSDVDKLFIQLVQTYNQLFEENPINASGVDAKAILSARLSKSRRLENLIAQLPGEKKNGLFGNLIALSLGLTPNFKSNFDLAEDAKLQLSKDTYDDDLDNLLAQIGDQYADLFLAAKNLSDAILLSDILRVNTEITKAPLSASMIKRYDEHHQDLTLLKALVRQQLPEKYKEIFFDQSKNGYAGYIDGGASQEEFYKFIKPILEKMDGTEELLVKLNREDLLRKQRTFDNGSIPHQIHLGELHAILRRQEDFYPFLKDNREKIEKILTFRIPYYVGPLARGNSRFAWMTRKSEETITPWNFEEVVDKGASAQSFIERMTNFDKNLPNEKVLPKHSLLYEYFTVYNELTKVKYVTEGMRKPAFLSGEQKKAIVDLLFKTNRKVTVKQLKEDYFKKIECFDSVEISGVEDRFNASLGTYHDLLKIIKDKDFLDNEENEDILEDIVLTLTLFEDREMIEERLKTYAHLFDDKVMKQLKRRRYTGWGRLSRKLINGIRDKQSGKTILDFLKSDGFANRNFMQLIHDDSLTFKEDIQKAQVSGQGDSLHEHIANLAGSPAIKKGILQTVKVVDELVKVMGRHKPENIVIEMARENQTTQKGQKNSRERMKRIEEGIKELGSQILKEHPVENTQLQNEKLYLYYLQNGRDMYVDQELDINRLSDYDVDHIVPQSFLKDDSIDNKVLTRSDKARGKSDNVPSEEVVKKMKNYWRQLLNAKLITQRKFDNLTKAERGGLSELDKAGFIKRQLVETRQITKHVAQILDSRMNTKYDENDKLIREVKVITLKSKLVSDFRKDFQFYKVREINNYHHAHDAYLNAVVGTALIKKYPKLESEFVYGDYKVYDVRKMIAKSEQEIGKATAKYFFYSNIMNFFKTEITLANGEIRKRPLIETNGETGEIVWDKGRDFATVRKVLSMPQVNIVKKTEVQTGGFSKESILPKRNSDKLIARKKDWDPKKYGGFDSPTVAYSVLVVAKVEKGKSKKLKSVKELLGITIMERSSFEKNPIDFLEAKGYKEVKKDLIIKLPKYSLFELENGRKRMLASAGELQKGNELALPSKYVNFLYLASHYEKLKGSPEDNEQKQLFVEQHKHYLDEIIEQISEFSKRVILADANLDKVLSAYNKHRDKPIREQAENIIHLFTLTNLGAPAAFKYFDTTIDRKRYTSTKEVLDATLIHQSITGLYETRIDLSQLGGDGGEAAAKEAAAKGGTLNIEDEYRLHETSKEPDVSLGSTWLSDFPQAWAETGGMGLAVRQAPLIIPLKATSTPVSIKQYPMSQEARLGIKPHIQRLLDQGILVPCQSPWNTPLLPVKKPGTNDYRPVQDLREVNKRVEDIHPTVPNPYNLLSGLPPSHQWYTVLDLKDAFFCLRLHPTSQPLFAFEWRDPEMGISGQLTWTRLPQGFKNSPTLFNEALHRDLAGFRIQHPDLILLQYVDDLLLAATSELDCQQGTRALLQTLGDLGYRASAKKAQICQKQVKYLGYLLKEGQRWLTEARKETVMGQPIPKTPRQLREFLGKAGFCRLFIPGFAEMAAPLYPLTKPGTLFNWGPDQQKAFQEIKQALLTAPALGLPDLTKPFELFVDEKQGYAKGVLTQKLGPWRRPVAYLSKKLDPVAAGWPPCLRMVAAIAVLTKDAGKLTMGQPLVILAPHAVEALVKQPPDRWLSNARMTHYQALLLDTDRVQFGPVVALNPATLLPLPEEGLQHDCLDILAEAHGTRSDLMDQPLPDADHTWYTDGSSFLQEGQRKAGAAVTTETEVIWARALPAGTSAQRAELIALTQALKMAEGKKLNVYTDSRYAFATAHIHGEIYRRRGWLTSEGKEIKNKDEILALLKALFLPKRLSIIHCPGHQKGNSAEARGNRMADQAAREVATRETPETSTLLAGKRTADGSEFEKRTADGSEFESPKKKAKVE

SEQ ID NO: 2362 - protein, 2091 aa, synthetic construct
MPAAKRVKLDGGDKKYSIGLDIGTNSVGWAVITDEYKVPSKKFKVLGNTDRHSIKKNLIGALLFDSGETAEATRLKRTARRRYTRRKNRICYLQEIFSNEMAKVDDSFFHRLEESFLVEEDKKHERHPIFGNIVDEVAYHEKYPTIYHLRKKLVDSTDKADLRLIYLALAHMIKFRGHFLIEGDLNPDNSDVDKLFIQLVQTYNQLFEENPINASGVDAKAILSARLSKSRRLENLIAQLPGEKKNGLFGNLIALSLGLTPNFKSNFDLAEDAKLQLSKDTYDDDLDNLLAQIGDQYADLFLAAKNLSDAILLSDILRVNTEITKAPLSASMIKRYDEHHQDLTLLKALVRQQLPEKYKEIFFDQSKNGYAGYIDGGASQEEFYKFIKPILEKMDGTEELLVKLNREDLLRKQRTFDNGSIPHQIHLGELHAILRRQEDFYPFLKDNREKIEKILTFRIPYYVGPLARGNSRFAWMTRKSEETITPWNFEEVVDKGASAQSFIERMTNFDKNLPNEKVLPKHSLLYEYFTVYNELTKVKYVTEGMRKPAFLSGEQKKAIVDLLFKTNRKVTVKQLKEDYFKKIECFDSVEISGVEDRFNASLGTYHDLLKIIKDKDFLDNEENEDILEDIVLTLTLFEDREMIEERLKTYAHLFDDKVMKQLKRRRYTGWGRLSRKLINGIRDKQSGKTILDFLKSDGFANRNFMQLIHDDSLTFKEDIQKAQVSGQGDSLHEHIANLAGSPAIKKGILQTVKVVDELVKVMGRHKPENIVIEMARENQTTQKGQKNSRERMKRIEEGIKELGSQILKEHPVENTQLQNEKLYLYYLQNGRDMYVDQELDINRLSDYDVDHIVPQSFLKDDSIDNKVLTRSDKARGKSDNVPSEEVVKKMKNYWRQLLNAKLITQRKFDNLTKAERGGLSELDKAGFIKRQLVETRQITKHVAQILDSRMNTKYDENDKLIREVKVITLKSKLVSDFRKDFQFYKVREINNYHHAHDAYLNAVVGTALIKKYPKLESEFVYGDYKVYDVRKMIAKSEQEIGKATAKYFFYSNIMNFFKTEITLANGEIRKRPLIETNGETGEIVWDKGRDFATVRKVLSMPQVNIVKKTEVQTGGFSKESILPKRNSDKLIARKKDWDPKKYGGFDSPTVAYSVLVVAKVEKGKSKKLKSVKELLGITIMERSSFEKNPIDFLEAKGYKEVKKDLIIKLPKYSLFELENGRKRMLASAGELQKGNELALPSKYVNFLYLASHYEKLKGSPEDNEQKQLFVEQHKHYLDEIIEQISEFSKRVILADANLDKVLSAYNKHRDKPIREQAENIIHLFTLTNLGAPAAFKYFDTTIDRKRYTSTKEVLDATLIHQSITGLYETRIDLSQLGGDGGGSSGGGGGTLNIEDEYRLHETSKEPDVSLGSTWLSDFPQAWAETGGMGLAVRQAPLIIPLKATSTPVSIKQYPMSQEARLGIKPHIQRLLDQGILVPCQSPWNTPLLPVKKPGTNDYRPVQDLREVNKRVEDIHPTVPNPYNLLSGLPPSHQWYTVLDLKDAFFCLRLHPTSQPLFAFEWRDPEMGISGQLTWTRLPQGFKNSPTLFNEALHRDLAGFRIQHPDLILLQYVDDLLLAATSELDCQQGTRALLQTLGDLGYRASAKKAQICQKQVKYLGYLLKEGQRWLTEARKETVMGQPIPKTPRQLREFLGKAGFCRLFIPGFAEMAAPLYPLTKPGTLFNWGPDQQKAFQEIKQALLTAPALGLPDLTKPFELFVDEKQGYAKGVLTQKLGPWRRPVAYLSKKLDPVAAGWPPCLRMVAAIAVLTKDAGKLTMGQPLVILAPHAVEALVKQPPDRWLSNARMTHYQALLLDTDRVQFGPVVALNPATLLPLPEEGLQHDCLDILAEAHGTRSDLMDQPLPDADHTWYTDGSSFLQEGQRKAGAAVTTETEVIWARALPAGTSAQRAELIALTQALKMAEGKKLNVYTDSRYAFATAHIHGEIYRRRGWLTSEGKEIKNKDEILALLKALFLPKRLSIIHCPGHQKGNSAEARGNRMADQAAREVATRETPETSTLLAGKRTADGSEFEKRTADGSEFESPKKKAKVE

SEQ ID NO: 2363 - protein, 2093 aa, synthetic construct
MPAAKRVKLDGGDKKYSIGLDIGTNSVGWAVITDEYKVPSKKFKVLGNTDRHSIKKNLIGALLFDSGETAEATRLKRTARRRYTRRKNRICYLQEIFSNEMAKVDDSFFHRLEESFLVEEDKKHERHPIFGNIVDEVAYHEKYPTIYHLRKKLVDSTDKADLRLIYLALAHMIKFRGHFLIEGDLNPDNSDVDKLFIQLVQTYNQLFEENPINASGVDAKAILSARLSKSRRLENLIAQLPGEKKNGLFGNLIALSLGLTPNFKSNFDLAEDAKLQLSKDTYDDDLDNLLAQIGDQYADLFLAAKNLSDAILLSDILRVNTEITKAPLSASMIKRYDEHHQDLTLLKALVRQQLPEKYKEIFFDQSKNGYAGYIDGGASQEEFYKFIKPILEKMDGTEELLVKLNREDLLRKQRTFDNGSIPHQIHLGELHAILRRQEDFYPFLKDNREKIEKILTFRIPYYVGPLARGNSRFAWMTRKSEETITPWNFEEVVDKGASAQSFIERMTNFDKNLPNEKVLPKHSLLYEYFTVYNELTKVKYVTEGMRKPAFLSGEQKKAIVDLLFKTNRKVTVKQLKEDYFKKIECFDSVEISGVEDRFNASLGTYHDLLKIIKDKDFLDNEENEDILEDIVLTLTLFEDREMIEERLKTYAHLFDDKVMKQLKRRRYTGWGRLSRKLINGIRDKQSGKTILDFLKSDGFANRNFMQLIHDDSLTFKEDIQKAQVSGQGDSLHEHIANLAGSPAIKKGILQTVKVVDELVKVMGRHKPENIVIEMARENQTTQKGQKNSRERMKRIEEGIKELGSQILKEHPVENTQLQNEKLYLYYLQNGRDMYVDQELDINRLSDYDVDHIVPQSFLKDDSIDNKVLTRSDKARGKSDNVPSEEVVKKMKNYWRQLLNAKLITQRKFDNLTKAERGGLSELDKAGFIKRQLVETRQITKHVAQILDSRMNTKYDENDKLIREVKVITLKSKLVSDFRKDFQFYKVREINNYHHAHDAYLNAVVGTALIKKYPKLESEFVYGDYKVYDVRKMIAKSEQEIGKATAKYFFYSNIMNFFKTEITLANGEIRKRPLIETNGETGEIVWDKGRDFATVRKVLSMPQVNIVKKTEVQTGGFSKESILPKRNSDKLIARKKDWDPKKYGGFDSPTVAYSVLVVAKVEKGKSKKLKSVKELLGITIMERSSFEKNPIDFLEAKGYKEVKKDLIIKLPKYSLFELENGRKRMLASAGELQKGNELALPSKYVNFLYLASHYEKLKGSPEDNEQKQLFVEQHKHYLDEIIEQISEFSKRVILADANLDKVLSAYNKHRDKPIREQAENIIHLFTLTNLGAPAAFKYFDTTIDRKRYTSTKEVLDATLIHQSITGLYETRIDLSQLGGDGGGGSEAAAKGGTLNIEDEYRLHETSKEPDVSLGSTWLSDFPQAWAETGGMGLAVRQAPLIIPLKATSTPVSIKQYPMSQEARLGIKPHIQRLLDQGILVPCQSPWNTPLLPVKKPGTNDYRPVQDLREVNKRVEDIHPTVPNPYNLLSGLPPSHQWYTVLDLKDAFFCLRLHPTSQPLFAFEWRDPEMGISGQLTWTRLPQGFKNSPTLFNEALHRDLAGFRIQHPDLILLQYVDDLLLAATSELDCQQGTRALLQTLGDLGYRASAKKAQICQKQVKYLGYLLKEGQRWLTEARKETVMGQPIPKTPRQLREFLGKAGFCRLFIPGFAEMAAPLYPLTKPGTLFNWGPDQQKAFQEIKQALLTAPALGLPDLTKPFELFVDEKQGYAKGVLTQKLGPWRRPVAYLSKKLDPVAAGWPPCLRMVAAIAVLTKDAGKLTMGQPLVILAPHAVEALVKQPPDRWLSNARMTHYQALLLDTDRVQFGPVVALNPATLLPLPEEGLQHDCLDILAEAHGTRSDLMDQPLPDADHTWYTDGSSFLQEGQRKAGAAVTTETEVIWARALPAGTSAQRAELIALTQALKMAEGKKLNVYTDSRYAFATAHIHGEIYRRRGWLTSEGKEIKNKDEILALLKALFLPKRLSIIHCPGHQKGNSAEARGNRMADQAAREVATRETPETSTLLAGKRTADGSEFEKRTADGSEFESPKKKAKVE

SEQ ID NO: 2364 - protein, 2090 aa, synthetic construct
MPAAKRVKLDGGDKKYSIGLDIGTNSVGWAVITDEYKVPSKKFKVLGNTDRHSIKKNLIGALLFDSGETAEATRLKRTARRRYTRRKNRICYLQEIFSNEMAKVDDSFFHRLEESFLVEEDKKHERHPIFGNIVDEVAYHEKYPTIYHLRKKLVDSTDKADLRLIYLALAHMIKFRGHFLIEGDLNPDNSDVDKLFIQLVQTYNQLFEENPINASGVDAKAILSARLSKSRRLENLIAQLPGEKKNGLFGNLIALSLGLTPNFKSNFDLAEDAKLQLSKDTYDDDLDNLLAQIGDQYADLFLAAKNLSDAILLSDILRVNTEITKAPLSASMIKRYDEHHQDLTLLKALVRQQLPEKYKEIFFDQSKNGYAGYIDGGASQEEFYKFIKPILEKMDGTEELLVKLNREDLLRKQRTFDNGSIPHQIHLGELHAILRRQEDFYPFLKDNREKIEKILTFRIPYYVGPLARGNSRFAWMTRKSEETITPWNFEEVVDKGASAQSFIERMTNFDKNLPNEKVLPKHSLLYEYFTVYNELTKVKYVTEGMRKPAFLSGEQKKAIVDLLFKTNRKVTVKQLKEDYFKKIECFDSVEISGVEDRFNASLGTYHDLLKIIKDKDFLDNEENEDILEDIVLTLTLFEDREMIEERLKTYAHLFDDKVMKQLKRRRYTGWGRLSRKLINGIRDKQSGKTILDFLKSDGFANRNFMQLIHDDSLTFKEDIQKAQVSGQGDSLHEHIANLAGSPAIKKGILQTVKVVDELVKVMGRHKPENIVIEMARENQTTQKGQKNSRERMKRIEEGIKELGSQILKEHPVENTQLQNEKLYLYYLQNGRDMYVDQELDINRLSDYDVDHIVPQSFLKDDSIDNKVLTRSDKARGKSDNVPSEEVVKKMKNYWRQLLNAKLITQRKFDNLTKAERGGLSELDKAGFIKRQLVETRQITKHVAQILDSRMNTKYDENDKLIREVKVITLKSKLVSDFRKDFQFYKVREINNYHHAHDAYLNAVVGTALIKKYPKLESEFVYGDYKVYDVRKMIAKSEQEIGKATAKYFFYSNIMNFFKTEITLANGEIRKRPLIETNGETGEIVWDKGRDFATVRKVLSMPQVNIVKKTEVQTGGFSKESILPKRNSDKLIARKKDWDPKKYGGFDSPTVAYSVLVVAKVEKGKSKKLKSVKELLGITIMERSSFEKNPIDFLEAKGYKEVKKDLIIKLPKYSLFELENGRKRMLASAGELQKGNELALPSKYVNFLYLASHYEKLKGSPEDNEQKQLFVEQHKHYLDEIIEQISEFSKRVILADANLDKVLSAYNKHRDKPIREQAENIIHLFTLTNLGAPAAFKYFDTTIDRKRYTSTKEVLDATLIHQSITGLYETRIDLSQLGGDGGPAPAPGGTLNIEDEYRLHETSKEPDVSLGSTWLSDFPQAWAETGGMGLAVRQAPLIIPLKATSTPVSIKQYPMSQEARLGIKPHIQRLLDQGILVPCQSPWNTPLLPVKKPGTNDYRPVQDLREVNKRVEDIHPTVPNPYNLLSGLPPSHQWYTVLDLKDAFFCLRLHPTSQPLFAFEWRDPEMGISGQLTWTRLPQGFKNSPTLFNEALHRDLAGFRIQHPDLILLQYVDDLLLAATSELDCQQGTRALLQTLGDLGYRASAKKAQICQKQVKYLGYLLKEGQRWLTEARKETVMGQPIPKTPRQLREFLGKAGFCRLFIPGFAEMAAPLYPLTKPGTLFNWGPDQQKAFQEIKQALLTAPALGLPDLTKPFELFVDEKQGYAKGVLTQKLGPWRRPVAYLSKKLDPVAAGWPPCLRMVAAIAVLTKDAGKLTMGQPLVILAPHAVEALVKQPPDRWLSNARMTHYQALLLDTDRVQFGPVVALNPATLLPLPEEGLQHDCLDILAEAHGTRSDLMDQPLPDADHTWYTDGSSFLQEGQRKAGAAVTTETEVIWARALPAGTSAQRAELIALTQALKMAEGKKLNVYTDSRYAFATAHIHGEIYRRRGWLTSEGKEIKNKDEILALLKALFLPKRLSIIHCPGHQKGNSAEARGNRMADQAAREVATRETPETSTLLAGKRTADGSEFEKRTADGSEFESPKKKAKVE

SEQ ID NO: 2365 - protein, 2094 aa, synthetic construct
MPAAKRVKLDGGDKKYSIGLDIGTNSVGWAVITDEYKVPSKKFKVLGNTDRHSIKKNLIGALLFDSGETAEATRLKRTARRRYTRRKNRICYLQEIFSNEMAKVDDSFFHRLEESFLVEEDKKHERHPIFGNIVDEVAYHEKYPTIYHLRKKLVDSTDKADLRLIYLALAHMIKFRGHFLIEGDLNPDNSDVDKLFIQLVQTYNQLFEENPINASGVDAKAILSARLSKSRRLENLIAQLPGEKKNGLFGNLIALSLGLTPNFKSNFDLAEDAKLQLSKDTYDDDLDNLLAQIGDQYADLFLAAKNLSDAILLSDILRVNTEITKAPLSASMIKRYDEHHQDLTLLKALVRQQLPEKYKEIFFDQSKNGYAGYIDGGASQEEFYKFIKPILEKMDGTEELLVKLNREDLLRKQRTFDNGSIPHQIHLGELHAILRRQEDFYPFLKDNREKIEKILTFRIPYYVGPLARGNSRFAWMTRKSEETITPWNFEEVVDKGASAQSFIERMTNFDKNLPNEKVLPKHSLLYEYFTVYNELTKVKYVTEGMRKPAFLSGEQKKAIVDLLFKTNRKVTVKQLKEDYFKKIECFDSVEISGVEDRFNASLGTYHDLLKIIKDKDFLDNEENEDILEDIVLTLTLFEDREMIEERLKTYAHLFDDKVMKQLKRRRYTGWGRLSRKLINGIRDKQSGKTILDFLKSDGFANRNFMQLIHDDSLTFKEDIQKAQVSGQGDSLHEHIANLAGSPAIKKGILQTVKVVDELVKVMGRHKPENIVIEMARENQTTQKGQKNSRERMKRIEEGIKELGSQILKEHPVENTQLQNEKLYLYYLQNGRDMYVDQELDINRLSDYDVDHIVPQSFLKDDSIDNKVLTRSDKARGKSDNVPSEEVVKKMKNYWRQLLNAKLITQRKFDNLTKAERGGLSELDKAGFIKRQLVETRQITKHVAQILDSRMNTKYDENDKLIREVKVITLKSKLVSDFRKDFQFYKVREINNYHHAHDAYLNAVVGTALIKKYPKLESEFVYGDYKVYDVRKMIAKSEQEIGKATAKYFFYSNIMNFFKTEITLANGEIRKRPLIETNGETGEIVWDKGRDFATVRKVLSMPQVNIVKKTEVQTGGFSKESILPKRNSDKLIARKKDWDPKKYGGFDSPTVAYSVLVVAKVEKGKSKKLKSVKELLGITIMERSSFEKNPIDFLEAKGYKEVKKDLIIKLPKYSLFELENGRKRMLASAGELQKGNELALPSKYVNFLYLASHYEKLKGSPEDNEQKQLFVEQHKHYLDEIIEQISEFSKRVILADANLDKVLSAYNKHRDKPIREQAENIIHLFTLTNLGAPAAFKYFDTTIDRKRYTSTKEVLDATLIHQSITGLYETRIDLSQLGGDGGGGSPAPGGGGGTLNIEDEYRLHETSKEPDVSLGSTWLSDFPQAWAETGGMGLAVRQAPLIIPLKATSTPVSIKQYPMSQEARLGIKPHIQRLLDQGILVPCQSPWNTPLLPVKKPGTNDYRPVQDLREVNKRVEDIHPTVPNPYNLLSGLPPSHQWYTVLDLKDAFFCLRLHPTSQPLFAFEWRDPEMGISGQLTWTRLPQGFKNSPTLFNEALHRDLAGFRIQHPDLILLQYVDDLLLAATSELDCQQGTRALLQTLGDLGYRASAKKAQICQKQVKYLGYLLKEGQRWLTEARKETVMGQPIPKTPRQLREFLGKAGFCRLFIPGFAEMAAPLYPLTKPGTLFNWGPDQQKAFQEIKQALLTAPALGLPDLTKPFELFVDEKQGYAKGVLTQKLGPWRRPVAYLSKKLDPVAAGWPPCLRMVAAIAVLTKDAGKLTMGQPLVILAPHAVEALVKQPPDRWLSNARMTHYQALLLDTDRVQFGPVVALNPATLLPLPEEGLQHDCLDILAEAHGTRSDLMDQPLPDADHTWYTDGSSFLQEGQRKAGAAVTTETEVIWARALPAGTSAQRAELIALTQALKMAEGKKLNVYTDSRYAFATAHIHGEIYRRRGWLTSEGKEIKNKDEILALLKALFLPKRLSIIHCPGHQKGNSAEARGNRMADQAAREVATRETPETSTLLAGKRTADGSEFEKRTADGSEFESPKKKAKVE

SEQ ID NO: 2366 - protein, 2091 aa, synthetic construct
MPAAKRVKLDGGDKKYSIGLDIGTNSVGWAVITDEYKVPSKKFKVLGNTDRHSIKKNLIGALLFDSGETAEATRLKRTARRRYTRRKNRICYLQEIFSNEMAKVDDSFFHRLEESFLVEEDKKHERHPIFGNIVDEVAYHEKYPTIYHLRKKLVDSTDKADLRLIYLALAHMIKFRGHFLIEGDLNPDNSDVDKLFIQLVQTYNQLFEENPINASGVDAKAILSARLSKSRRLENLIAQLPGEKKNGLFGNLIALSLGLTPNFKSNFDLAEDAKLQLSKDTYDDDLDNLLAQIGDQYADLFLAAKNLSDAILLSDILRVNTEITKAPLSASMIKRYDEHHQDLTLLKALVRQQLPEKYKEIFFDQSKNGYAGYIDGGASQEEFYKFIKPILEKMDGTEELLVKLNREDLLRKQRTFDNGSIPHQIHLGELHAILRRQEDFYPFLKDNREKIEKILTFRIPYYVGPLARGNSRFAWMTRKSEETITPWNFEEVVDKGASAQSFIERMTNFDKNLPNEKVLPKHSLLYEYFTVYNELTKVKYVTEGMRKPAFLSGEQKKAIVDLLFKTNRKVTVKQLKEDYFKKIECFDSVEISGVEDRFNASLGTYHDLLKIIKDKDFLDNEENEDILEDIVLTLTLFEDREMIEERLKTYAHLFDDKVMKQLKRRRYTGWGRLSRKLINGIRDKQSGKTILDFLKSDGFANRNFMQLIHDDSLTFKEDIQKAQVSGQGDSLHEHIANLAGSPAIKKGILQTVKVVDELVKVMGRHKPENIVIEMARENQTTQKGQKNSRERMKRIEEGIKELGSQILKEHPVENTQLQNEKLYLYYLQNGRDMYVDQELDINRLSDYDVDHIVPQSFLKDDSIDNKVLTRSDKARGKSDNVPSEEVVKKMKNYWRQLLNAKLITQRKFDNLTKAERGGLSELDKAGFIKRQLVETRQITKHVAQILDSRMNTKYDENDKLIREVKVITLKSKLVSDFRKDFQFYKVREINNYHHAHDAYLNAVVGTALIKKYPKLESEFVYGDYKVYDVRKMIAKSEQEIGKATAKYFFYSNIMNFFKTEITLANGEIRKRPLIETNGETGEIVWDKGRDFATVRKVLSMPQVNIVKKTEVQTGGFSKESILPKRNSDKLIARKKDWDPKKYGGFDSPTVAYSVLVVAKVEKGKSKKLKSVKELLGITIMERSSFEKNPIDFLEAKGYKEVKKDLIIKLPKYSLFELENGRKRMLASAGELQKGNELALPSKYVNFLYLASHYEKLKGSPEDNEQKQLFVEQHKHYLDEIIEQISEFSKRVILADANLDKVLSAYNKHRDKPIREQAENIIHLFTLTNLGAPAAFKYFDTTIDRKRYTSTKEVLDATLIHQSITGLYETRIDLSQLGGDGGGSSPAPGGTLNIEDEYRLHETSKEPDVSLGSTWLSDFPQAWAETGGMGLAVRQAPLIIPLKATSTPVSIKQYPMSQEARLGIKPHIQRLLDQGILVPCQSPWNTPLLPVKKPGTNDYRPVQDLREVNKRVEDIHPTVPNPYNLLSGLPPSHQWYTVLDLKDAFFCLRLHPTSQPLFAFEWRDPEMGISGQLTWTRLPQGFKNSPTLFNEALHRDLAGFRIQHPDLILLQYVDDLLLAATSELDCQQGTRALLQTLGDLGYRASAKKAQICQKQVKYLGYLLKEGQRWLTEARKETVMGQPIPKTPRQLREFLGKAGFCRLFIPGFAEMAAPLYPLTKPGTLFNWGPDQQKAFQEIKQALLTAPALGLPDLTKPFELFVDEKQGYAKGVLTQKLGPWRRPVAYLSKKLDPVAAGWPPCLRMVAAIAVLTKDAGKLTMGQPLVILAPHAVEALVKQPPDRWLSNARMTHYQALLLDTDRVQFGPVVALNPATLLPLPEEGLQHDCLDILAEAHGTRSDLMDQPLPDADHTWYTDGSSFLQEGQRKAGAAVTTETEVIWARALPAGTSAQRAELIALTQALKMAEGKKLNVYTDSRYAFATAHIHGEIYRRRGWLTSEGKEIKNKDEILALLKALFLPKRLSIIHCPGHQKGNSAEARGNRMADQAAREVATRETPETSTLLAGKRTADGSEFEKRTADGSEFESPKKKAKVE

SEQ ID NO: 2367 - protein, 2096 aa, synthetic construct
MPAAKRVKLDGGDKKYSIGLDIGTNSVGWAVITDEYKVPSKKFKVLGNTDRHSIKKNLIGALLFDSGETAEATRLKRTARRRYTRRKNRICYLQEIFSNEMAKVDDSFFHRLEESFLVEEDKKHERHPIFGNIVDEVAYHEKYPTIYHLRKKLVDSTDKADLRLIYLALAHMIKFRGHFLIEGDLNPDNSDVDKLFIQLVQTYNQLFEENPINASGVDAKAILSARLSKSRRLENLIAQLPGEKKNGLFGNLIALSLGLTPNFKSNFDLAEDAKLQLSKDTYDDDLDNLLAQIGDQYADLFLAAKNLSDAILLSDILRVNTEITKAPLSASMIKRYDEHHQDLTLLKALVRQQLPEKYKEIFFDQSKNGYAGYIDGGASQEEFYKFIKPILEKMDGTEELLVKLNREDLLRKQRTFDNGSIPHQIHLGELHAILRRQEDFYPFLKDNREKIEKILTFRIPYYVGPLARGNSRFAWMTRKSEETITPWNFEEVVDKGASAQSFIERMTNFDKNLPNEKVLPKHSLLYEYFTVYNELTKVKYVTEGMRKPAFLSGEQKKAIVDLLFKTNRKVTVKQLKEDYFKKIECFDSVEISGVEDRFNASLGTYHDLLKIIKDKDFLDNEENEDILEDIVLTLTLFEDREMIEERLKTYAHLFDDKVMKQLKRRRYTGWGRLSRKLINGIRDKQSGKTILDFLKSDGFANRNFMQLIHDDSLTFKEDIQKAQVSGQGDSLHEHIANLAGSPAIKKGILQTVKVVDELVKVMGRHKPENIVIEMARENQTTQKGQKNSRERMKRIEEGIKELGSQILKEHPVENTQLQNEKLYLYYLQNGRDMYVDQELDINRLSDYDVDHIVPQSFLKDDSIDNKVLTRSDKARGKSDNVPSEEVVKKMKNYWRQLLNAKLITQRKFDNLTKAERGGLSELDKAGFIKRQLVETRQITKHVAQILDSRMNTKYDENDKLIREVKVITLKSKLVSDFRKDFQFYKVREINNYHHAHDAYLNAVVGTALIKKYPKLESEFVYGDYKVYDVRKMIAKSEQEIGKATAKYFFYSNIMNFFKTEITLANGEIRKRPLIETNGETGEIVWDKGRDFATVRKVLSMPQVNIVKKTEVQTGGFSKESILPKRNSDKLIARKKDWDPKKYGGFDSPTVAYSVLVVAKVEKGKSKKLKSVKELLGITIMERSSFEKNPIDFLEAKGYKEVKKDLIIKLPKYSLFELENGRKRMLASAGELQKGNELALPSKYVNFLYLASHYEKLKGSPEDNEQKQLFVEQHKHYLDEIIEQISEFSKRVILADANLDKVLSAYNKHRDKPIREQAENIIHLFTLTNLGAPAAFKYFDTTIDRKRYTSTKEVLDATLIHQSITGLYETRIDLSQLGGDGGEAAAKGSSGGGGGTLNIEDEYRLHETSKEPDVSLGSTWLSDFPQAWAETGGMGLAVRQAPLIIPLKATSTPVSIKQYPMSQEARLGIKPHIQRLLDQGILVPCQSPWNTPLLPVKKPGTNDYRPVQDLREVNKRVEDIHPTVPNPYNLLSGLPPSHQWYTVLDLKDAFFCLRLHPTSQPLFAFEWRDPEMGISGQLTWTRLPQGFKNSPTLFNEALHRDLAGFRIQHPDLILLQYVDDLLLAATSELDCQQGTRALLQTLGDLGYRASAKKAQICQKQVKYLGYLLKEGQRWLTEARKETVMGQPIPKTPRQLREFLGKAGFCRLFIPGFAEMAAPLYPLTKPGTLFNWGPDQQKAFQEIKQALLTAPALGLPDLTKPFELFVDEKQGYAKGVLTQKLGPWRRPVAYLSKKLDPVAAGWPPCLRMVAAIAVLTKDAGKLTMGQPLVILAPHAVEALVKQPPDRWLSNARMTHYQALLLDTDRVQFGPVVALNPATLLPLPEEGLQHDCLDILAEAHGTRSDLMDQPLPDADHTWYTDGSSFLQEGQRKAGAAVTTETEVIWARALPAGTSAQRAELIALTQALKMAEGKKLNVYTDSRYAFATAHIHGEIYRRRGWLTSEGKEIKNKDEILALLKALFLPKRLSIIHCPGHQKGNSAEARGNRMADQAAREVATRETPETSTLLAGKRTADGSEFEKRTADGSEFESPKKKAKVE

SEQ ID NO: 2368 - protein, 2096 aa, synthetic construct
MPAAKRVKLDGGDKKYSIGLDIGTNSVGWAVITDEYKVPSKKFKVLGNTDRHSIKKNLIGALLFDSGETAEATRLKRTARRRYTRRKNRICYLQEIFSNEMAKVDDSFFHRLEESFLVEEDKKHERHPIFGNIVDEVAYHEKYPTIYHLRKKLVDSTDKADLRLIYLALAHMIKFRGHFLIEGDLNPDNSDVDKLFIQLVQTYNQLFEENPINASGVDAKAILSARLSKSRRLENLIAQLPGEKKNGLFGNLIALSLGLTPNFKSNFDLAEDAKLQLSKDTYDDDLDNLLAQIGDQYADLFLAAKNLSDAILLSDILRVNTEITKAPLSASMIKRYDEHHQDLTLLKALVRQQLPEKYKEIFFDQSKNGYAGYIDGGASQEEFYKFIKPILEKMDGTEELLVKLNREDLLRKQRTFDNGSIPHQIHLGELHAILRRQEDFYPFLKDNREKIEKILTFRIPYYVGPLARGNSRFAWMTRKSEETITPWNFEEVVDKGASAQSFIERMTNFDKNLPNEKVLPKHSLLYEYFTVYNELTKVKYVTEGMRKPAFLSGEQKKAIVDLLFKTNRKVTVKQLKEDYFKKIECFDSVEISGVEDRFNASLGTYHDLLKIIKDKDFLDNEENEDILEDIVLTLTLFEDREMIEERLKTYAHLFDDKVMKQLKRRRYTGWGRLSRKLINGIRDKQSGKTILDFLKSDGFANRNFMQLIHDDSLTFKEDIQKAQVSGQGDSLHEHIANLAGSPAIKKGILQTVKVVDELVKVMGRHKPENIVIEMARENQTTQKGQKNSRERMKRIEEGIKELGSQILKEHPVENTQLQNEKLYLYYLQNGRDMYVDQELDINRLSDYDVDHIVPQSFLKDDSIDNKVLTRSDKARGKSDNVPSEEVVKKMKNYWRQLLNAKLITQRKFDNLTKAERGGLSELDKAGFIKRQLVETRQITKHVAQILDSRMNTKYDENDKLIREVKVITLKSKLVSDFRKDFQFYKVREINNYHHAHDAYLNAVVGTALIKKYPKLESEFVYGDYKVYDVRKMIAKSEQEIGKATAKYFFYSNIMNFFKTEITLANGEIRKRPLIETNGETGEIVWDKGRDFATVRKVLSMPQVNIVKKTEVQTGGFSKESILPKRNSDKLIARKKDWDPKKYGGFDSPTVAYSVLVVAKVEKGKSKKLKSVKELLGITIMERSSFEKNPIDFLEAKGYKEVKKDLIIKLPKYSLFELENGRKRMLASAGELQKGNELALPSKYVNFLYLASHYEKLKGSPEDNEQKQLFVEQHKHYLDEIIEQISEFSKRVILADANLDKVLSAYNKHRDKPIREQAENIIHLFTLTNLGAPAAFKYFDTTIDRKRYTSTKEVLDATLIHQSITGLYETRIDLSQLGGDGGEAAAKGSSGGSGGTLNIEDEYRLHETSKEPDVSLGSTWLSDFPQAWAETGGMGLAVRQAPLIIPLKATSTPVSIKQYPMSQEARLGIKPHIQRLLDQGILVPCQSPWNTPLLPVKKPGTNDYRPVQDLREVNKRVEDIHPTVPNPYNLLSGLPPSHQWYTVLDLKDAFFCLRLHPTSQPLFAFEWRDPEMGISGQLTWTRLPQGFKNSPTLFNEALHRDLAGFRIQHPDLILLQYVDDLLLAATSELDCQQGTRALLQTLGDLGYRASAKKAQICQKQVKYLGYLLKEGQRWLTEARKETVMGQPIPKTPRQLREFLGKAGFCRLFIPGFAEMAAPLYPLTKPGTLFNWGPDQQKAFQEIKQALLTAPALGLPDLTKPFELFVDEKQGYAKGVLTQKLGPWRRPVAYLSKKLDPVAAGWPPCLRMVAAIAVLTKDAGKLTMGQPLVILAPHAVEALVKQPPDRWLSNARMTHYQALLLDTDRVQFGPVVALNPATLLPLPEEGLQHDCLDILAEAHGTRSDLMDQPLPDADHTWYTDGSSFLQEGQRKAGAAVTTETEVIWARALPAGTSAQRAELIALTQALKMAEGKKLNVYTDSRYAFATAHIHGEIYRRRGWLTSEGKEIKNKDEILALLKALFLPKRLSIIHCPGHQKGNSAEARGNRMADQAAREVATRETPETSTLLAGKRTADGSEFEKRTADGSEFESPKKKAKVE

SEQ ID NO: 2369 - protein, 2095 aa, synthetic construct
MPAAKRVKLDGGDKKYSIGLDIGTNSVGWAVITDEYKVPSKKFKVLGNTDRHSIKKNLIGALLFDSGETAEATRLKRTARRRYTRRKNRICYLQEIFSNEMAKVDDSFFHRLEESFLVEEDKKHERHPIFGNIVDEVAYHEKYPTIYHLRKKLVDSTDKADLRLIYLALAHMIKFRGHFLIEGDLNPDNSDVDKLFIQLVQTYNQLFEENPINASGVDAKAILSARLSKSRRLENLIAQLPGEKKNGLFGNLIALSLGLTPNFKSNFDLAEDAKLQLSKDTYDDDLDNLLAQIGDQYADLFLAAKNLSDAILLSDILRVNTEITKAPLSASMIKRYDEHHQDLTLLKALVRQQLPEKYKEIFFDQSKNGYAGYIDGGASQEEFYKFIKPILEKMDGTEELLVKLNREDLLRKQRTFDNGSIPHQIHLGELHAILRRQEDFYPFLKDNREKIEKILTFRIPYYVGPLARGNSRFAWMTRKSEETITPWNFEEVVDKGASAQSFIERMTNFDKNLPNEKVLPKHSLLYEYFTVYNELTKVKYVTEGMRKPAFLSGEQKKAIVDLLFKTNRKVTVKQLKEDYFKKIECFDSVEISGVEDRFNASLGTYHDLLKIIKDKDFLDNEENEDILEDIVLTLTLFEDREMIEERLKTYAHLFDDKVMKQLKRRRYTGWGRLSRKLINGIRDKQSGKTILDFLKSDGFANRNFMQLIHDDSLTFKEDIQKAQVSGQGDSLHEHIANLAGSPAIKKGILQTVKVVDELVKVMGRHKPENIVIEMARENQTTQKGQKNSRERMKRIEEGIKELGSQILKEHPVENTQLQNEKLYLYYLQNGRDMYVDQELDINRLSDYDVDHIVPQSFLKDDSIDNKVLTRSDKARGKSDNVPSEEVVKKMKNYWRQLLNAKLITQRKFDNLTKAERGGLSELDKAGFIKRQLVETRQITKHVAQILDSRMNTKYDENDKLIREVKVITLKSKLVSDFRKDFQFYKVREINNYHHAHDAYLNAVVGTALIKKYPKLESEFVYGDYKVYDVRKMIAKSEQEIGKATAKYFFYSNIMNFFKTEITLANGEIRKRPLIETNGETGEIVWDKGRDFATVRKVLSMPQVNIVKKTEVQTGGFSKESILPKRNSDKLIARKKDWDPKKYGGFDSPTVAYSVLVVAKVEKGKSKKLKSVKELLGITIMERSSFEKNPIDFLEAKGYKEVKKDLIIKLPKYSLFELENGRKRMLASAGELQKGNELALPSKYVNFLYLASHYEKLKGSPEDNEQKQLFVEQHKHYLDEIIEQISEFSKRVILADANLDKVLSAYNKHRDKPIREQAENIIHLFTLTNLGAPAAFKYFDTTIDRKRYTSTKEVLDATLIHQSITGLYETRIDLSQLGGDGGGGGGSGGGGSGGTLNIEDEYRLHETSKEPDVSLGSTWLSDFPQAWAETGGMGLAVRQAPLIIPLKATSTPVSIKQYPMSQEARLGIKPHIQRLLDQGILVPCQSPWNTPLLPVKKPGTNDYRPVQDLREVNKRVEDIHPTVPNPYNLLSGLPPSHQWYTVLDLKDAFFCLRLHPTSQPLFAFEWRDPEMGISGQLTWTRLPQGFKNSPTLFNEALHRDLAGFRIQHPDLILLQYVDDLLLAATSELDCQQGTRALLQTLGDLGYRASAKKAQICQKQVKYLGYLLKEGQRWLTEARKETVMGQPIPKTPRQLREFLGKAGFCRLFIPGFAEMAAPLYPLTKPGTLFNWGPDQQKAFQEIKQALLTAPALGLPDLTKPFELFVDEKQGYAKGVLTQKLGPWRRPVAYLSKKLDPVAAGWPPCLRMVAAIAVLTKDAGKLTMGQPLVILAPHAVEALVKQPPDRWLSNARMTHYQALLLDTDRVQFGPVVALNPATLLPLPEEGLQHDCLDILAEAHGTRSDLMDQPLPDADHTWYTDGSSFLQEGQRKAGAAVTTETEVIWARALPAGTSAQRAELIALTQALKMAEGKKLNVYTDSRYAFATAHIHGEIYRRRGWLTSEGKEIKNKDEILALLKALFLPKRLSIIHCPGHQKGNSAEARGNRMADQAAREVATRETPETSTLLAGKRTADGSEFEKRTADGSEFESPKKKAKVE

SEQ ID NO: 2370 - protein, 2096 aa, synthetic construct
MPAAKRVKLDGGDKKYSIGLDIGTNSVGWAVITDEYKVPSKKFKVLGNTDRHSIKKNLIGALLFDSGETAEATRLKRTARRRYTRRKNRICYLQEIFSNEMAKVDDSFFHRLEESFLVEEDKKHERHPIFGNIVDEVAYHEKYPTIYHLRKKLVDSTDKADLRLIYLALAHMIKFRGHFLIEGDLNPDNSDVDKLFIQLVQTYNQLFEENPINASGVDAKAILSARLSKSRRLENLIAQLPGEKKNGLFGNLIALSLGLTPNFKSNFDLAEDAKLQLSKDTYDDDLDNLLAQIGDQYADLFLAAKNLSDAILLSDILRVNTEITKAPLSASMIKRYDEHHQDLTLLKALVRQQLPEKYKEIFFDQSKNGYAGYIDGGASQEEFYKFIKPILEKMDGTEELLVKLNREDLLRKQRTFDNGSIPHQIHLGELHAILRRQEDFYPFLKDNREKIEKILTFRIPYYVGPLARGNSRFAWMTRKSEETITPWNFEEVVDKGASAQSFIERMTNFDKNLPNEKVLPKHSLLYEYFTVYNELTKVKYVTEGMRKPAFLSGEQKKAIVDLLFKTNRKVTVKQLKEDYFKKIECFDSVEISGVEDRFNASLGTYHDLLKIIKDKDFLDNEENEDILEDIVLTLTLFEDREMIEERLKTYAHLFDDKVMKQLKRRRYTGWGRLSRKLINGIRDKQSGKTILDFLKSDGFANRNFMQLIHDDSLTFKEDIQKAQVSGQGDSLHEHIANLAGSPAIKKGILQTVKVVDELVKVMGRHKPENIVIEMARENQTTQKGQKNSRERMKRIEEGIKELGSQILKEHPVENTQLQNEKLYLYYLQNGRDMYVDQELDINRLSDYDVDHIVPQSFLKDDSIDNKVLTRSDKARGKSDNVPSEEVVKKMKNYWRQLLNAKLITQRKFDNLTKAERGGLSELDKAGFIKRQLVETRQITKHVAQILDSRMNTKYDENDKLIREVKVITLKSKLVSDFRKDFQFYKVREINNYHHAHDAYLNAVVGTALIKKYPKLESEFVYGDYKVYDVRKMIAKSEQEIGKATAKYFFYSNIMNFFKTEITLANGEIRKRPLIETNGETGEIVWDKGRDFATVRKVLSMPQVNIVKKTEVQTGGFSKESILPKRNSDKLIARKKDWDPKKYGGFDSPTVAYSVLVVAKVEKGKSKKLKSVKELLGITIMERSSFEKNPIDFLEAKGYKEVKKDLIIKLPKYSLFELENGRKRMLASAGELQKGNELALPSKYVNFLYLASHYEKLKGSPEDNEQKQLFVEQHKHYLDEIIEQISEFSKRVILADANLDKVLSAYNKHRDKPIREQAENIIHLFTLTNLGAPAAFKYFDTTIDRKRYTSTKEVLDATLIHQSITGLYETRIDLSQLGGDGGEAAAKGGSGSSGGTLNIEDEYRLHETSKEPDVSLGSTWLSDFPQAWAETGGMGLAVRQAPLIIPLKATSTPVSIKQYPMSQEARLGIKPHIQRLLDQGILVPCQSPWNTPLLPVKKPGTNDYRPVQDLREVNKRVEDIHPTVPNPYNLLSGLPPSHQWYTVLDLKDAFFCLRLHPTSQPLFAFEWRDPEMGISGQLTWTRLPQGFKNSPTLFNEALHRDLAGFRIQHPDLILLQYVDDLLLAATSELDCQQGTRALLQTLGDLGYRASAKKAQICQKQVKYLGYLLKEGQRWLTEARKETVMGQPIPKTPRQLREFLGKAGFCRLFIPGFAEMAAPLYPLTKPGTLFNWGPDQQKAFQEIKQALLTAPALGLPDLTKPFELFVDEKQGYAKGVLTQKLGPWRRPVAYLSKKLDPVAAGWPPCLRMVAAIAVLTKDAGKLTMGQPLVILAPHAVEALVKQPPDRWLSNARMTHYQALLLDTDRVQFGPVVALNPATLLPLPEEGLQHDCLDILAEAHGTRSDLMDQPLPDADHTWYTDGSSFLQEGQRKAGAAVTTETEVIWARALPAGTSAQRAELIALTQALKMAEGKKLNVYTDSRYAFATAHIHGEIYRRRGWLTSEGKEIKNKDEILALLKALFLPKRLSIIHCPGHQKGNSAEARGNRMADQAAREVATRETPETSTLLAGKRTADGSEFEKRTADGSEFESPKKKAKVE

SEQ ID NO: 2371 - protein, 2094 aa, synthetic construct
MPAAKRVKLDGGDKKYSIGLDIGTNSVGWAVITDEYKVPSKKFKVLGNTDRHSIKKNLIGALLFDSGETAEATRLKRTARRRYTRRKNRICYLQEIFSNEMAKVDDSFFHRLEESFLVEEDKKHERHPIFGNIVDEVAYHEKYPTIYHLRKKLVDSTDKADLRLIYLALAHMIKFRGHFLIEGDLNPDNSDVDKLFIQLVQTYNQLFEENPINASGVDAKAILSARLSKSRRLENLIAQLPGEKKNGLFGNLIALSLGLTPNFKSNFDLAEDAKLQLSKDTYDDDLDNLLAQIGDQYADLFLAAKNLSDAILLSDILRVNTEITKAPLSASMIKRYDEHHQDLTLLKALVRQQLPEKYKEIFFDQSKNGYAGYIDGGASQEEFYKFIKPILEKMDGTEELLVKLNREDLLRKQRTFDNGSIPHQIHLGELHAILRRQEDFYPFLKDNREKIEKILTFRIPYYVGPLARGNSRFAWMTRKSEETITPWNFEEVVDKGASAQSFIERMTNFDKNLPNEKVLPKHSLLYEYFTVYNELTKVKYVTEGMRKPAFLSGEQKKAIVDLLFKTNRKVTVKQLKEDYFKKIECFDSVEISGVEDRFNASLGTYHDLLKIIKDKDFLDNEENEDILEDIVLTLTLFEDREMIEERLKTYAHLFDDKVMKQLKRRRYTGWGRLSRKLINGIRDKQSGKTILDFLKSDGFANRNFMQLIHDDSLTFKEDIQKAQVSGQGDSLHEHIANLAGSPAIKKGILQTVKVVDELVKVMGRHKPENIVIEMARENQTTQKGQKNSRERMKRIEEGIKELGSQILKEHPVENTQLQNEKLYLYYLQNGRDMYVDQELDINRLSDYDVDHIVPQSFLKDDSIDNKVLTRSDKARGKSDNVPSEEVVKKMKNYWRQLLNAKLITQRKFDNLTKAERGGLSELDKAGFIKRQLVETRQITKHVAQILDSRMNTKYDENDKLIREVKVITLKSKLVSDFRKDFQFYKVREINNYHHAHDAYLNAVVGTALIKKYPKLESEFVYGDYKVYDVRKMIAKSEQEIGKATAKYFFYSNIMNFFKTEITLANGEIRKRPLIETNGETGEIVWDKGRDFATVRKVLSMPQVNIVKKTEVQTGGFSKESILPKRNSDKLIARKKDWDPKKYGGFDSPTVAYSVLVVAKVEKGKSKKLKSVKELLGITIMERSSFEKNPIDFLEAKGYKEVKKDLIIKLPKYSLFELENGRKRMLASAGELQKGNELALPSKYVNFLYLASHYEKLKGSPEDNEQKQLFVEQHKHYLDEIIEQISEFSKRVILADANLDKVLSAYNKHRDKPIREQAENIIHLFTLTNLGAPAAFKYFDTTIDRKRYTSTKEVLDATLIHQSITGLYETRIDLSQLGGDGGGGSGGGGSSGGTLNIEDEYRLHETSKEPDVSLGSTWLSDFPQAWAETGGMGLAVRQAPLIIPLKATSTPVSIKQYPMSQEARLGIKPHIQRLLDQGILVPCQSPWNTPLLPVKKPGTNDYRPVQDLREVNKRVEDIHPTVPNPYNLLSGLPPSHQWYTVLDLKDAFFCLRLHPTSQPLFAFEWRDPEMGISGQLTWTRLPQGFKNSPTLFNEALHRDLAGFRIQHPDLILLQYVDDLLLAATSELDCQQGTRALLQTLGDLGYRASAKKAQICQKQVKYLGYLLKEGQRWLTEARKETVMGQPIPKTPRQLREFLGKAGFCRLFIPGFAEMAAPLYPLTKPGTLFNWGPDQQKAFQEIKQALLTAPALGLPDLTKPFELFVDEKQGYAKGVLTQKLGPWRRPVAYLSKKLDPVAAGWPPCLRMVAAIAVLTKDAGKLTMGQPLVILAPHAVEALVKQPPDRWLSNARMTHYQALLLDTDRVQFGPVVALNPATLLPLPEEGLQHDCLDILAEAHGTRSDLMDQPLPDADHTWYTDGSSFLQEGQRKAGAAVTTETEVIWARALPAGTSAQRAELIALTQALKMAEGKKLNVYTDSRYAFATAHIHGEIYRRRGWLTSEGKEIKNKDEILALLKALFLPKRLSIIHCPGHQKGNSAEARGNRMADQAAREVATRETPETSTLLAGKRTADGSEFEKRTADGSEFESPKKKAKVE

SEQ ID NO: 2372 - protein, 2096 aa, synthetic construct
MPAAKRVKLDGGDKKYSIGLDIGTNSVGWAVITDEYKVPSKKFKVLGNTDRHSIKKNLIGALLFDSGETAEATRLKRTARRRYTRRKNRICYLQEIFSNEMAKVDDSFFHRLEESFLVEEDKKHERHPIFGNIVDEVAYHEKYPTIYHLRKKLVDSTDKADLRLIYLALAHMIKFRGHFLIEGDLNPDNSDVDKLFIQLVQTYNQLFEENPINASGVDAKAILSARLSKSRRLENLIAQLPGEKKNGLFGNLIALSLGLTPNFKSNFDLAEDAKLQLSKDTYDDDLDNLLAQIGDQYADLFLAAKNLSDAILLSDILRVNTEITKAPLSASMIKRYDEHHQDLTLLKALVRQQLPEKYKEIFFDQSKNGYAGYIDGGASQEEFYKFIKPILEKMDGTEELLVKLNREDLLRKQRTFDNGSIPHQIHLGELHAILRRQEDFYPFLKDNREKIEKILTFRIPYYVGPLARGNSRFAWMTRKSEETITPWNFEEVVDKGASAQSFIERMTNFDKNLPNEKVLPKHSLLYEYFTVYNELTKVKYVTEGMRKPAFLSGEQKKAIVDLLFKTNRKVTVKQLKEDYFKKIECFDSVEISGVEDRFNASLGTYHDLLKIIKDKDFLDNEENEDILEDIVLTLTLFEDREMIEERLKTYAHLFDDKVMKQLKRRRYTGWGRLSRKLINGIRDKQSGKTILDFLKSDGFANRNFMQLIHDDSLTFKEDIQKAQVSGQGDSLHEHIANLAGSPAIKKGILQTVKVVDELVKVMGRHKPENIVIEMARENQTTQKGQKNSRERMKRIEEGIKELGSQILKEHPVENTQLQNEKLYLYYLQNGRDMYVDQELDINRLSDYDVDHIVPQSFLKDDSIDNKVLTRSDKARGKSDNVPSEEVVKKMKNYWRQLLNAKLITQRKFDNLTKAERGGLSELDKAGFIKRQLVETRQITKHVAQILDSRMNTKYDENDKLIREVKVITLKSKLVSDFRKDFQFYKVREINNYHHAHDAYLNAVVGTALIKKYPKLESEFVYGDYKVYDVRKMIAKSEQEIGKATAKYFFYSNIMNFFKTEITLANGEIRKRPLIETNGETGEIVWDKGRDFATVRKVLSMPQVNIVKKTEVQTGGFSKESILPKRNSDKLIARKKDWDPKKYGGFDSPTVAYSVLVVAKVEKGKSKKLKSVKELLGITIMERSSFEKNPIDFLEAKGYKEVKKDLIIKLPKYSLFELENGRKRMLASAGELQKGNELALPSKYVNFLYLASHYEKLKGSPEDNEQKQLFVEQHKHYLDEIIEQISEFSKRVILADANLDKVLSAYNKHRDKPIREQAENIIHLFTLTNLGAPAAFKYFDTTIDRKRYTSTKEVLDATLIHQSITGLYETRIDLSQLGGDGGEAAAKGGSPAPGGTLNIEDEYRLHETSKEPDVSLGSTWLSDFPQAWAETGGMGLAVRQAPLIIPLKATSTPVSIKQYPMSQEARLGIKPHIQRLLDQGILVPCQSPWNTPLLPVKKPGTNDYRPVQDLREVNKRVEDIHPTVPNPYNLLSGLPPSHQWYTVLDLKDAFFCLRLHPTSQPLFAFEWRDPEMGISGQLTWTRLPQGFKNSPTLFNEALHRDLAGFRIQHPDLILLQYVDDLLLAATSELDCQQGTRALLQTLGDLGYRASAKKAQICQKQVKYLGYLLKEGQRWLTEARKETVMGQPIPKTPRQLREFLGKAGFCRLFIPGFAEMAAPLYPLTKPGTLFNWGPDQQKAFQEIKQALLTAPALGLPDLTKPFELFVDEKQGYAKGVLTQKLGPWRRPVAYLSKKLDPVAAGWPPCLRMVAAIAVLTKDAGKLTMGQPLVILAPHAVEALVKQPPDRWLSNARMTHYQALLLDTDRVQFGPVVALNPATLLPLPEEGLQHDCLDILAEAHGTRSDLMDQPLPDADHTWYTDGSSFLQEGQRKAGAAVTTETEVIWARALPAGTSAQRAELIALTQALKMAEGKKLNVYTDSRYAFATAHIHGEIYRRRGWLTSEGKEIKNKDEILALLKALFLPKRLSIIHCPGHQKGNSAEARGNRMADQAAREVATRETPETSTLLAGKRTADGSEFEKRTADGSEFESPKKKAKVE

SEQ ID NO: 2373 - protein, 2100 aa, synthetic construct
MPAAKRVKLDGGDKKYSIGLDIGTNSVGWAVITDEYKVPSKKFKVLGNTDRHSIKKNLIGALLFDSGETAEATRLKRTARRRYTRRKNRICYLQEIFSNEMAKVDDSFFHRLEESFLVEEDKKHERHPIFGNIVDEVAYHEKYPTIYHLRKKLVDSTDKADLRLIYLALAHMIKFRGHFLIEGDLNPDNSDVDKLFIQLVQTYNQLFEENPINASGVDAKAILSARLSKSRRLENLIAQLPGEKKNGLFGNLIALSLGLTPNFKSNFDLAEDAKLQLSKDTYDDDLDNLLAQIGDQYADLFLAAKNLSDAILLSDILRVNTEITKAPLSASMIKRYDEHHQDLTLLKALVRQQLPEKYKEIFFDQSKNGYAGYIDGGASQEEFYKFIKPILEKMDGTEELLVKLNREDLLRKQRTFDNGSIPHQIHLGELHAILRRQEDFYPFLKDNREKIEKILTFRIPYYVGPLARGNSRFAWMTRKSEETITPWNFEEVVDKGASAQSFIERMTNFDKNLPNEKVLPKHSLLYEYFTVYNELTKVKYVTEGMRKPAFLSGEQKKAIVDLLFKTNRKVTVKQLKEDYFKKIECFDSVEISGVEDRFNASLGTYHDLLKIIKDKDFLDNEENEDILEDIVLTLTLFEDREMIEERLKTYAHLFDDKVMKQLKRRRYTGWGRLSRKLINGIRDKQSGKTILDFLKSDGFANRNFMQLIHDDSLTFKEDIQKAQVSGQGDSLHEHIANLAGSPAIKKGILQTVKVVDELVKVMGRHKPENIVIEMARENQTTQKGQKNSRERMKRIEEGIKELGSQILKEHPVENTQLQNEKLYLYYLQNGRDMYVDQELDINRLSDYDVDHIVPQSFLKDDSIDNKVLTRSDKARGKSDNVPSEEVVKKMKNYWRQLLNAKLITQRKFDNLTKAERGGLSELDKAGFIKRQLVETRQITKHVAQILDSRMNTKYDENDKLIREVKVITLKSKLVSDFRKDFQFYKVREINNYHHAHDAYLNAVVGTALIKKYPKLESEFVYGDYKVYDVRKMIAKSEQEIGKATAKYFFYSNIMNFFKTEITLANGEIRKRPLIETNGETGEIVWDKGRDFATVRKVLSMPQVNIVKKTEVQTGGFSKESILPKRNSDKLIARKKDWDPKKYGGFDSPTVAYSVLVVAKVEKGKSKKLKSVKELLGITIMERSSFEKNPIDFLEAKGYKEVKKDLIIKLPKYSLFELENGRKRMLASAGELQKGNELALPSKYVNFLYLASHYEKLKGSPEDNEQKQLFVEQHKHYLDEIIEQISEFSKRVILADANLDKVLSAYNKHRDKPIREQAENIIHLFTLTNLGAPAAFKYFDTTIDRKRYTSTKEVLDATLIHQSITGLYETRIDLSQLGGDGGEAAAKEAAAKEAAAKGGTLNIEDEYRLHETSKEPDVSLGSTWLSDFPQAWAETGGMGLAVRQAPLIIPLKATSTPVSIKQYPMSQEARLGIKPHIQRLLDQGILVPCQSPWNTPLLPVKKPGTNDYRPVQDLREVNKRVEDIHPTVPNPYNLLSGLPPSHQWYTVLDLKDAFFCLRLHPTSQPLFAFEWRDPEMGISGQLTWTRLPQGFKNSPTLFNEALHRDLAGFRIQHPDLILLQYVDDLLLAATSELDCQQGTRALLQTLGDLGYRASAKKAQICQKQVKYLGYLLKEGQRWLTEARKETVMGQPIPKTPRQLREFLGKAGFCRLFIPGFAEMAAPLYPLTKPGTLFNWGPDQQKAFQEIKQALLTAPALGLPDLTKPFELFVDEKQGYAKGVLTQKLGPWRRPVAYLSKKLDPVAAGWPPCLRMVAAIAVLTKDAGKLTMGQPLVILAPHAVEALVKQPPDRWLSNARMTHYQALLLDTDRVQFGPVVALNPATLLPLPEEGLQHDCLDILAEAHGTRSDLMDQPLPDADHTWYTDGSSFLQEGQRKAGAAVTTETEVIWARALPAGTSAQRAELIALTQALKMAEGKKLNVYTDSRYAFATAHIHGEIYRRRGWLTSEGKEIKNKDEILALLKALFLPKRLSIIHCPGHQKGNSAEARGNRMADQAAREVATRETPETSTLLAGKRTADGSEFEKRTADGSEFESPKKKAKVE

SEQ ID NO: 2374 - protein, 2100 aa, synthetic construct
MPAAKRVKLDGGDKKYSIGLDIGTNSVGWAVITDEYKVPSKKFKVLGNTDRHSIKKNLIGALLFDSGETAEATRLKRTARRRYTRRKNRICYLQEIFSNEMAKVDDSFFHRLEESFLVEEDKKHERHPIFGNIVDEVAYHEKYPTIYHLRKKLVDSTDKADLRLIYLALAHMIKFRGHFLIEGDLNPDNSDVDKLFIQLVQTYNQLFEENPINASGVDAKAILSARLSKSRRLENLIAQLPGEKKNGLFGNLIALSLGLTPNFKSNFDLAEDAKLQLSKDTYDDDLDNLLAQIGDQYADLFLAAKNLSDAILLSDILRVNTEITKAPLSASMIKRYDEHHQDLTLLKALVRQQLPEKYKEIFFDQSKNGYAGYIDGGASQEEFYKFIKPILEKMDGTEELLVKLNREDLLRKQRTFDNGSIPHQIHLGELHAILRRQEDFYPFLKDNREKIEKILTFRIPYYVGPLARGNSRFAWMTRKSEETITPWNFEEVVDKGASAQSFIERMTNFDKNLPNEKVLPKHSLLYEYFTVYNELTKVKYVTEGMRKPAFLSGEQKKAIVDLLFKTNRKVTVKQLKEDYFKKIECFDSVEISGVEDRFNASLGTYHDLLKIIKDKDFLDNEENEDILEDIVLTLTLFEDREMIEERLKTYAHLFDDKVMKQLKRRRYTGWGRLSRKLINGIRDKQSGKTILDFLKSDGFANRNFMQLIHDDSLTFKEDIQKAQVSGQGDSLHEHIANLAGSPAIKKGILQTVKVVDELVKVMGRHKPENIVIEMARENQTTQKGQKNSRERMKRIEEGIKELGSQILKEHPVENTQLQNEKLYLYYLQNGRDMYVDQELDINRLSDYDVDHIVPQSFLKDDSIDNKVLTRSDKARGKSDNVPSEEVVKKMKNYWRQLLNAKLITQRKFDNLTKAERGGLSELDKAGFIKRQLVETRQITKHVAQILDSRMNTKYDENDKLIREVKVITLKSKLVSDFRKDFQFYKVREINNYHHAHDAYLNAVVGTALIKKYPKLESEFVYGDYKVYDVRKMIAKSEQEIGKATAKYFFYSNIMNFFKTEITLANGEIRKRPLIETNGETGEIVWDKGRDFATVRKVLSMPQVNIVKKTEVQTGGFSKESILPKRNSDKLIARKKDWDPKKYGGFDSPTVAYSVLVVAKVEKGKSKKLKSVKELLGITIMERSSFEKNPIDFLEAKGYKEVKKDLIIKLPKYSLFELENGRKRMLASAGELQKGNELALPSKYVNFLYLASHYEKLKGSPEDNEQKQLFVEQHKHYLDEIIEQISEFSKRVILADANLDKVLSAYNKHRDKPIREQAENIIHLFTLTNLGAPAAFKYFDTTIDRKRYTSTKEVLDATLIHQSITGLYETRIDLSQLGGDGGGGGGSEAAAKGGGGSGGTLNIEDEYRLHETSKEPDVSLGSTWLSDFPQAWAETGGMGLAVRQAPLIIPLKATSTPVSIKQYPMSQEARLGIKPHIQRLLDQGILVPCQSPWNTPLLPVKKPGTNDYRPVQDLREVNKRVEDIHPTVPNPYNLLSGLPPSHQWYTVLDLKDAFFCLRLHPTSQPLFAFEWRDPEMGISGQLTWTRLPQGFKNSPTLFNEALHRDLAGFRIQHPDLILLQYVDDLLLAATSELDCQQGTRALLQTLGDLGYRASAKKAQICQKQVKYLGYLLKEGQRWLTEARKETVMGQPIPKTPRQLREFLGKAGFCRLFIPGFAEMAAPLYPLTKPGTLFNWGPDQQKAFQEIKQALLTAPALGLPDLTKPFELFVDEKQGYAKGVLTQKLGPWRRPVAYLSKKLDPVAAGWPPCLRMVAAIAVLTKDAGKLTMGQPLVILAPHAVEALVKQPPDRWLSNARMTHYQALLLDTDRVQFGPVVALNPATLLPLPEEGLQHDCLDILAEAHGTRSDLMDQPLPDADHTWYTDGSSFLQEGQRKAGAAVTTETEVIWARALPAGTSAQRAELIALTQALKMAEGKKLNVYTDSRYAFATAHIHGEIYRRRGWLTSEGKEIKNKDEILALLKALFLPKRLSIIHCPGHQKGNSAEARGNRMADQAAREVATRETPETSTLLAGKRTADGSEFEKRTADGSEFESPKKKAKVE

SEQ ID NO: 2375 - protein, 2088 aa, synthetic construct
MPAAKRVKLDGGDKKYSIGLDIGTNSVGWAVITDEYKVPSKKFKVLGNTDRHSIKKNLIGALLFDSGETAEATRLKRTARRRYTRRKNRICYLQEIFSNEMAKVDDSFFHRLEESFLVEEDKKHERHPIFGNIVDEVAYHEKYPTIYHLRKKLVDSTDKADLRLIYLALAHMIKFRGHFLIEGDLNPDNSDVDKLFIQLVQTYNQLFEENPINASGVDAKAILSARLSKSRRLENLIAQLPGEKKNGLFGNLIALSLGLTPNFKSNFDLAEDAKLQLSKDTYDDDLDNLLAQIGDQYADLFLAAKNLSDAILLSDILRVNTEITKAPLSASMIKRYDEHHQDLTLLKALVRQQLPEKYKEIFFDQSKNGYAGYIDGGASQEEFYKFIKPILEKMDGTEELLVKLNREDLLRKQRTFDNGSIPHQIHLGELHAILRRQEDFYPFLKDNREKIEKILTFRIPYYVGPLARGNSRFAWMTRKSEETITPWNFEEVVDKGASAQSFIERMTNFDKNLPNEKVLPKHSLLYEYFTVYNELTKVKYVTEGMRKPAFLSGEQKKAIVDLLFKTNRKVTVKQLKEDYFKKIECFDSVEISGVEDRFNASLGTYHDLLKIIKDKDFLDNEENEDILEDIVLTLTLFEDREMIEERLKTYAHLFDDKVMKQLKRRRYTGWGRLSRKLINGIRDKQSGKTILDFLKSDGFANRNFMQLIHDDSLTFKEDIQKAQVSGQGDSLHEHIANLAGSPAIKKGILQTVKVVDELVKVMGRHKPENIVIEMARENQTTQKGQKNSRERMKRIEEGIKELGSQILKEHPVENTQLQNEKLYLYYLQNGRDMYVDQELDINRLSDYDVDHIVPQSFLKDDSIDNKVLTRSDKARGKSDNVPSEEVVKKMKNYWRQLLNAKLITQRKFDNLTKAERGGLSELDKAGFIKRQLVETRQITKHVAQILDSRMNTKYDENDKLIREVKVITLKSKLVSDFRKDFQFYKVREINNYHHAHDAYLNAVVGTALIKKYPKLESEFVYGDYKVYDVRKMIAKSEQEIGKATAKYFFYSNIMNFFKTEITLANGEIRKRPLIETNGETGEIVWDKGRDFATVRKVLSMPQVNIVKKTEVQTGGFSKESILPKRNSDKLIARKKDWDPKKYGGFDSPTVAYSVLVVAKVEKGKSKKLKSVKELLGITIMERSSFEKNPIDFLEAKGYKEVKKDLIIKLPKYSLFELENGRKRMLASAGELQKGNELALPSKYVNFLYLASHYEKLKGSPEDNEQKQLFVEQHKHYLDEIIEQISEFSKRVILADANLDKVLSAYNKHRDKPIREQAENIIHLFTLTNLGAPAAFKYFDTTIDRKRYTSTKEVLDATLIHQSITGLYETRIDLSQLGGDGGGGGGGTLNIEDEYRLHETSKEPDVSLGSTWLSDFPQAWAETGGMGLAVRQAPLIIPLKATSTPVSIKQYPMSQEARLGIKPHIQRLLDQGILVPCQSPWNTPLLPVKKPGTNDYRPVQDLREVNKRVEDIHPTVPNPYNLLSGLPPSHQWYTVLDLKDAFFCLRLHPTSQPLFAFEWRDPEMGISGQLTWTRLPQGFKNSPTLFNEALHRDLAGFRIQHPDLILLQYVDDLLLAATSELDCQQGTRALLQTLGDLGYRASAKKAQICQKQVKYLGYLLKEGQRWLTEARKETVMGQPIPKTPRQLREFLGKAGFCRLFIPGFAEMAAPLYPLTKPGTLFNWGPDQQKAFQEIKQALLTAPALGLPDLTKPFELFVDEKQGYAKGVLTQKLGPWRRPVAYLSKKLDPVAAGWPPCLRMVAAIAVLTKDAGKLTMGQPLVILAPHAVEALVKQPPDRWLSNARMTHYQALLLDTDRVQFGPVVALNPATLLPLPEEGLQHDCLDILAEAHGTRSDLMDQPLPDADHTWYTDGSSFLQEGQRKAGAAVTTETEVIWARALPAGTSAQRAELIALTQALKMAEGKKLNVYTDSRYAFATAHIHGEIYRRRGWLTSEGKEIKNKDEILALLKALFLPKRLSIIHCPGHQKGNSAEARGNRMADQAAREVATRETPETSTLLAGKRTADGSEFEKRTADGSEFESPKKKAKVE

SEQ ID NO: 2376 - protein, 2118 aa, synthetic construct
MPAAKRVKLDGGDKKYSIGLDIGTNSVGWAVITDEYKVPSKKFKVLGNTDRHSIKKNLIGALLFDSGETAEATRLKRTARRRYTRRKNRICYLQEIFSNEMAKVDDSFFHRLEESFLVEEDKKHERHPIFGNIVDEVAYHEKYPTIYHLRKKLVDSTDKADLRLIYLALAHMIKFRGHFLIEGDLNPDNSDVDKLFIQLVQTYNQLFEENPINASGVDAKAILSARLSKSRRLENLIAQLPGEKKNGLFGNLIALSLGLTPNFKSNFDLAEDAKLQLSKDTYDDDLDNLLAQIGDQYADLFLAAKNLSDAILLSDILRVNTEITKAPLSASMIKRYDEHHQDLTLLKALVRQQLPEKYKEIFFDQSKNGYAGYIDGGASQEEFYKFIKPILEKMDGTEELLVKLNREDLLRKQRTFDNGSIPHQIHLGELHAILRRQEDFYPFLKDNREKIEKILTFRIPYYVGPLARGNSRFAWMTRKSEETITPWNFEEVVDKGASAQSFIERMTNFDKNLPNEKVLPKHSLLYEYFTVYNELTKVKYVTEGMRKPAFLSGEQKKAIVDLLFKTNRKVTVKQLKEDYFKKIECFDSVEISGVEDRFNASLGTYHDLLKIIKDKDFLDNEENEDILEDIVLTLTLFEDREMIEERLKTYAHLFDDKVMKQLKRRRYTGWGRLSRKLINGIRDKQSGKTILDFLKSDGFANRNFMQLIHDDSLTFKEDIQKAQVSGQGDSLHEHIANLAGSPAIKKGILQTVKVVDELVKVMGRHKPENIVIEMARENQTTQKGQKNSRERMKRIEEGIKELGSQILKEHPVENTQLQNEKLYLYYLQNGRDMYVDQELDINRLSDYDVDHIVPQSFLKDDSIDNKVLTRSDKARGKSDNVPSEEVVKKMKNYWRQLLNAKLITQRKFDNLTKAERGGLSELDKAGFIKRQLVETRQITKHVAQILDSRMNTKYDENDKLIREVKVITLKSKLVSDFRKDFQFYKVREINNYHHAHDAYLNAVVGTALIKKYPKLESEFVYGDYKVYDVRKMIAKSEQEIGKATAKYFFYSNIMNFFKTEITLANGEIRKRPLIETNGETGEIVWDKGRDFATVRKVLSMPQVNIVKKTEVQTGGFSKESILPKRNSDKLIARKKDWDPKKYGGFDSPTVAYSVLVVAKVEKGKSKKLKSVKELLGITIMERSSFEKNPIDFLEAKGYKEVKKDLIIKLPKYSLFELENGRKRMLASAGELQKGNELALPSKYVNFLYLASHYEKLKGSPEDNEQKQLFVEQHKHYLDEIIEQISEFSKRVILADANLDKVLSAYNKHRDKPIREQAENIIHLFTLTNLGAPAAFKYFDTTIDRKRYTSTKEVLDATLIHQSITGLYETRIDLSQLGGDGGSGGSSGGSSGSETPGTSESATPESSGGSSGGSSGGTLNIEDEYRLHETSKEPDVSLGSTWLSDFPQAWAETGGMGLAVRQAPLIIPLKATSTPVSIKQYPMSQEARLGIKPHIQRLLDQGILVPCQSPWNTPLLPVKKPGTNDYRPVQDLREVNKRVEDIHPTVPNPYNLLSGLPPSHQWYTVLDLKDAFFCLRLHPTSQPLFAFEWRDPEMGISGQLTWTRLPQGFKNSPTLFNEALHRDLAGFRIQHPDLILLQYVDDLLLAATSELDCQQGTRALLQTLGDLGYRASAKKAQICQKQVKYLGYLLKEGQRWLTEARKETVMGQPIPKTPRQLREFLGKAGFCRLFIPGFAEMAAPLYPLTKPGTLFNWGPDQQKAFQEIKQALLTAPALGLPDLTKPFELFVDEKQGYAKGVLTQKLGPWRRPVAYLSKKLDPVAAGWPPCLRMVAAIAVLTKDAGKLTMGQPLVILAPHAVEALVKQPPDRWLSNARMTHYQALLLDTDRVQFGPVVALNPATLLPLPEEGLQHDCLDILAEAHGTRSDLMDQPLPDADHTWYTDGSSFLQEGQRKAGAAVTTETEVIWARALPAGTSAQRAELIALTQALKMAEGKKLNVYTDSRYAFATAHIHGEIYRRRGWLTSEGKEIKNKDEILALLKALFLPKRLSIIHCPGHQKGNSAEARGNRMADQAAREVATRETPETSTLLAGKRTADGSEFEKRTADGSEFESPKKKAKVE

SEQ ID NO: 2377 - protein, 2096 aa, synthetic construct
MPAAKRVKLDGGDKKYSIGLDIGTNSVGWAVITDEYKVPSKKFKVLGNTDRHSIKKNLIGALLFDSGETAEATRLKRTARRRYTRRKNRICYLQEIFSNEMAKVDDSFFHRLEESFLVEEDKKHERHPIFGNIVDEVAYHEKYPTIYHLRKKLVDSTDKADLRLIYLALAHMIKFRGHFLIEGDLNPDNSDVDKLFIQLVQTYNQLFEENPINASGVDAKAILSARLSKSRRLENLIAQLPGEKKNGLFGNLIALSLGLTPNFKSNFDLAEDAKLQLSKDTYDDDLDNLLAQIGDQYADLFLAAKNLSDAILLSDILRVNTEITKAPLSASMIKRYDEHHQDLTLLKALVRQQLPEKYKEIFFDQSKNGYAGYIDGGASQEEFYKFIKPILEKMDGTEELLVKLNREDLLRKQRTFDNGSIPHQIHLGELHAILRRQEDFYPFLKDNREKIEKILTFRIPYYVGPLARGNSRFAWMTRKSEETITPWNFEEVVDKGASAQSFIERMTNFDKNLPNEKVLPKHSLLYEYFTVYNELTKVKYVTEGMRKPAFLSGEQKKAIVDLLFKTNRKVTVKQLKEDYFKKIECFDSVEISGVEDRFNASLGTYHDLLKIIKDKDFLDNEENEDILEDIVLTLTLFEDREMIEERLKTYAHLFDDKVMKQLKRRRYTGWGRLSRKLINGIRDKQSGKTILDFLKSDGFANRNFMQLIHDDSLTFKEDIQKAQVSGQGDSLHEHIANLAGSPAIKKGILQTVKVVDELVKVMGRHKPENIVIEMARENQTTQKGQKNSRERMKRIEEGIKELGSQILKEHPVENTQLQNEKLYLYYLQNGRDMYVDQELDINRLSDYDVDHIVPQSFLKDDSIDNKVLTRSDKARGKSDNVPSEEVVKKMKNYWRQLLNAKLITQRKFDNLTKAERGGLSELDKAGFIKRQLVETRQITKHVAQILDSRMNTKYDENDKLIREVKVITLKSKLVSDFRKDFQFYKVREINNYHHAHDAYLNAVVGTALIKKYPKLESEFVYGDYKVYDVRKMIAKSEQEIGKATAKYFFYSNIMNFFKTEITLANGEIRKRPLIETNGETGEIVWDKGRDFATVRKVLSMPQVNIVKKTEVQTGGFSKESILPKRNSDKLIARKKDWDPKKYGGFDSPTVAYSVLVVAKVEKGKSKKLKSVKELLGITIMERSSFEKNPIDFLEAKGYKEVKKDLIIKLPKYSLFELENGRKRMLASAGELQKGNELALPSKYVNFLYLASHYEKLKGSPEDNEQKQLFVEQHKHYLDEIIEQISEFSKRVILADANLDKVLSAYNKHRDKPIREQAENIIHLFTLTNLGAPAAFKYFDTTIDRKRYTSTKEVLDATLIHQSITGLYETRIDLSQLGGDGGPAPGGGEAAAKGGTLNIEDEYRLHETSKEPDVSLGSTWLSDFPQAWAETGGMGLAVRQAPLIIPLKATSTPVSIKQYPMSQEARLGIKPHIQRLLDQGILVPCQSPWNTPLLPVKKPGTNDYRPVQDLREVNKRVEDIHPTVPNPYNLLSGLPPSHQWYTVLDLKDAFFCLRLHPTSQPLFAFEWRDPEMGISGQLTWTRLPQGFKNSPTLFNEALHRDLAGFRIQHPDLILLQYVDDLLLAATSELDCQQGTRALLQTLGDLGYRASAKKAQICQKQVKYLGYLLKEGQRWLTEARKETVMGQPIPKTPRQLREFLGKAGFCRLFIPGFAEMAAPLYPLTKPGTLFNWGPDQQKAFQEIKQALLTAPALGLPDLTKPFELFVDEKQGYAKGVLTQKLGPWRRPVAYLSKKLDPVAAGWPPCLRMVAAIAVLTKDAGKLTMGQPLVILAPHAVEALVKQPPDRWLSNARMTHYQALLLDTDRVQFGPVVALNPATLLPLPEEGLQHDCLDILAEAHGTRSDLMDQPLPDADHTWYTDGSSFLQEGQRKAGAAVTTETEVIWARALPAGTSAQRAELIALTQALKMAEGKKLNVYTDSRYAFATAHIHGEIYRRRGWLTSEGKEIKNKDEILALLKALFLPKRLSIIHCPGHQKGNSAEARGNRMADQAAREVATRETPETSTLLAGKRTADGSEFEKRTADGSEFESPKKKAKVE

SEQ ID NO: 2378 - protein, 2090 aa, synthetic construct
MPAAKRVKLDGGDKKYSIGLDIGTNSVGWAVITDEYKVPSKKFKVLGNTDRHSIKKNLIGALLFDSGETAEATRLKRTARRRYTRRKNRICYLQEIFSNEMAKVDDSFFHRLEESFLVEEDKKHERHPIFGNIVDEVAYHEKYPTIYHLRKKLVDSTDKADLRLIYLALAHMIKFRGHFLIEGDLNPDNSDVDKLFIQLVQTYNQLFEENPINASGVDAKAILSARLSKSRRLENLIAQLPGEKKNGLFGNLIALSLGLTPNFKSNFDLAEDAKLQLSKDTYDDDLDNLLAQIGDQYADLFLAAKNLSDAILLSDILRVNTEITKAPLSASMIKRYDEHHQDLTLLKALVRQQLPEKYKEIFFDQSKNGYAGYIDGGASQEEFYKFIKPILEKMDGTEELLVKLNREDLLRKQRTFDNGSIPHQIHLGELHAILRRQEDFYPFLKDNREKIEKILTFRIPYYVGPLARGNSRFAWMTRKSEETITPWNFEEVVDKGASAQSFIERMTNFDKNLPNEKVLPKHSLLYEYFTVYNELTKVKYVTEGMRKPAFLSGEQKKAIVDLLFKTNRKVTVKQLKEDYFKKIECFDSVEISGVEDRFNASLGTYHDLLKIIKDKDFLDNEENEDILEDIVLTLTLFEDREMIEERLKTYAHLFDDKVMKQLKRRRYTGWGRLSRKLINGIRDKQSGKTILDFLKSDGFANRNFMQLIHDDSLTFKEDIQKAQVSGQGDSLHEHIANLAGSPAIKKGILQTVKVVDELVKVMGRHKPENIVIEMARENQTTQKGQKNSRERMKRIEEGIKELGSQILKEHPVENTQLQNEKLYLYYLQNGRDMYVDQELDINRLSDYDVDHIVPQSFLKDDSIDNKVLTRSDKARGKSDNVPSEEVVKKMKNYWRQLLNAKLITQRKFDNLTKAERGGLSELDKAGFIKRQLVETRQITKHVAQILDSRMNTKYDENDKLIREVKVITLKSKLVSDFRKDFQFYKVREINNYHHAHDAYLNAVVGTALIKKYPKLESEFVYGDYKVYDVRKMIAKSEQEIGKATAKYFFYSNIMNFFKTEITLANGEIRKRPLIETNGETGEIVWDKGRDFATVRKVLSMPQVNIVKKTEVQTGGFSKESILPKRNSDKLIARKKDWDPKKYGGFDSPTVAYSVLVVAKVEKGKSKKLKSVKELLGITIMERSSFEKNPIDFLEAKGYKEVKKDLIIKLPKYSLFELENGRKRMLASAGELQKGNELALPSKYVNFLYLASHYEKLKGSPEDNEQKQLFVEQHKHYLDEIIEQISEFSKRVILADANLDKVLSAYNKHRDKPIREQAENIIHLFTLTNLGAPAAFKYFDTTIDRKRYTSTKEVLDATLIHQSITGLYETRIDLSQLGGDGGGGGGGGGTLNIEDEYRLHETSKEPDVSLGSTWLSDFPQAWAETGGMGLAVRQAPLIIPLKATSTPVSIKQYPMSQEARLGIKPHIQRLLDQGILVPCQSPWNTPLLPVKKPGTNDYRPVQDLREVNKRVEDIHPTVPNPYNLLSGLPPSHQWYTVLDLKDAFFCLRLHPTSQPLFAFEWRDPEMGISGQLTWTRLPQGFKNSPTLFNEALHRDLAGFRIQHPDLILLQYVDDLLLAATSELDCQQGTRALLQTLGDLGYRASAKKAQICQKQVKYLGYLLKEGQRWLTEARKETVMGQPIPKTPRQLREFLGKAGFCRLFIPGFAEMAAPLYPLTKPGTLFNWGPDQQKAFQEIKQALLTAPALGLPDLTKPFELFVDEKQGYAKGVLTQKLGPWRRPVAYLSKKLDPVAAGWPPCLRMVAAIAVLTKDAGKLTMGQPLVILAPHAVEALVKQPPDRWLSNARMTHYQALLLDTDRVQFGPVVALNPATLLPLPEEGLQHDCLDILAEAHGTRSDLMDQPLPDADHTWYTDGSSFLQEGQRKAGAAVTTETEVIWARALPAGTSAQRAELIALTQALKMAEGKKLNVYTDSRYAFATAHIHGEIYRRRGWLTSEGKEIKNKDEILALLKALFLPKRLSIIHCPGHQKGNSAEARGNRMADQAAREVATRETPETSTLLAGKRTADGSEFEKRTADGSEFESPKKKAKVE

SEQ ID NO: 2379 - protein, 2094 aa, synthetic construct
MPAAKRVKLDGGDKKYSIGLDIGTNSVGWAVITDEYKVPSKKFKVLGNTDRHSIKKNLIGALLFDSGETAEATRLKRTARRRYTRRKNRICYLQEIFSNEMAKVDDSFFHRLEESFLVEEDKKHERHPIFGNIVDEVAYHEKYPTIYHLRKKLVDSTDKADLRLIYLALAHMIKFRGHFLIEGDLNPDNSDVDKLFIQLVQTYNQLFEENPINASGVDAKAILSARLSKSRRLENLIAQLPGEKKNGLFGNLIALSLGLTPNFKSNFDLAEDAKLQLSKDTYDDDLDNLLAQIGDQYADLFLAAKNLSDAILLSDILRVNTEITKAPLSASMIKRYDEHHQDLTLLKALVRQQLPEKYKEIFFDQSKNGYAGYIDGGASQEEFYKFIKPILEKMDGTEELLVKLNREDLLRKQRTFDNGSIPHQIHLGELHAILRRQEDFYPFLKDNREKIEKILTFRIPYYVGPLARGNSRFAWMTRKSEETITPWNFEEVVDKGASAQSFIERMTNFDKNLPNEKVLPKHSLLYEYFTVYNELTKVKYVTEGMRKPAFLSGEQKKAIVDLLFKTNRKVTVKQLKEDYFKKIECFDSVEISGVEDRFNASLGTYHDLLKIIKDKDFLDNEENEDILEDIVLTLTLFEDREMIEERLKTYAHLFDDKVMKQLKRRRYTGWGRLSRKLINGIRDKQSGKTILDFLKSDGFANRNFMQLIHDDSLTFKEDIQKAQVSGQGDSLHEHIANLAGSPAIKKGILQTVKVVDELVKVMGRHKPENIVIEMARENQTTQKGQKNSRERMKRIEEGIKELGSQILKEHPVENTQLQNEKLYLYYLQNGRDMYVDQELDINRLSDYDVDHIVPQSFLKDDSIDNKVLTRSDKARGKSDNVPSEEVVKKMKNYWRQLLNAKLITQRKFDNLTKAERGGLSELDKAGFIKRQLVETRQITKHVAQILDSRMNTKYDENDKLIREVKVITLKSKLVSDFRKDFQFYKVREINNYHHAHDAYLNAVVGTALIKKYPKLESEFVYGDYKVYDVRKMIAKSEQEIGKATAKYFFYSNIMNFFKTEITLANGEIRKRPLIETNGETGEIVWDKGRDFATVRKVLSMPQVNIVKKTEVQTGGFSKESILPKRNSDKLIARKKDWDPKKYGGFDSPTVAYSVLVVAKVEKGKSKKLKSVKELLGITIMERSSFEKNPIDFLEAKGYKEVKKDLIIKLPKYSLFELENGRKRMLASAGELQKGNELALPSKYVNFLYLASHYEKLKGSPEDNEQKQLFVEQHKHYLDEIIEQISEFSKRVILADANLDKVLSAYNKHRDKPIREQAENIIHLFTLTNLGAPAAFKYFDTTIDRKRYTSTKEVLDATLIHQSITGLYETRIDLSQLGGDGGGSSGGSGGGGGTLNIEDEYRLHETSKEPDVSLGSTWLSDFPQAWAETGGMGLAVRQAPLIIPLKATSTPVSIKQYPMSQEARLGIKPHIQRLLDQGILVPCQSPWNTPLLPVKKPGTNDYRPVQDLREVNKRVEDIHPTVPNPYNLLSGLPPSHQWYTVLDLKDAFFCLRLHPTSQPLFAFEWRDPEMGISGQLTWTRLPQGFKNSPTLFNEALHRDLAGFRIQHPDLILLQYVDDLLLAATSELDCQQGTRALLQTLGDLGYRASAKKAQICQKQVKYLGYLLKEGQRWLTEARKETVMGQPIPKTPRQLREFLGKAGFCRLFIPGFAEMAAPLYPLTKPGTLFNWGPDQQKAFQEIKQALLTAPALGLPDLTKPFELFVDEKQGYAKGVLTQKLGPWRRPVAYLSKKLDPVAAGWPPCLRMVAAIAVLTKDAGKLTMGQPLVILAPHAVEALVKQPPDRWLSNARMTHYQALLLDTDRVQFGPVVALNPATLLPLPEEGLQHDCLDILAEAHGTRSDLMDQPLPDADHTWYTDGSSFLQEGQRKAGAAVTTETEVIWARALPAGTSAQRAELIALTQALKMAEGKKLNVYTDSRYAFATAHIHGEIYRRRGWLTSEGKEIKNKDEILALLKALFLPKRLSIIHCPGHQKGNSAEARGNRMADQAAREVATRETPETSTLLAGKRTADGSEFEKRTADGSEFESPKKKAKVE

SEQ ID NO: 2380 - protein, 2094 aa, synthetic construct
MPAAKRVKLDGGDKKYSIGLDIGTNSVGWAVITDEYKVPSKKFKVLGNTDRHSIKKNLIGALLFDSGETAEATRLKRTARRRYTRRKNRICYLQEIFSNEMAKVDDSFFHRLEESFLVEEDKKHERHPIFGNIVDEVAYHEKYPTIYHLRKKLVDSTDKADLRLIYLALAHMIKFRGHFLIEGDLNPDNSDVDKLFIQLVQTYNQLFEENPINASGVDAKAILSARLSKSRRLENLIAQLPGEKKNGLFGNLIALSLGLTPNFKSNFDLAEDAKLQLSKDTYDDDLDNLLAQIGDQYADLFLAAKNLSDAILLSDILRVNTEITKAPLSASMIKRYDEHHQDLTLLKALVRQQLPEKYKEIFFDQSKNGYAGYIDGGASQEEFYKFIKPILEKMDGTEELLVKLNREDLLRKQRTFDNGSIPHQIHLGELHAILRRQEDFYPFLKDNREKIEKILTFRIPYYVGPLARGNSRFAWMTRKSEETITPWNFEEVVDKGASAQSFIERMTNFDKNLPNEKVLPKHSLLYEYFTVYNELTKVKYVTEGMRKPAFLSGEQKKAIVDLLFKTNRKVTVKQLKEDYFKKIECFDSVEISGVEDRFNASLGTYHDLLKIIKDKDFLDNEENEDILEDIVLTLTLFEDREMIEERLKTYAHLFDDKVMKQLKRRRYTGWGRLSRKLINGIRDKQSGKTILDFLKSDGFANRNFMQLIHDDSLTFKEDIQKAQVSGQGDSLHEHIANLAGSPAIKKGILQTVKVVDELVKVMGRHKPENIVIEMARENQTTQKGQKNSRERMKRIEEGIKELGSQILKEHPVENTQLQNEKLYLYYLQNGRDMYVDQELDINRLSDYDVDHIVPQSFLKDDSIDNKVLTRSDKARGKSDNVPSEEVVKKMKNYWRQLLNAKLITQRKFDNLTKAERGGLSELDKAGFIKRQLVETRQITKHVAQILDSRMNTKYDENDKLIREVKVITLKSKLVSDFRKDFQFYKVREINNYHHAHDAYLNAVVGTALIKKYPKLESEFVYGDYKVYDVRKMIAKSEQEIGKATAKYFFYSNIMNFFKTEITLANGEIRKRPLIETNGETGEIVWDKGRDFATVRKVLSMPQVNIVKKTEVQTGGFSKESILPKRNSDKLIARKKDWDPKKYGGFDSPTVAYSVLVVAKVEKGKSKKLKSVKELLGITIMERSSFEKNPIDFLEAKGYKEVKKDLIIKLPKYSLFELENGRKRMLASAGELQKGNELALPSKYVNFLYLASHYEKLKGSPEDNEQKQLFVEQHKHYLDEIIEQISEFSKRVILADANLDKVLSAYNKHRDKPIREQAENIIHLFTLTNLGAPAAFKYFDTTIDRKRYTSTKEVLDATLIHQSITGLYETRIDLSQLGGDGGPAPGSSGGSGGTLNIEDEYRLHETSKEPDVSLGSTWLSDFPQAWAETGGMGLAVRQAPLIIPLKATSTPVSIKQYPMSQEARLGIKPHIQRLLDQGILVPCQSPWNTPLLPVKKPGTNDYRPVQDLREVNKRVEDIHPTVPNPYNLLSGLPPSHQWYTVLDLKDAFFCLRLHPTSQPLFAFEWRDPEMGISGQLTWTRLPQGFKNSPTLFNEALHRDLAGFRIQHPDLILLQYVDDLLLAATSELDCQQGTRALLQTLGDLGYRASAKKAQICQKQVKYLGYLLKEGQRWLTEARKETVMGQPIPKTPRQLREFLGKAGFCRLFIPGFAEMAAPLYPLTKPGTLFNWGPDQQKAFQEIKQALLTAPALGLPDLTKPFELFVDEKQGYAKGVLTQKLGPWRRPVAYLSKKLDPVAAGWPPCLRMVAAIAVLTKDAGKLTMGQPLVILAPHAVEALVKQPPDRWLSNARMTHYQALLLDTDRVQFGPVVALNPATLLPLPEEGLQHDCLDILAEAHGTRSDLMDQPLPDADHTWYTDGSSFLQEGQRKAGAAVTTETEVIWARALPAGTSAQRAELIALTQALKMAEGKKLNVYTDSRYAFATAHIHGEIYRRRGWLTSEGKEIKNKDEILALLKALFLPKRLSIIHCPGHQKGNSAEARGNRMADQAAREVATRETPETSTLLAGKRTADGSEFEKRTADGSEFESPKKKAKVE

SEQ ID NO: 2381 - protein, 2090 aa, synthetic construct
MPAAKRVKLDGGDKKYSIGLDIGTNSVGWAVITDEYKVPSKKFKVLGNTDRHSIKKNLIGALLFDSGETAEATRLKRTARRRYTRRKNRICYLQEIFSNEMAKVDDSFFHRLEESFLVEEDKKHERHPIFGNIVDEVAYHEKYPTIYHLRKKLVDSTDKADLRLIYLALAHMIKFRGHFLIEGDLNPDNSDVDKLFIQLVQTYNQLFEENPINASGVDAKAILSARLSKSRRLENLIAQLPGEKKNGLFGNLIALSLGLTPNFKSNFDLAEDAKLQLSKDTYDDDLDNLLAQIGDQYADLFLAAKNLSDAILLSDILRVNTEITKAPLSASMIKRYDEHHQDLTLLKALVRQQLPEKYKEIFFDQSKNGYAGYIDGGASQEEFYKFIKPILEKMDGTEELLVKLNREDLLRKQRTFDNGSIPHQIHLGELHAILRRQEDFYPFLKDNREKIEKILTFRIPYYVGPLARGNSRFAWMTRKSEETITPWNFEEVVDKGASAQSFIERMTNFDKNLPNEKVLPKHSLLYEYFTVYNELTKVKYVTEGMRKPAFLSGEQKKAIVDLLFKTNRKVTVKQLKEDYFKKIECFDSVEISGVEDRFNASLGTYHDLLKIIKDKDFLDNEENEDILEDIVLTLTLFEDREMIEERLKTYAHLFDDKVMKQLKRRRYTGWGRLSRKLINGIRDKQSGKTILDFLKSDGFANRNFMQLIHDDSLTFKEDIQKAQVSGQGDSLHEHIANLAGSPAIKKGILQTVKVVDELVKVMGRHKPENIVIEMARENQTTQKGQKNSRERMKRIEEGIKELGSQILKEHPVENTQLQNEKLYLYYLQNGRDMYVDQELDINRLSDYDVDHIVPQSFLKDDSIDNKVLTRSDKARGKSDNVPSEEVVKKMKNYWRQLLNAKLITQRKFDNLTKAERGGLSELDKAGFIKRQLVETRQITKHVAQILDSRMNTKYDENDKLIREVKVITLKSKLVSDFRKDFQFYKVREINNYHHAHDAYLNAVVGTALIKKYPKLESEFVYGDYKVYDVRKMIAKSEQEIGKATAKYFFYSNIMNFFKTEITLANGEIRKRPLIETNGETGEIVWDKGRDFATVRKVLSMPQVNIVKKTEVQTGGFSKESILPKRNSDKLIARKKDWDPKKYGGFDSPTVAYSVLVVAKVEKGKSKKLKSVKELLGITIMERSSFEKNPIDFLEAKGYKEVKKDLIIKLPKYSLFELENGRKRMLASAGELQKGNELALPSKYVNFLYLASHYEKLKGSPEDNEQKQLFVEQHKHYLDEIIEQISEFSKRVILADANLDKVLSAYNKHRDKPIREQAENIIHLFTLTNLGAPAAFKYFDTTIDRKRYTSTKEVLDATLIHQSITGLYETRIDLSQLGGDGGGGGGSGGTLNIEDEYRLHETSKEPDVSLGSTWLSDFPQAWAETGGMGLAVRQAPLIIPLKATSTPVSIKQYPMSQEARLGIKPHIQRLLDQGILVPCQSPWNTPLLPVKKPGTNDYRPVQDLREVNKRVEDIHPTVPNPYNLLSGLPPSHQWYTVLDLKDAFFCLRLHPTSQPLFAFEWRDPEMGISGQLTWTRLPQGFKNSPTLFNEALHRDLAGFRIQHPDLILLQYVDDLLLAATSELDCQQGTRALLQTLGDLGYRASAKKAQICQKQVKYLGYLLKEGQRWLTEARKETVMGQPIPKTPRQLREFLGKAGFCRLFIPGFAEMAAPLYPLTKPGTLFNWGPDQQKAFQEIKQALLTAPALGLPDLTKPFELFVDEKQGYAKGVLTQKLGPWRRPVAYLSKKLDPVAAGWPPCLRMVAAIAVLTKDAGKLTMGQPLVILAPHAVEALVKQPPDRWLSNARMTHYQALLLDTDRVQFGPVVALNPATLLPLPEEGLQHDCLDILAEAHGTRSDLMDQPLPDADHTWYTDGSSFLQEGQRKAGAAVTTETEVIWARALPAGTSAQRAELIALTQALKMAEGKKLNVYTDSRYAFATAHIHGEIYRRRGWLTSEGKEIKNKDEILALLKALFLPKRLSIIHCPGHQKGNSAEARGNRMADQAAREVATRETPETSTLLAGKRTADGSEFEKRTADGSEFESPKKKAKVE

SEQ ID NO: 2382 - protein, 2093 aa, synthetic construct
MPAAKRVKLDGGDKKYSIGLDIGTNSVGWAVITDEYKVPSKKFKVLGNTDRHSIKKNLIGALLFDSGETAEATRLKRTARRRYTRRKNRICYLQEIFSNEMAKVDDSFFHRLEESFLVEEDKKHERHPIFGNIVDEVAYHEKYPTIYHLRKKLVDSTDKADLRLIYLALAHMIKFRGHFLIEGDLNPDNSDVDKLFIQLVQTYNQLFEENPINASGVDAKAILSARLSKSRRLENLIAQLPGEKKNGLFGNLIALSLGLTPNFKSNFDLAEDAKLQLSKDTYDDDLDNLLAQIGDQYADLFLAAKNLSDAILLSDILRVNTEITKAPLSASMIKRYDEHHQDLTLLKALVRQQLPEKYKEIFFDQSKNGYAGYIDGGASQEEFYKFIKPILEKMDGTEELLVKLNREDLLRKQRTFDNGSIPHQIHLGELHAILRRQEDFYPFLKDNREKIEKILTFRIPYYVGPLARGNSRFAWMTRKSEETITPWNFEEVVDKGASAQSFIERMTNFDKNLPNEKVLPKHSLLYEYFTVYNELTKVKYVTEGMRKPAFLSGEQKKAIVDLLFKTNRKVTVKQLKEDYFKKIECFDSVEISGVEDRFNASLGTYHDLLKIIKDKDFLDNEENEDILEDIVLTLTLFEDREMIEERLKTYAHLFDDKVMKQLKRRRYTGWGRLSRKLINGIRDKQSGKTILDFLKSDGFANRNFMQLIHDDSLTFKEDIQKAQVSGQGDSLHEHIANLAGSPAIKKGILQTVKVVDELVKVMGRHKPENIVIEMARENQTTQKGQKNSRERMKRIEEGIKELGSQILKEHPVENTQLQNEKLYLYYLQNGRDMYVDQELDINRLSDYDVDHIVPQSFLKDDSIDNKVLTRSDKARGKSDNVPSEEVVKKMKNYWRQLLNAKLITQRKFDNLTKAERGGLSELDKAGFIKRQLVETRQITKHVAQILDSRMNTKYDENDKLIREVKVITLKSKLVSDFRKDFQFYKVREINNYHHAHDAYLNAVVGTALIKKYPKLESEFVYGDYKVYDVRKMIAKSEQEIGKATAKYFFYSNIMNFFKTEITLANGEIRKRPLIETNGETGEIVWDKGRDFATVRKVLSMPQVNIVKKTEVQTGGFSKESILPKRNSDKLIARKKDWDPKKYGGFDSPTVAYSVLVVAKVEKGKSKKLKSVKELLGITIMERSSFEKNPIDFLEAKGYKEVKKDLIIKLPKYSLFELENGRKRMLASAGELQKGNELALPSKYVNFLYLASHYEKLKGSPEDNEQKQLFVEQHKHYLDEIIEQISEFSKRVILADANLDKVLSAYNKHRDKPIREQAENIIHLFTLTNLGAPAAFKYFDTTIDRKRYTSTKEVLDATLIHQSITGLYETRIDLSQLGGDGGGSSEAAAKGGTLNIEDEYRLHETSKEPDVSLGSTWLSDFPQAWAETGGMGLAVRQAPLIIPLKATSTPVSIKQYPMSQEARLGIKPHIQRLLDQGILVPCQSPWNTPLLPVKKPGTNDYRPVQDLREVNKRVEDIHPTVPNPYNLLSGLPPSHQWYTVLDLKDAFFCLRLHPTSQPLFAFEWRDPEMGISGQLTWTRLPQGFKNSPTLFNEALHRDLAGFRIQHPDLILLQYVDDLLLAATSELDCQQGTRALLQTLGDLGYRASAKKAQICQKQVKYLGYLLKEGQRWLTEARKETVMGQPIPKTPRQLREFLGKAGFCRLFIPGFAEMAAPLYPLTKPGTLFNWGPDQQKAFQEIKQALLTAPALGLPDLTKPFELFVDEKQGYAKGVLTQKLGPWRRPVAYLSKKLDPVAAGWPPCLRMVAAIAVLTKDAGKLTMGQPLVILAPHAVEALVKQPPDRWLSNARMTHYQALLLDTDRVQFGPVVALNPATLLPLPEEGLQHDCLDILAEAHGTRSDLMDQPLPDADHTWYTDGSSFLQEGQRKAGAAVTTETEVIWARALPAGTSAQRAELIALTQALKMAEGKKLNVYTDSRYAFATAHIHGEIYRRRGWLTSEGKEIKNKDEILALLKALFLPKRLSIIHCPGHQKGNSAEARGNRMADQAAREVATRETPETSTLLAGKRTADGSEFEKRTADGSEFESPKKKAKVE

SEQ ID NO: 2383 - protein, 2091 aa, synthetic construct
MPAAKRVKLDGGDKKYSIGLDIGTNSVGWAVITDEYKVPSKKFKVLGNTDRHSIKKNLIGALLFDSGETAEATRLKRTARRRYTRRKNRICYLQEIFSNEMAKVDDSFFHRLEESFLVEEDKKHERHPIFGNIVDEVAYHEKYPTIYHLRKKLVDSTDKADLRLIYLALAHMIKFRGHFLIEGDLNPDNSDVDKLFIQLVQTYNQLFEENPINASGVDAKAILSARLSKSRRLENLIAQLPGEKKNGLFGNLIALSLGLTPNFKSNFDLAEDAKLQLSKDTYDDDLDNLLAQIGDQYADLFLAAKNLSDAILLSDILRVNTEITKAPLSASMIKRYDEHHQDLTLLKALVRQQLPEKYKEIFFDQSKNGYAGYIDGGASQEEFYKFIKPILEKMDGTEELLVKLNREDLLRKQRTFDNGSIPHQIHLGELHAILRRQEDFYPFLKDNREKIEKILTFRIPYYVGPLARGNSRFAWMTRKSEETITPWNFEEVVDKGASAQSFIERMTNFDKNLPNEKVLPKHSLLYEYFTVYNELTKVKYVTEGMRKPAFLSGEQKKAIVDLLFKTNRKVTVKQLKEDYFKKIECFDSVEISGVEDRFNASLGTYHDLLKIIKDKDFLDNEENEDILEDIVLTLTLFEDREMIEERLKTYAHLFDDKVMKQLKRRRYTGWGRLSRKLINGIRDKQSGKTILDFLKSDGFANRNFMQLIHDDSLTFKEDIQKAQVSGQGDSLHEHIANLAGSPAIKKGILQTVKVVDELVKVMGRHKPENIVIEMARENQTTQKGQKNSRERMKRIEEGIKELGSQILKEHPVENTQLQNEKLYLYYLQNGRDMYVDQELDINRLSDYDVDHIVPQSFLKDDSIDNKVLTRSDKARGKSDNVPSEEVVKKMKNYWRQLLNAKLITQRKFDNLTKAERGGLSELDKAGFIKRQLVETRQITKHVAQILDSRMNTKYDENDKLIREVKVITLKSKLVSDFRKDFQFYKVREINNYHHAHDAYLNAVVGTALIKKYPKLESEFVYGDYKVYDVRKMIAKSEQEIGKATAKYFFYSNIMNFFKTEITLANGEIRKRPLIETNGETGEIVWDKGRDFATVRKVLSMPQVNIVKKTEVQTGGFSKESILPKRNSDKLIARKKDWDPKKYGGFDSPTVAYSVLVVAKVEKGKSKKLKSVKELLGITIMERSSFEKNPIDFLEAKGYKEVKKDLIIKLPKYSLFELENGRKRMLASAGELQKGNELALPSKYVNFLYLASHYEKLKGSPEDNEQKQLFVEQHKHYLDEIIEQISEFSKRVILADANLDKVLSAYNKHRDKPIREQAENIIHLFTLTNLGAPAAFKYFDTTIDRKRYTSTKEVLDATLIHQSITGLYETRIDLSQLGGDGGGGGGSSGGTLNIEDEYRLHETSKEPDVSLGSTWLSDFPQAWAETGGMGLAVRQAPLIIPLKATSTPVSIKQYPMSQEARLGIKPHIQRLLDQGILVPCQSPWNTPLLPVKKPGTNDYRPVQDLREVNKRVEDIHPTVPNPYNLLSGLPPSHQWYTVLDLKDAFFCLRLHPTSQPLFAFEWRDPEMGISGQLTWTRLPQGFKNSPTLFNEALHRDLAGFRIQHPDLILLQYVDDLLLAATSELDCQQGTRALLQTLGDLGYRASAKKAQICQKQVKYLGYLLKEGQRWLTEARKETVMGQPIPKTPRQLREFLGKAGFCRLFIPGFAEMAAPLYPLTKPGTLFNWGPDQQKAFQEIKQALLTAPALGLPDLTKPFELFVDEKQGYAKGVLTQKLGPWRRPVAYLSKKLDPVAAGWPPCLRMVAAIAVLTKDAGKLTMGQPLVILAPHAVEALVKQPPDRWLSNARMTHYQALLLDTDRVQFGPVVALNPATLLPLPEEGLQHDCLDILAEAHGTRSDLMDQPLPDADHTWYTDGSSFLQEGQRKAGAAVTTETEVIWARALPAGTSAQRAELIALTQALKMAEGKKLNVYTDSRYAFATAHIHGEIYRRRGWLTSEGKEIKNKDEILALLKALFLPKRLSIIHCPGHQKGNSAEARGNRMADQAAREVATRETPETSTLLAGKRTADGSEFEKRTADGSEFESPKKKAKVE

SEQ ID NO: 2384 - protein, 2096 aa, synthetic construct
MPAAKRVKLDGGDKKYSIGLDIGTNSVGWAVITDEYKVPSKKFKVLGNTDRHSIKKNLIGALLFDSGETAEATRLKRTARRRYTRRKNRICYLQEIFSNEMAKVDDSFFHRLEESFLVEEDKKHERHPIFGNIVDEVAYHEKYPTIYHLRKKLVDSTDKADLRLIYLALAHMIKFRGHFLIEGDLNPDNSDVDKLFIQLVQTYNQLFEENPINASGVDAKAILSARLSKSRRLENLIAQLPGEKKNGLFGNLIALSLGLTPNFKSNFDLAEDAKLQLSKDTYDDDLDNLLAQIGDQYADLFLAAKNLSDAILLSDILRVNTEITKAPLSASMIKRYDEHHQDLTLLKALVRQQLPEKYKEIFFDQSKNGYAGYIDGGASQEEFYKFIKPILEKMDGTEELLVKLNREDLLRKQRTFDNGSIPHQIHLGELHAILRRQEDFYPFLKDNREKIEKILTFRIPYYVGPLARGNSRFAWMTRKSEETITPWNFEEVVDKGASAQSFIERMTNFDKNLPNEKVLPKHSLLYEYFTVYNELTKVKYVTEGMRKPAFLSGEQKKAIVDLLFKTNRKVTVKQLKEDYFKKIECFDSVEISGVEDRFNASLGTYHDLLKIIKDKDFLDNEENEDILEDIVLTLTLFEDREMIEERLKTYAHLFDDKVMKQLKRRRYTGWGRLSRKLINGIRDKQSGKTILDFLKSDGFANRNFMQLIHDDSLTFKEDIQKAQVSGQGDSLHEHIANLAGSPAIKKGILQTVKVVDELVKVMGRHKPENIVIEMARENQTTQKGQKNSRERMKRIEEGIKELGSQILKEHPVENTQLQNEKLYLYYLQNGRDMYVDQELDINRLSDYDVDHIVPQSFLKDDSIDNKVLTRSDKARGKSDNVPSEEVVKKMKNYWRQLLNAKLITQRKFDNLTKAERGGLSELDKAGFIKRQLVETRQITKHVAQILDSRMNTKYDENDKLIREVKVITLKSKLVSDFRKDFQFYKVREINNYHHAHDAYLNAVVGTALIKKYPKLESEFVYGDYKVYDVRKMIAKSEQEIGKATAKYFFYSNIMNFFKTEITLANGEIRKRPLIETNGETGEIVWDKGRDFATVRKVLSMPQVNIVKKTEVQTGGFSKESILPKRNSDKLIARKKDWDPKKYGGFDSPTVAYSVLVVAKVEKGKSKKLKSVKELLGITIMERSSFEKNPIDFLEAKGYKEVKKDLIIKLPKYSLFELENGRKRMLASAGELQKGNELALPSKYVNFLYLASHYEKLKGSPEDNEQKQLFVEQHKHYLDEIIEQISEFSKRVILADANLDKVLSAYNKHRDKPIREQAENIIHLFTLTNLGAPAAFKYFDTTIDRKRYTSTKEVLDATLIHQSITGLYETRIDLSQLGGDGGGSSEAAAKGGGGGTLNIEDEYRLHETSKEPDVSLGSTWLSDFPQAWAETGGMGLAVRQAPLIIPLKATSTPVSIKQYPMSQEARLGIKPHIQRLLDQGILVPCQSPWNTPLLPVKKPGTNDYRPVQDLREVNKRVEDIHPTVPNPYNLLSGLPPSHQWYTVLDLKDAFFCLRLHPTSQPLFAFEWRDPEMGISGQLTWTRLPQGFKNSPTLFNEALHRDLAGFRIQHPDLILLQYVDDLLLAATSELDCQQGTRALLQTLGDLGYRASAKKAQICQKQVKYLGYLLKEGQRWLTEARKETVMGQPIPKTPRQLREFLGKAGFCRLFIPGFAEMAAPLYPLTKPGTLFNWGPDQQKAFQEIKQALLTAPALGLPDLTKPFELFVDEKQGYAKGVLTQKLGPWRRPVAYLSKKLDPVAAGWPPCLRMVAAIAVLTKDAGKLTMGQPLVILAPHAVEALVKQPPDRWLSNARMTHYQALLLDTDRVQFGPVVALNPATLLPLPEEGLQHDCLDILAEAHGTRSDLMDQPLPDADHTWYTDGSSFLQEGQRKAGAAVTTETEVIWARALPAGTSAQRAELIALTQALKMAEGKKLNVYTDSRYAFATAHIHGEIYRRRGWLTSEGKEIKNKDEILALLKALFLPKRLSIIHCPGHQKGNSAEARGNRMADQAAREVATRETPETSTLLAGKRTADGSEFEKRTADGSEFESPKKKAKVE

SEQ ID NO: 2385 - protein, 2096 aa, synthetic construct
MPAAKRVKLDGGDKKYSIGLDIGTNSVGWAVITDEYKVPSKKFKVLGNTDRHSIKKNLIGALLFDSGETAEATRLKRTARRRYTRRKNRICYLQEIFSNEMAKVDDSFFHRLEESFLVEEDKKHERHPIFGNIVDEVAYHEKYPTIYHLRKKLVDSTDKADLRLIYLALAHMIKFRGHFLIEGDLNPDNSDVDKLFIQLVQTYNQLFEENPINASGVDAKAILSARLSKSRRLENLIAQLPGEKKNGLFGNLIALSLGLTPNFKSNFDLAEDAKLQLSKDTYDDDLDNLLAQIGDQYADLFLAAKNLSDAILLSDILRVNTEITKAPLSASMIKRYDEHHQDLTLLKALVRQQLPEKYKEIFFDQSKNGYAGYIDGGASQEEFYKFIKPILEKMDGTEELLVKLNREDLLRKQRTFDNGSIPHQIHLGELHAILRRQEDFYPFLKDNREKIEKILTFRIPYYVGPLARGNSRFAWMTRKSEETITPWNFEEVVDKGASAQSFIERMTNFDKNLPNEKVLPKHSLLYEYFTVYNELTKVKYVTEGMRKPAFLSGEQKKAIVDLLFKTNRKVTVKQLKEDYFKKIECFDSVEISGVEDRFNASLGTYHDLLKIIKDKDFLDNEENEDILEDIVLTLTLFEDREMIEERLKTYAHLFDDKVMKQLKRRRYTGWGRLSRKLINGIRDKQSGKTILDFLKSDGFANRNFMQLIHDDSLTFKEDIQKAQVSGQGDSLHEHIANLAGSPAIKKGILQTVKVVDELVKVMGRHKPENIVIEMARENQTTQKGQKNSRERMKRIEEGIKELGSQILKEHPVENTQLQNEKLYLYYLQNGRDMYVDQELDINRLSDYDVDHIVPQSFLKDDSIDNKVLTRSDKARGKSDNVPSEEVVKKMKNYWRQLLNAKLITQRKFDNLTKAERGGLSELDKAGFIKRQLVETRQITKHVAQILDSRMNTKYDENDKLIREVKVITLKSKLVSDFRKDFQFYKVREINNYHHAHDAYLNAVVGTALIKKYPKLESEFVYGDYKVYDVRKMIAKSEQEIGKATAKYFFYSNIMNFFKTEITLANGEIRKRPLIETNGETGEIVWDKGRDFATVRKVLSMPQVNIVKKTEVQTGGFSKESILPKRNSDKLIARKKDWDPKKYGGFDSPTVAYSVLVVAKVEKGKSKKLKSVKELLGITIMERSSFEKNPIDFLEAKGYKEVKKDLIIKLPKYSLFELENGRKRMLASAGELQKGNELALPSKYVNFLYLASHYEKLKGSPEDNEQKQLFVEQHKHYLDEIIEQISEFSKRVILADANLDKVLSAYNKHRDKPIREQAENIIHLFTLTNLGAPAAFKYFDTTIDRKRYTSTKEVLDATLIHQSITGLYETRIDLSQLGGDGGGGGEAAAKPAPGGTLNIEDEYRLHETSKEPDVSLGSTWLSDFPQAWAETGGMGLAVRQAPLIIPLKATSTPVSIKQYPMSQEARLGIKPHIQRLLDQGILVPCQSPWNTPLLPVKKPGTNDYRPVQDLREVNKRVEDIHPTVPNPYNLLSGLPPSHQWYTVLDLKDAFFCLRLHPTSQPLFAFEWRDPEMGISGQLTWTRLPQGFKNSPTLFNEALHRDLAGFRIQHPDLILLQYVDDLLLAATSELDCQQGTRALLQTLGDLGYRASAKKAQICQKQVKYLGYLLKEGQRWLTEARKETVMGQPIPKTPRQLREFLGKAGFCRLFIPGFAEMAAPLYPLTKPGTLFNWGPDQQKAFQEIKQALLTAPALGLPDLTKPFELFVDEKQGYAKGVLTQKLGPWRRPVAYLSKKLDPVAAGWPPCLRMVAAIAVLTKDAGKLTMGQPLVILAPHAVEALVKQPPDRWLSNARMTHYQALLLDTDRVQFGPVVALNPATLLPLPEEGLQHDCLDILAEAHGTRSDLMDQPLPDADHTWYTDGSSFLQEGQRKAGAAVTTETEVIWARALPAGTSAQRAELIALTQALKMAEGKKLNVYTDSRYAFATAHIHGEIYRRRGWLTSEGKEIKNKDEILALLKALFLPKRLSIIHCPGHQKGNSAEARGNRMADQAAREVATRETPETSTLLAGKRTADGSEFEKRTADGSEFESPKKKAKVE

SEQ ID NO: 2386 - protein, 2096 aa, synthetic construct
MPAAKRVKLDGGDKKYSIGLDIGTNSVGWAVITDEYKVPSKKFKVLGNTDRHSIKKNLIGALLFDSGETAEATRLKRTARRRYTRRKNRICYLQEIFSNEMAKVDDSFFHRLEESFLVEEDKKHERHPIFGNIVDEVAYHEKYPTIYHLRKKLVDSTDKADLRLIYLALAHMIKFRGHFLIEGDLNPDNSDVDKLFIQLVQTYNQLFEENPINASGVDAKAILSARLSKSRRLENLIAQLPGEKKNGLFGNLIALSLGLTPNFKSNFDLAEDAKLQLSKDTYDDDLDNLLAQIGDQYADLFLAAKNLSDAILLSDILRVNTEITKAPLSASMIKRYDEHHQDLTLLKALVRQQLPEKYKEIFFDQSKNGYAGYIDGGASQEEFYKFIKPILEKMDGTEELLVKLNREDLLRKQRTFDNGSIPHQIHLGELHAILRRQEDFYPFLKDNREKIEKILTFRIPYYVGPLARGNSRFAWMTRKSEETITPWNFEEVVDKGASAQSFIERMTNFDKNLPNEKVLPKHSLLYEYFTVYNELTKVKYVTEGMRKPAFLSGEQKKAIVDLLFKTNRKVTVKQLKEDYFKKIECFDSVEISGVEDRFNASLGTYHDLLKIIKDKDFLDNEENEDILEDIVLTLTLFEDREMIEERLKTYAHLFDDKVMKQLKRRRYTGWGRLSRKLINGIRDKQSGKTILDFLKSDGFANRNFMQLIHDDSLTFKEDIQKAQVSGQGDSLHEHIANLAGSPAIKKGILQTVKVVDELVKVMGRHKPENIVIEMARENQTTQKGQKNSRERMKRIEEGIKELGSQILKEHPVENTQLQNEKLYLYYLQNGRDMYVDQELDINRLSDYDVDHIVPQSFLKDDSIDNKVLTRSDKARGKSDNVPSEEVVKKMKNYWRQLLNAKLITQRKFDNLTKAERGGLSELDKAGFIKRQLVETRQITKHVAQILDSRMNTKYDENDKLIREVKVITLKSKLVSDFRKDFQFYKVREINNYHHAHDAYLNAVVGTALIKKYPKLESEFVYGDYKVYDVRKMIAKSEQEIGKATAKYFFYSNIMNFFKTEITLANGEIRKRPLIETNGETGEIVWDKGRDFATVRKVLSMPQVNIVKKTEVQTGGFSKESILPKRNSDKLIARKKDWDPKKYGGFDSPTVAYSVLVVAKVEKGKSKKLKSVKELLGITIMERSSFEKNPIDFLEAKGYKEVKKDLIIKLPKYSLFELENGRKRMLASAGELQKGNELALPSKYVNFLYLASHYEKLKGSPEDNEQKQLFVEQHKHYLDEIIEQISEFSKRVILADANLDKVLSAYNKHRDKPIREQAENIIHLFTLTNLGAPAAFKYFDTTIDRKRYTSTKEVLDATLIHQSITGLYETRIDLSQLGGDGGGSSGGSEAAAKGGTLNIEDEYRLHETSKEPDVSLGSTWLSDFPQAWAETGGMGLAVRQAPLIIPLKATSTPVSIKQYPMSQEARLGIKPHIQRLLDQGILVPCQSPWNTPLLPVKKPGTNDYRPVQDLREVNKRVEDIHPTVPNPYNLLSGLPPSHQWYTVLDLKDAFFCLRLHPTSQPLFAFEWRDPEMGISGQLTWTRLPQGFKNSPTLFNEALHRDLAGFRIQHPDLILLQYVDDLLLAATSELDCQQGTRALLQTLGDLGYRASAKKAQICQKQVKYLGYLLKEGQRWLTEARKETVMGQPIPKTPRQLREFLGKAGFCRLFIPGFAEMAAPLYPLTKPGTLFNWGPDQQKAFQEIKQALLTAPALGLPDLTKPFELFVDEKQGYAKGVLTQKLGPWRRPVAYLSKKLDPVAAGWPPCLRMVAAIAVLTKDAGKLTMGQPLVILAPHAVEALVKQPPDRWLSNARMTHYQALLLDTDRVQFGPVVALNPATLLPLPEEGLQHDCLDILAEAHGTRSDLMDQPLPDADHTWYTDGSSFLQEGQRKAGAAVTTETEVIWARALPAGTSAQRAELIALTQALKMAEGKKLNVYTDSRYAFATAHIHGEIYRRRGWLTSEGKEIKNKDEILALLKALFLPKRLSIIHCPGHQKGNSAEARGNRMADQAAREVATRETPETSTLLAGKRTADGSEFEKRTADGSEFESPKKKAKVE

SEQ ID NO: 2387 - protein, 2094 aa, synthetic construct
MPAAKRVKLDGGDKKYSIGLDIGTNSVGWAVITDEYKVPSKKFKVLGNTDRHSIKKNLIGALLFDSGETAEATRLKRTARRRYTRRKNRICYLQEIFSNEMAKVDDSFFHRLEESFLVEEDKKHERHPIFGNIVDEVAYHEKYPTIYHLRKKLVDSTDKADLRLIYLALAHMIKFRGHFLIEGDLNPDNSDVDKLFIQLVQTYNQLFEENPINASGVDAKAILSARLSKSRRLENLIAQLPGEKKNGLFGNLIALSLGLTPNFKSNFDLAEDAKLQLSKDTYDDDLDNLLAQIGDQYADLFLAAKNLSDAILLSDILRVNTEITKAPLSASMIKRYDEHHQDLTLLKALVRQQLPEKYKEIFFDQSKNGYAGYIDGGASQEEFYKFIKPILEKMDGTEELLVKLNREDLLRKQRTFDNGSIPHQIHLGELHAILRRQEDFYPFLKDNREKIEKILTFRIPYYVGPLARGNSRFAWMTRKSEETITPWNFEEVVDKGASAQSFIERMTNFDKNLPNEKVLPKHSLLYEYFTVYNELTKVKYVTEGMRKPAFLSGEQKKAIVDLLFKTNRKVTVKQLKEDYFKKIECFDSVEISGVEDRFNASLGTYHDLLKIIKDKDFLDNEENEDILEDIVLTLTLFEDREMIEERLKTYAHLFDDKVMKQLKRRRYTGWGRLSRKLINGIRDKQSGKTILDFLKSDGFANRNFMQLIHDDSLTFKEDIQKAQVSGQGDSLHEHIANLAGSPAIKKGILQTVKVVDELVKVMGRHKPENIVIEMARENQTTQKGQKNSRERMKRIEEGIKELGSQILKEHPVENTQLQNEKLYLYYLQNGRDMYVDQELDINRLSDYDVDHIVPQSFLKDDSIDNKVLTRSDKARGKSDNVPSEEVVKKMKNYWRQLLNAKLITQRKFDNLTKAERGGLSELDKAGFIKRQLVETRQITKHVAQILDSRMNTKYDENDKLIREVKVITLKSKLVSDFRKDFQFYKVREINNYHHAHDAYLNAVVGTALIKKYPKLESEFVYGDYKVYDVRKMIAKSEQEIGKATAKYFFYSNIMNFFKTEITLANGEIRKRPLIETNGETGEIVWDKGRDFATVRKVLSMPQVNIVKKTEVQTGGFSKESILPKRNSDKLIARKKDWDPKKYGGFDSPTVAYSVLVVAKVEKGKSKKLKSVKELLGITIMERSSFEKNPIDFLEAKGYKEVKKDLIIKLPKYSLFELENGRKRMLASAGELQKGNELALPSKYVNFLYLASHYEKLKGSPEDNEQKQLFVEQHKHYLDEIIEQISEFSKRVILADANLDKVLSAYNKHRDKPIREQAENIIHLFTLTNLGAPAAFKYFDTTIDRKRYTSTKEVLDATLIHQSITGLYETRIDLSQLGGDGGGGSPAPGSSGGTLNIEDEYRLHETSKEPDVSLGSTWLSDFPQAWAETGGMGLAVRQAPLIIPLKATSTPVSIKQYPMSQEARLGIKPHIQRLLDQGILVPCQSPWNTPLLPVKKPGTNDYRPVQDLREVNKRVEDIHPTVPNPYNLLSGLPPSHQWYTVLDLKDAFFCLRLHPTSQPLFAFEWRDPEMGISGQLTWTRLPQGFKNSPTLFNEALHRDLAGFRIQHPDLILLQYVDDLLLAATSELDCQQGTRALLQTLGDLGYRASAKKAQICQKQVKYLGYLLKEGQRWLTEARKETVMGQPIPKTPRQLREFLGKAGFCRLFIPGFAEMAAPLYPLTKPGTLFNWGPDQQKAFQEIKQALLTAPALGLPDLTKPFELFVDEKQGYAKGVLTQKLGPWRRPVAYLSKKLDPVAAGWPPCLRMVAAIAVLTKDAGKLTMGQPLVILAPHAVEALVKQPPDRWLSNARMTHYQALLLDTDRVQFGPVVALNPATLLPLPEEGLQHDCLDILAEAHGTRSDLMDQPLPDADHTWYTDGSSFLQEGQRKAGAAVTTETEVIWARALPAGTSAQRAELIALTQALKMAEGKKLNVYTDSRYAFATAHIHGEIYRRRGWLTSEGKEIKNKDEILALLKALFLPKRLSIIHCPGHQKGNSAEARGNRMADQAAREVATRETPETSTLLAGKRTADGSEFEKRTADGSEFESPKKKAKVE

SEQ ID NO: 2388 - protein, 2101 aa, synthetic construct
MPAAKRVKLDGGDKKYSIGLDIGTNSVGWAVITDEYKVPSKKFKVLGNTDRHSIKKNLIGALLFDSGETAEATRLKRTARRRYTRRKNRICYLQEIFSNEMAKVDDSFFHRLEESFLVEEDKKHERHPIFGNIVDEVAYHEKYPTIYHLRKKLVDSTDKADLRLIYLALAHMIKFRGHFLIEGDLNPDNSDVDKLFIQLVQTYNQLFEENPINASGVDAKAILSARLSKSRRLENLIAQLPGEKKNGLFGNLIALSLGLTPNFKSNFDLAEDAKLQLSKDTYDDDLDNLLAQIGDQYADLFLAAKNLSDAILLSDILRVNTEITKAPLSASMIKRYDEHHQDLTLLKALVRQQLPEKYKEIFFDQSKNGYAGYIDGGASQEEFYKFIKPILEKMDGTEELLVKLNREDLLRKQRTFDNGSIPHQIHLGELHAILRRQEDFYPFLKDNREKIEKILTFRIPYYVGPLARGNSRFAWMTRKSEETITPWNFEEVVDKGASAQSFIERMTNFDKNLPNEKVLPKHSLLYEYFTVYNELTKVKYVTEGMRKPAFLSGEQKKAIVDLLFKTNRKVTVKQLKEDYFKKIECFDSVEISGVEDRFNASLGTYHDLLKIIKDKDFLDNEENEDILEDIVLTLTLFEDREMIEERLKTYAHLFDDKVMKQLKRRRYTGWGRLSRKLINGIRDKQSGKTILDFLKSDGFANRNFMQLIHDDSLTFKEDIQKAQVSGQGDSLHEHIANLAGSPAIKKGILQTVKVVDELVKVMGRHKPENIVIEMARENQTTQKGQKNSRERMKRIEEGIKELGSQILKEHPVENTQLQNEKLYLYYLQNGRDMYVDQELDINRLSDYDVDHIVPQSFLKDDSIDNKVLTRSDKARGKSDNVPSEEVVKKMKNYWRQLLNAKLITQRKFDNLTKAERGGLSELDKAGFIKRQLVETRQITKHVAQILDSRMNTKYDENDKLIREVKVITLKSKLVSDFRKDFQFYKVREINNYHHAHDAYLNAVVGTALIKKYPKLESEFVYGDYKVYDVRKMIAKSEQEIGKATAKYFFYSNIMNFFKTEITLANGEIRKRPLIETNGETGEIVWDKGRDFATVRKVLSMPQVNIVKKTEVQTGGFSKESILPKRNSDKLIARKKDWDPKKYGGFDSPTVAYSVLVVAKVEKGKSKKLKSVKELLGITIMERSSFEKNPIDFLEAKGYKEVKKDLIIKLPKYSLFELENGRKRMLASAGELQKGNELALPSKYVNFLYLASHYEKLKGSPEDNEQKQLFVEQHKHYLDEIIEQISEFSKRVILADANLDKVLSAYNKHRDKPIREQAENIIHLFTLTNLGAPAAFKYFDTTIDRKRYTSTKEVLDATLIHQSITGLYETRIDLSQLGGDGGSGSETPGTSESATPESGGTLNIEDEYRLHETSKEPDVSLGSTWLSDFPQAWAETGGMGLAVRQAPLIIPLKATSTPVSIKQYPMSQEARLGIKPHIQRLLDQGILVPCQSPWNTPLLPVKKPGTNDYRPVQDLREVNKRVEDIHPTVPNPYNLLSGLPPSHQWYTVLDLKDAFFCLRLHPTSQPLFAFEWRDPEMGISGQLTWTRLPQGFKNSPTLFNEALHRDLAGFRIQHPDLILLQYVDDLLLAATSELDCQQGTRALLQTLGDLGYRASAKKAQICQKQVKYLGYLLKEGQRWLTEARKETVMGQPIPKTPRQLREFLGKAGFCRLFIPGFAEMAAPLYPLTKPGTLFNWGPDQQKAFQEIKQALLTAPALGLPDLTKPFELFVDEKQGYAKGVLTQKLGPWRRPVAYLSKKLDPVAAGWPPCLRMVAAIAVLTKDAGKLTMGQPLVILAPHAVEALVKQPPDRWLSNARMTHYQALLLDTDRVQFGPVVALNPATLLPLPEEGLQHDCLDILAEAHGTRSDLMDQPLPDADHTWYTDGSSFLQEGQRKAGAAVTTETEVIWARALPAGTSAQRAELIALTQALKMAEGKKLNVYTDSRYAFATAHIHGEIYRRRGWLTSEGKEIKNKDEILALLKALFLPKRLSIIHCPGHQKGNSAEARGNRMADQAAREVATRETPETSTLLAGKRTADGSEFEKRTADGSEFESPKKKAKVE

SEQ ID NO: 2389 - protein, 2091 aa, synthetic construct
MPAAKRVKLDGGDKKYSIGLDIGTNSVGWAVITDEYKVPSKKFKVLGNTDRHSIKKNLIGALLFDSGETAEATRLKRTARRRYTRRKNRICYLQEIFSNEMAKVDDSFFHRLEESFLVEEDKKHERHPIFGNIVDEVAYHEKYPTIYHLRKKLVDSTDKADLRLIYLALAHMIKFRGHFLIEGDLNPDNSDVDKLFIQLVQTYNQLFEENPINASGVDAKAILSARLSKSRRLENLIAQLPGEKKNGLFGNLIALSLGLTPNFKSNFDLAEDAKLQLSKDTYDDDLDNLLAQIGDQYADLFLAAKNLSDAILLSDILRVNTEITKAPLSASMIKRYDEHHQDLTLLKALVRQQLPEKYKEIFFDQSKNGYAGYIDGGASQEEFYKFIKPILEKMDGTEELLVKLNREDLLRKQRTFDNGSIPHQIHLGELHAILRRQEDFYPFLKDNREKIEKILTFRIPYYVGPLARGNSRFAWMTRKSEETITPWNFEEVVDKGASAQSFIERMTNFDKNLPNEKVLPKHSLLYEYFTVYNELTKVKYVTEGMRKPAFLSGEQKKAIVDLLFKTNRKVTVKQLKEDYFKKIECFDSVEISGVEDRFNASLGTYHDLLKIIKDKDFLDNEENEDILEDIVLTLTLFEDREMIEERLKTYAHLFDDKVMKQLKRRRYTGWGRLSRKLINGIRDKQSGKTILDFLKSDGFANRNFMQLIHDDSLTFKEDIQKAQVSGQGDSLHEHIANLAGSPAIKKGILQTVKVVDELVKVMGRHKPENIVIEMARENQTTQKGQKNSRERMKRIEEGIKELGSQILKEHPVENTQLQNEKLYLYYLQNGRDMYVDQELDINRLSDYDVDHIVPQSFLKDDSIDNKVLTRSDKARGKSDNVPSEEVVKKMKNYWRQLLNAKLITQRKFDNLTKAERGGLSELDKAGFIKRQLVETRQITKHVAQILDSRMNTKYDENDKLIREVKVITLKSKLVSDFRKDFQFYKVREINNYHHAHDAYLNAVVGTALIKKYPKLESEFVYGDYKVYDVRKMIAKSEQEIGKATAKYFFYSNIMNFFKTEITLANGEIRKRPLIETNGETGEIVWDKGRDFATVRKVLSMPQVNIVKKTEVQTGGFSKESILPKRNSDKLIARKKDWDPKKYGGFDSPTVAYSVLVVAKVEKGKSKKLKSVKELLGITIMERSSFEKNPIDFLEAKGYKEVKKDLIIKLPKYSLFELENGRKRMLASAGELQKGNELALPSKYVNFLYLASHYEKLKGSPEDNEQKQLFVEQHKHYLDEIIEQISEFSKRVILADANLDKVLSAYNKHRDKPIREQAENIIHLFTLTNLGAPAAFKYFDTTIDRKRYTSTKEVLDATLIHQSITGLYETRIDLSQLGGDGGGGSPAPGGTLNIEDEYRLHETSKEPDVSLGSTWLSDFPQAWAETGGMGLAVRQAPLIIPLKATSTPVSIKQYPMSQEARLGIKPHIQRLLDQGILVPCQSPWNTPLLPVKKPGTNDYRPVQDLREVNKRVEDIHPTVPNPYNLLSGLPPSHQWYTVLDLKDAFFCLRLHPTSQPLFAFEWRDPEMGISGQLTWTRLPQGFKNSPTLFNEALHRDLAGFRIQHPDLILLQYVDDLLLAATSELDCQQGTRALLQTLGDLGYRASAKKAQICQKQVKYLGYLLKEGQRWLTEARKETVMGQPIPKTPRQLREFLGKAGFCRLFIPGFAEMAAPLYPLTKPGTLFNWGPDQQKAFQEIKQALLTAPALGLPDLTKPFELFVDEKQGYAKGVLTQKLGPWRRPVAYLSKKLDPVAAGWPPCLRMVAAIAVLTKDAGKLTMGQPLVILAPHAVEALVKQPPDRWLSNARMTHYQALLLDTDRVQFGPVVALNPATLLPLPEEGLQHDCLDILAEAHGTRSDLMDQPLPDADHTWYTDGSSFLQEGQRKAGAAVTTETEVIWARALPAGTSAQRAELIALTQALKMAEGKKLNVYTDSRYAFATAHIHGEIYRRRGWLTSEGKEIKNKDEILALLKALFLPKRLSIIHCPGHQKGNSAEARGNRMADQAAREVATRETPETSTLLAGKRTADGSEFEKRTADGSEFESPKKKAKVE

SEQ ID NO: 2390 - protein, 2096 aa, synthetic construct
MPAAKRVKLDGGDKKYSIGLDIGTNSVGWAVITDEYKVPSKKFKVLGNTDRHSIKKNLIGALLFDSGETAEATRLKRTARRRYTRRKNRICYLQEIFSNEMAKVDDSFFHRLEESFLVEEDKKHERHPIFGNIVDEVAYHEKYPTIYHLRKKLVDSTDKADLRLIYLALAHMIKFRGHFLIEGDLNPDNSDVDKLFIQLVQTYNQLFEENPINASGVDAKAILSARLSKSRRLENLIAQLPGEKKNGLFGNLIALSLGLTPNFKSNFDLAEDAKLQLSKDTYDDDLDNLLAQIGDQYADLFLAAKNLSDAILLSDILRVNTEITKAPLSASMIKRYDEHHQDLTLLKALVRQQLPEKYKEIFFDQSKNGYAGYIDGGASQEEFYKFIKPILEKMDGTEELLVKLNREDLLRKQRTFDNGSIPHQIHLGELHAILRRQEDFYPFLKDNREKIEKILTFRIPYYVGPLARGNSRFAWMTRKSEETITPWNFEEVVDKGASAQSFIERMTNFDKNLPNEKVLPKHSLLYEYFTVYNELTKVKYVTEGMRKPAFLSGEQKKAIVDLLFKTNRKVTVKQLKEDYFKKIECFDSVEISGVEDRFNASLGTYHDLLKIIKDKDFLDNEENEDILEDIVLTLTLFEDREMIEERLKTYAHLFDDKVMKQLKRRRYTGWGRLSRKLINGIRDKQSGKTILDFLKSDGFANRNFMQLIHDDSLTFKEDIQKAQVSGQGDSLHEHIANLAGSPAIKKGILQTVKVVDELVKVMGRHKPENIVIEMARENQTTQKGQKNSRERMKRIEEGIKELGSQILKEHPVENTQLQNEKLYLYYLQNGRDMYVDQELDINRLSDYDVDHIVPQSFLKDDSIDNKVLTRSDKARGKSDNVPSEEVVKKMKNYWRQLLNAKLITQRKFDNLTKAERGGLSELDKAGFIKRQLVETRQITKHVAQILDSRMNTKYDENDKLIREVKVITLKSKLVSDFRKDFQFYKVREINNYHHAHDAYLNAVVGTALIKKYPKLESEFVYGDYKVYDVRKMIAKSEQEIGKATAKYFFYSNIMNFFKTEITLANGEIRKRPLIETNGETGEIVWDKGRDFATVRKVLSMPQVNIVKKTEVQTGGFSKESILPKRNSDKLIARKKDWDPKKYGGFDSPTVAYSVLVVAKVEKGKSKKLKSVKELLGITIMERSSFEKNPIDFLEAKGYKEVKKDLIIKLPKYSLFELENGRKRMLASAGELQKGNELALPSKYVNFLYLASHYEKLKGSPEDNEQKQLFVEQHKHYLDEIIEQISEFSKRVILADANLDKVLSAYNKHRDKPIREQAENIIHLFTLTNLGAPAAFKYFDTTIDRKRYTSTKEVLDATLIHQSITGLYETRIDLSQLGGDGGGSSGGGEAAAKGGTLNIEDEYRLHETSKEPDVSLGSTWLSDFPQAWAETGGMGLAVRQAPLIIPLKATSTPVSIKQYPMSQEARLGIKPHIQRLLDQGILVPCQSPWNTPLLPVKKPGTNDYRPVQDLREVNKRVEDIHPTVPNPYNLLSGLPPSHQWYTVLDLKDAFFCLRLHPTSQPLFAFEWRDPEMGISGQLTWTRLPQGFKNSPTLFNEALHRDLAGFRIQHPDLILLQYVDDLLLAATSELDCQQGTRALLQTLGDLGYRASAKKAQICQKQVKYLGYLLKEGQRWLTEARKETVMGQPIPKTPRQLREFLGKAGFCRLFIPGFAEMAAPLYPLTKPGTLFNWGPDQQKAFQEIKQALLTAPALGLPDLTKPFELFVDEKQGYAKGVLTQKLGPWRRPVAYLSKKLDPVAAGWPPCLRMVAAIAVLTKDAGKLTMGQPLVILAPHAVEALVKQPPDRWLSNARMTHYQALLLDTDRVQFGPVVALNPATLLPLPEEGLQHDCLDILAEAHGTRSDLMDQPLPDADHTWYTDGSSFLQEGQRKAGAAVTTETEVIWARALPAGTSAQRAELIALTQALKMAEGKKLNVYTDSRYAFATAHIHGEIYRRRGWLTSEGKEIKNKDEILALLKALFLPKRLSIIHCPGHQKGNSAEARGNRMADQAAREVATRETPETSTLLAGKRTADGSEFEKRTADGSEFESPKKKAKVE

SEQ ID NO: 2391 - protein, 2096 aa, synthetic construct
MPAAKRVKLDGGDKKYSIGLDIGTNSVGWAVITDEYKVPSKKFKVLGNTDRHSIKKNLIGALLFDSGETAEATRLKRTARRRYTRRKNRICYLQEIFSNEMAKVDDSFFHRLEESFLVEEDKKHERHPIFGNIVDEVAYHEKYPTIYHLRKKLVDSTDKADLRLIYLALAHMIKFRGHFLIEGDLNPDNSDVDKLFIQLVQTYNQLFEENPINASGVDAKAILSARLSKSRRLENLIAQLPGEKKNGLFGNLIALSLGLTPNFKSNFDLAEDAKLQLSKDTYDDDLDNLLAQIGDQYADLFLAAKNLSDAILLSDILRVNTEITKAPLSASMIKRYDEHHQDLTLLKALVRQQLPEKYKEIFFDQSKNGYAGYIDGGASQEEFYKFIKPILEKMDGTEELLVKLNREDLLRKQRTFDNGSIPHQIHLGELHAILRRQEDFYPFLKDNREKIEKILTFRIPYYVGPLARGNSRFAWMTRKSEETITPWNFEEVVDKGASAQSFIERMTNFDKNLPNEKVLPKHSLLYEYFTVYNELTKVKYVTEGMRKPAFLSGEQKKAIVDLLFKTNRKVTVKQLKEDYFKKIECFDSVEISGVEDRFNASLGTYHDLLKIIKDKDFLDNEENEDILEDIVLTLTLFEDREMIEERLKTYAHLFDDKVMKQLKRRRYTGWGRLSRKLINGIRDKQSGKTILDFLKSDGFANRNFMQLIHDDSLTFKEDIQKAQVSGQGDSLHEHIANLAGSPAIKKGILQTVKVVDELVKVMGRHKPENIVIEMARENQTTQKGQKNSRERMKRIEEGIKELGSQILKEHPVENTQLQNEKLYLYYLQNGRDMYVDQELDINRLSDYDVDHIVPQSFLKDDSIDNKVLTRSDKARGKSDNVPSEEVVKKMKNYWRQLLNAKLITQRKFDNLTKAERGGLSELDKAGFIKRQLVETRQITKHVAQILDSRMNTKYDENDKLIREVKVITLKSKLVSDFRKDFQFYKVREINNYHHAHDAYLNAVVGTALIKKYPKLESEFVYGDYKVYDVRKMIAKSEQEIGKATAKYFFYSNIMNFFKTEITLANGEIRKRPLIETNGETGEIVWDKGRDFATVRKVLSMPQVNIVKKTEVQTGGFSKESILPKRNSDKLIARKKDWDPKKYGGFDSPTVAYSVLVVAKVEKGKSKKLKSVKELLGITIMERSSFEKNPIDFLEAKGYKEVKKDLIIKLPKYSLFELENGRKRMLASAGELQKGNELALPSKYVNFLYLASHYEKLKGSPEDNEQKQLFVEQHKHYLDEIIEQISEFSKRVILADANLDKVLSAYNKHRDKPIREQAENIIHLFTLTNLGAPAAFKYFDTTIDRKRYTSTKEVLDATLIHQSITGLYETRIDLSQLGGDGGEAAAKGGGPAPGGTLNIEDEYRLHETSKEPDVSLGSTWLSDFPQAWAETGGMGLAVRQAPLIIPLKATSTPVSIKQYPMSQEARLGIKPHIQRLLDQGILVPCQSPWNTPLLPVKKPGTNDYRPVQDLREVNKRVEDIHPTVPNPYNLLSGLPPSHQWYTVLDLKDAFFCLRLHPTSQPLFAFEWRDPEMGISGQLTWTRLPQGFKNSPTLFNEALHRDLAGFRIQHPDLILLQYVDDLLLAATSELDCQQGTRALLQTLGDLGYRASAKKAQICQKQVKYLGYLLKEGQRWLTEARKETVMGQPIPKTPRQLREFLGKAGFCRLFIPGFAEMAAPLYPLTKPGTLFNWGPDQQKAFQEIKQALLTAPALGLPDLTKPFELFVDEKQGYAKGVLTQKLGPWRRPVAYLSKKLDPVAAGWPPCLRMVAAIAVLTKDAGKLTMGQPLVILAPHAVEALVKQPPDRWLSNARMTHYQALLLDTDRVQFGPVVALNPATLLPLPEEGLQHDCLDILAEAHGTRSDLMDQPLPDADHTWYTDGSSFLQEGQRKAGAAVTTETEVIWARALPAGTSAQRAELIALTQALKMAEGKKLNVYTDSRYAFATAHIHGEIYRRRGWLTSEGKEIKNKDEILALLKALFLPKRLSIIHCPGHQKGNSAEARGNRMADQAAREVATRETPETSTLLAGKRTADGSEFEKRTADGSEFESPKKKAKVE

SEQ ID NO: 2392 - protein, 2096 aa, synthetic construct
MPAAKRVKLDGGDKKYSIGLDIGTNSVGWAVITDEYKVPSKKFKVLGNTDRHSIKKNLIGALLFDSGETAEATRLKRTARRRYTRRKNRICYLQEIFSNEMAKVDDSFFHRLEESFLVEEDKKHERHPIFGNIVDEVAYHEKYPTIYHLRKKLVDSTDKADLRLIYLALAHMIKFRGHFLIEGDLNPDNSDVDKLFIQLVQTYNQLFEENPINASGVDAKAILSARLSKSRRLENLIAQLPGEKKNGLFGNLIALSLGLTPNFKSNFDLAEDAKLQLSKDTYDDDLDNLLAQIGDQYADLFLAAKNLSDAILLSDILRVNTEITKAPLSASMIKRYDEHHQDLTLLKALVRQQLPEKYKEIFFDQSKNGYAGYIDGGASQEEFYKFIKPILEKMDGTEELLVKLNREDLLRKQRTFDNGSIPHQIHLGELHAILRRQEDFYPFLKDNREKIEKILTFRIPYYVGPLARGNSRFAWMTRKSEETITPWNFEEVVDKGASAQSFIERMTNFDKNLPNEKVLPKHSLLYEYFTVYNELTKVKYVTEGMRKPAFLSGEQKKAIVDLLFKTNRKVTVKQLKEDYFKKIECFDSVEISGVEDRFNASLGTYHDLLKIIKDKDFLDNEENEDILEDIVLTLTLFEDREMIEERLKTYAHLFDDKVMKQLKRRRYTGWGRLSRKLINGIRDKQSGKTILDFLKSDGFANRNFMQLIHDDSLTFKEDIQKAQVSGQGDSLHEHIANLAGSPAIKKGILQTVKVVDELVKVMGRHKPENIVIEMARENQTTQKGQKNSRERMKRIEEGIKELGSQILKEHPVENTQLQNEKLYLYYLQNGRDMYVDQELDINRLSDYDVDHIVPQSFLKDDSIDNKVLTRSDKARGKSDNVPSEEVVKKMKNYWRQLLNAKLITQRKFDNLTKAERGGLSELDKAGFIKRQLVETRQITKHVAQILDSRMNTKYDENDKLIREVKVITLKSKLVSDFRKDFQFYKVREINNYHHAHDAYLNAVVGTALIKKYPKLESEFVYGDYKVYDVRKMIAKSEQEIGKATAKYFFYSNIMNFFKTEITLANGEIRKRPLIETNGETGEIVWDKGRDFATVRKVLSMPQVNIVKKTEVQTGGFSKESILPKRNSDKLIARKKDWDPKKYGGFDSPTVAYSVLVVAKVEKGKSKKLKSVKELLGITIMERSSFEKNPIDFLEAKGYKEVKKDLIIKLPKYSLFELENGRKRMLASAGELQKGNELALPSKYVNFLYLASHYEKLKGSPEDNEQKQLFVEQHKHYLDEIIEQISEFSKRVILADANLDKVLSAYNKHRDKPIREQAENIIHLFTLTNLGAPAAFKYFDTTIDRKRYTSTKEVLDATLIHQSITGLYETRIDLSQLGGDGGGGGPAPEAAAKGGTLNIEDEYRLHETSKEPDVSLGSTWLSDFPQAWAETGGMGLAVRQAPLIIPLKATSTPVSIKQYPMSQEARLGIKPHIQRLLDQGILVPCQSPWNTPLLPVKKPGTNDYRPVQDLREVNKRVEDIHPTVPNPYNLLSGLPPSHQWYTVLDLKDAFFCLRLHPTSQPLFAFEWRDPEMGISGQLTWTRLPQGFKNSPTLFNEALHRDLAGFRIQHPDLILLQYVDDLLLAATSELDCQQGTRALLQTLGDLGYRASAKKAQICQKQVKYLGYLLKEGQRWLTEARKETVMGQPIPKTPRQLREFLGKAGFCRLFIPGFAEMAAPLYPLTKPGTLFNWGPDQQKAFQEIKQALLTAPALGLPDLTKPFELFVDEKQGYAKGVLTQKLGPWRRPVAYLSKKLDPVAAGWPPCLRMVAAIAVLTKDAGKLTMGQPLVILAPHAVEALVKQPPDRWLSNARMTHYQALLLDTDRVQFGPVVALNPATLLPLPEEGLQHDCLDILAEAHGTRSDLMDQPLPDADHTWYTDGSSFLQEGQRKAGAAVTTETEVIWARALPAGTSAQRAELIALTQALKMAEGKKLNVYTDSRYAFATAHIHGEIYRRRGWLTSEGKEIKNKDEILALLKALFLPKRLSIIHCPGHQKGNSAEARGNRMADQAAREVATRETPETSTLLAGKRTADGSEFEKRTADGSEFESPKKKAKVE

SEQ ID NO: 2393 - protein, 2094 aa, synthetic construct
MPAAKRVKLDGGDKKYSIGLDIGTNSVGWAVITDEYKVPSKKFKVLGNTDRHSIKKNLIGALLFDSGETAEATRLKRTARRRYTRRKNRICYLQEIFSNEMAKVDDSFFHRLEESFLVEEDKKHERHPIFGNIVDEVAYHEKYPTIYHLRKKLVDSTDKADLRLIYLALAHMIKFRGHFLIEGDLNPDNSDVDKLFIQLVQTYNQLFEENPINASGVDAKAILSARLSKSRRLENLIAQLPGEKKNGLFGNLIALSLGLTPNFKSNFDLAEDAKLQLSKDTYDDDLDNLLAQIGDQYADLFLAAKNLSDAILLSDILRVNTEITKAPLSASMIKRYDEHHQDLTLLKALVRQQLPEKYKEIFFDQSKNGYAGYIDGGASQEEFYKFIKPILEKMDGTEELLVKLNREDLLRKQRTFDNGSIPHQIHLGELHAILRRQEDFYPFLKDNREKIEKILTFRIPYYVGPLARGNSRFAWMTRKSEETITPWNFEEVVDKGASAQSFIERMTNFDKNLPNEKVLPKHSLLYEYFTVYNELTKVKYVTEGMRKPAFLSGEQKKAIVDLLFKTNRKVTVKQLKEDYFKKIECFDSVEISGVEDRFNASLGTYHDLLKIIKDKDFLDNEENEDILEDIVLTLTLFEDREMIEERLKTYAHLFDDKVMKQLKRRRYTGWGRLSRKLINGIRDKQSGKTILDFLKSDGFANRNFMQLIHDDSLTFKEDIQKAQVSGQGDSLHEHIANLAGSPAIKKGILQTVKVVDELVKVMGRHKPENIVIEMARENQTTQKGQKNSRERMKRIEEGIKELGSQILKEHPVENTQLQNEKLYLYYLQNGRDMYVDQELDINRLSDYDVDHIVPQSFLKDDSIDNKVLTRSDKARGKSDNVPSEEVVKKMKNYWRQLLNAKLITQRKFDNLTKAERGGLSELDKAGFIKRQLVETRQITKHVAQILDSRMNTKYDENDKLIREVKVITLKSKLVSDFRKDFQFYKVREINNYHHAHDAYLNAVVGTALIKKYPKLESEFVYGDYKVYDVRKMIAKSEQEIGKATAKYFFYSNIMNFFKTEITLANGEIRKRPLIETNGETGEIVWDKGRDFATVRKVLSMPQVNIVKKTEVQTGGFSKESILPKRNSDKLIARKKDWDPKKYGGFDSPTVAYSVLVVAKVEKGKSKKLKSVKELLGITIMERSSFEKNPIDFLEAKGYKEVKKDLIIKLPKYSLFELENGRKRMLASAGELQKGNELALPSKYVNFLYLASHYEKLKGSPEDNEQKQLFVEQHKHYLDEIIEQISEFSKRVILADANLDKVLSAYNKHRDKPIREQAENIIHLFTLTNLGAPAAFKYFDTTIDRKRYTSTKEVLDATLIHQSITGLYETRIDLSQLGGDGGGSSGSSGSSGGTLNIEDEYRLHETSKEPDVSLGSTWLSDFPQAWAETGGMGLAVRQAPLIIPLKATSTPVSIKQYPMSQEARLGIKPHIQRLLDQGILVPCQSPWNTPLLPVKKPGTNDYRPVQDLREVNKRVEDIHPTVPNPYNLLSGLPPSHQWYTVLDLKDAFFCLRLHPTSQPLFAFEWRDPEMGISGQLTWTRLPQGFKNSPTLFNEALHRDLAGFRIQHPDLILLQYVDDLLLAATSELDCQQGTRALLQTLGDLGYRASAKKAQICQKQVKYLGYLLKEGQRWLTEARKETVMGQPIPKTPRQLREFLGKAGFCRLFIPGFAEMAAPLYPLTKPGTLFNWGPDQQKAFQEIKQALLTAPALGLPDLTKPFELFVDEKQGYAKGVLTQKLGPWRRPVAYLSKKLDPVAAGWPPCLRMVAAIAVLTKDAGKLTMGQPLVILAPHAVEALVKQPPDRWLSNARMTHYQALLLDTDRVQFGPVVALNPATLLPLPEEGLQHDCLDILAEAHGTRSDLMDQPLPDADHTWYTDGSSFLQEGQRKAGAAVTTETEVIWARALPAGTSAQRAELIALTQALKMAEGKKLNVYTDSRYAFATAHIHGEIYRRRGWLTSEGKEIKNKDEILALLKALFLPKRLSIIHCPGHQKGNSAEARGNRMADQAAREVATRETPETSTLLAGKRTADGSEFEKRTADGSEFESPKKKAKVE

SEQ ID NO: 2394 - protein, 2092 aa, synthetic construct
MPAAKRVKLDGGDKKYSIGLDIGTNSVGWAVITDEYKVPSKKFKVLGNTDRHSIKKNLIGALLFDSGETAEATRLKRTARRRYTRRKNRICYLQEIFSNEMAKVDDSFFHRLEESFLVEEDKKHERHPIFGNIVDEVAYHEKYPTIYHLRKKLVDSTDKADLRLIYLALAHMIKFRGHFLIEGDLNPDNSDVDKLFIQLVQTYNQLFEENPINASGVDAKAILSARLSKSRRLENLIAQLPGEKKNGLFGNLIALSLGLTPNFKSNFDLAEDAKLQLSKDTYDDDLDNLLAQIGDQYADLFLAAKNLSDAILLSDILRVNTEITKAPLSASMIKRYDEHHQDLTLLKALVRQQLPEKYKEIFFDQSKNGYAGYIDGGASQEEFYKFIKPILEKMDGTEELLVKLNREDLLRKQRTFDNGSIPHQIHLGELHAILRRQEDFYPFLKDNREKIEKILTFRIPYYVGPLARGNSRFAWMTRKSEETITPWNFEEVVDKGASAQSFIERMTNFDKNLPNEKVLPKHSLLYEYFTVYNELTKVKYVTEGMRKPAFLSGEQKKAIVDLLFKTNRKVTVKQLKEDYFKKIECFDSVEISGVEDRFNASLGTYHDLLKIIKDKDFLDNEENEDILEDIVLTLTLFEDREMIEERLKTYAHLFDDKVMKQLKRRRYTGWGRLSRKLINGIRDKQSGKTILDFLKSDGFANRNFMQLIHDDSLTFKEDIQKAQVSGQGDSLHEHIANLAGSPAIKKGILQTVKVVDELVKVMGRHKPENIVIEMARENQTTQKGQKNSRERMKRIEEGIKELGSQILKEHPVENTQLQNEKLYLYYLQNGRDMYVDQELDINRLSDYDVDHIVPQSFLKDDSIDNKVLTRSDKARGKSDNVPSEEVVKKMKNYWRQLLNAKLITQRKFDNLTKAERGGLSELDKAGFIKRQLVETRQITKHVAQILDSRMNTKYDENDKLIREVKVITLKSKLVSDFRKDFQFYKVREINNYHHAHDAYLNAVVGTALIKKYPKLESEFVYGDYKVYDVRKMIAKSEQEIGKATAKYFFYSNIMNFFKTEITLANGEIRKRPLIETNGETGEIVWDKGRDFATVRKVLSMPQVNIVKKTEVQTGGFSKESILPKRNSDKLIARKKDWDPKKYGGFDSPTVAYSVLVVAKVEKGKSKKLKSVKELLGITIMERSSFEKNPIDFLEAKGYKEVKKDLIIKLPKYSLFELENGRKRMLASAGELQKGNELALPSKYVNFLYLASHYEKLKGSPEDNEQKQLFVEQHKHYLDEIIEQISEFSKRVILADANLDKVLSAYNKHRDKPIREQAENIIHLFTLTNLGAPAAFKYFDTTIDRKRYTSTKEVLDATLIHQSITGLYETRIDLSQLGGDGGPAPAPAPGGTLNIEDEYRLHETSKEPDVSLGSTWLSDFPQAWAETGGMGLAVRQAPLIIPLKATSTPVSIKQYPMSQEARLGIKPHIQRLLDQGILVPCQSPWNTPLLPVKKPGTNDYRPVQDLREVNKRVEDIHPTVPNPYNLLSGLPPSHQWYTVLDLKDAFFCLRLHPTSQPLFAFEWRDPEMGISGQLTWTRLPQGFKNSPTLFNEALHRDLAGFRIQHPDLILLQYVDDLLLAATSELDCQQGTRALLQTLGDLGYRASAKKAQICQKQVKYLGYLLKEGQRWLTEARKETVMGQPIPKTPRQLREFLGKAGFCRLFIPGFAEMAAPLYPLTKPGTLFNWGPDQQKAFQEIKQALLTAPALGLPDLTKPFELFVDEKQGYAKGVLTQKLGPWRRPVAYLSKKLDPVAAGWPPCLRMVAAIAVLTKDAGKLTMGQPLVILAPHAVEALVKQPPDRWLSNARMTHYQALLLDTDRVQFGPVVALNPATLLPLPEEGLQHDCLDILAEAHGTRSDLMDQPLPDADHTWYTDGSSFLQEGQRKAGAAVTTETEVIWARALPAGTSAQRAELIALTQALKMAEGKKLNVYTDSRYAFATAHIHGEIYRRRGWLTSEGKEIKNKDEILALLKALFLPKRLSIIHCPGHQKGNSAEARGNRMADQAAREVATRETPETSTLLAGKRTADGSEFEKRTADGSEFESPKKKAKVE

SEQ ID NO: 2395 - protein, 2091 aa, synthetic construct
MPAAKRVKLDGGDKKYSIGLDIGTNSVGWAVITDEYKVPSKKFKVLGNTDRHSIKKNLIGALLFDSGETAEATRLKRTARRRYTRRKNRICYLQEIFSNEMAKVDDSFFHRLEESFLVEEDKKHERHPIFGNIVDEVAYHEKYPTIYHLRKKLVDSTDKADLRLIYLALAHMIKFRGHFLIEGDLNPDNSDVDKLFIQLVQTYNQLFEENPINASGVDAKAILSARLSKSRRLENLIAQLPGEKKNGLFGNLIALSLGLTPNFKSNFDLAEDAKLQLSKDTYDDDLDNLLAQIGDQYADLFLAAKNLSDAILLSDILRVNTEITKAPLSASMIKRYDEHHQDLTLLKALVRQQLPEKYKEIFFDQSKNGYAGYIDGGASQEEFYKFIKPILEKMDGTEELLVKLNREDLLRKQRTFDNGSIPHQIHLGELHAILRRQEDFYPFLKDNREKIEKILTFRIPYYVGPLARGNSRFAWMTRKSEETITPWNFEEVVDKGASAQSFIERMTNFDKNLPNEKVLPKHSLLYEYFTVYNELTKVKYVTEGMRKPAFLSGEQKKAIVDLLFKTNRKVTVKQLKEDYFKKIECFDSVEISGVEDRFNASLGTYHDLLKIIKDKDFLDNEENEDILEDIVLTLTLFEDREMIEERLKTYAHLFDDKVMKQLKRRRYTGWGRLSRKLINGIRDKQSGKTILDFLKSDGFANRNFMQLIHDDSLTFKEDIQKAQVSGQGDSLHEHIANLAGSPAIKKGILQTVKVVDELVKVMGRHKPENIVIEMARENQTTQKGQKNSRERMKRIEEGIKELGSQILKEHPVENTQLQNEKLYLYYLQNGRDMYVDQELDINRLSDYDVDHIVPQSFLKDDSIDNKVLTRSDKARGKSDNVPSEEVVKKMKNYWRQLLNAKLITQRKFDNLTKAERGGLSELDKAGFIKRQLVETRQITKHVAQILDSRMNTKYDENDKLIREVKVITLKSKLVSDFRKDFQFYKVREINNYHHAHDAYLNAVVGTALIKKYPKLESEFVYGDYKVYDVRKMIAKSEQEIGKATAKYFFYSNIMNFFKTEITLANGEIRKRPLIETNGETGEIVWDKGRDFATVRKVLSMPQVNIVKKTEVQTGGFSKESILPKRNSDKLIARKKDWDPKKYGGFDSPTVAYSVLVVAKVEKGKSKKLKSVKELLGITIMERSSFEKNPIDFLEAKGYKEVKKDLIIKLPKYSLFELENGRKRMLASAGELQKGNELALPSKYVNFLYLASHYEKLKGSPEDNEQKQLFVEQHKHYLDEIIEQISEFSKRVILADANLDKVLSAYNKHRDKPIREQAENIIHLFTLTNLGAPAAFKYFDTTIDRKRYTSTKEVLDATLIHQSITGLYETRIDLSQLGGDGGPAPGGGGGTLNIEDEYRLHETSKEPDVSLGSTWLSDFPQAWAETGGMGLAVRQAPLIIPLKATSTPVSIKQYPMSQEARLGIKPHIQRLLDQGILVPCQSPWNTPLLPVKKPGTNDYRPVQDLREVNKRVEDIHPTVPNPYNLLSGLPPSHQWYTVLDLKDAFFCLRLHPTSQPLFAFEWRDPEMGISGQLTWTRLPQGFKNSPTLFNEALHRDLAGFRIQHPDLILLQYVDDLLLAATSELDCQQGTRALLQTLGDLGYRASAKKAQICQKQVKYLGYLLKEGQRWLTEARKETVMGQPIPKTPRQLREFLGKAGFCRLFIPGFAEMAAPLYPLTKPGTLFNWGPDQQKAFQEIKQALLTAPALGLPDLTKPFELFVDEKQGYAKGVLTQKLGPWRRPVAYLSKKLDPVAAGWPPCLRMVAAIAVLTKDAGKLTMGQPLVILAPHAVEALVKQPPDRWLSNARMTHYQALLLDTDRVQFGPVVALNPATLLPLPEEGLQHDCLDILAEAHGTRSDLMDQPLPDADHTWYTDGSSFLQEGQRKAGAAVTTETEVIWARALPAGTSAQRAELIALTQALKMAEGKKLNVYTDSRYAFATAHIHGEIYRRRGWLTSEGKEIKNKDEILALLKALFLPKRLSIIHCPGHQKGNSAEARGNRMADQAAREVATRETPETSTLLAGKRTADGSEFEKRTADGSEFESPKKKAKVE

SEQ ID NO: 2396 - protein, 2097 aa, synthetic construct
MPAAKRVKLDGGDKKYSIGLDIGTNSVGWAVITDEYKVPSKKFKVLGNTDRHSIKKNLIGALLFDSGETAEATRLKRTARRRYTRRKNRICYLQEIFSNEMAKVDDSFFHRLEESFLVEEDKKHERHPIFGNIVDEVAYHEKYPTIYHLRKKLVDSTDKADLRLIYLALAHMIKFRGHFLIEGDLNPDNSDVDKLFIQLVQTYNQLFEENPINASGVDAKAILSARLSKSRRLENLIAQLPGEKKNGLFGNLIALSLGLTPNFKSNFDLAEDAKLQLSKDTYDDDLDNLLAQIGDQYADLFLAAKNLSDAILLSDILRVNTEITKAPLSASMIKRYDEHHQDLTLLKALVRQQLPEKYKEIFFDQSKNGYAGYIDGGASQEEFYKFIKPILEKMDGTEELLVKLNREDLLRKQRTFDNGSIPHQIHLGELHAILRRQEDFYPFLKDNREKIEKILTFRIPYYVGPLARGNSRFAWMTRKSEETITPWNFEEVVDKGASAQSFIERMTNFDKNLPNEKVLPKHSLLYEYFTVYNELTKVKYVTEGMRKPAFLSGEQKKAIVDLLFKTNRKVTVKQLKEDYFKKIECFDSVEISGVEDRFNASLGTYHDLLKIIKDKDFLDNEENEDILEDIVLTLTLFEDREMIEERLKTYAHLFDDKVMKQLKRRRYTGWGRLSRKLINGIRDKQSGKTILDFLKSDGFANRNFMQLIHDDSLTFKEDIQKAQVSGQGDSLHEHIANLAGSPAIKKGILQTVKVVDELVKVMGRHKPENIVIEMARENQTTQKGQKNSRERMKRIEEGIKELGSQILKEHPVENTQLQNEKLYLYYLQNGRDMYVDQELDINRLSDYDVDHIVPQSFLKDDSIDNKVLTRSDKARGKSDNVPSEEVVKKMKNYWRQLLNAKLITQRKFDNLTKAERGGLSELDKAGFIKRQLVETRQITKHVAQILDSRMNTKYDENDKLIREVKVITLKSKLVSDFRKDFQFYKVREINNYHHAHDAYLNAVVGTALIKKYPKLESEFVYGDYKVYDVRKMIAKSEQEIGKATAKYFFYSNIMNFFKTEITLANGEIRKRPLIETNGETGEIVWDKGRDFATVRKVLSMPQVNIVKKTEVQTGGFSKESILPKRNSDKLIARKKDWDPKKYGGFDSPTVAYSVLVVAKVEKGKSKKLKSVKELLGITIMERSSFEKNPIDFLEAKGYKEVKKDLIIKLPKYSLFELENGRKRMLASAGELQKGNELALPSKYVNFLYLASHYEKLKGSPEDNEQKQLFVEQHKHYLDEIIEQISEFSKRVILADANLDKVLSAYNKHRDKPIREQAENIIHLFTLTNLGAPAAFKYFDTTIDRKRYTSTKEVLDATLIHQSITGLYETRIDLSQLGGDGGGSSGSSGSSGSSGGTLNIEDEYRLHETSKEPDVSLGSTWLSDFPQAWAETGGMGLAVRQAPLIIPLKATSTPVSIKQYPMSQEARLGIKPHIQRLLDQGILVPCQSPWNTPLLPVKKPGTNDYRPVQDLREVNKRVEDIHPTVPNPYNLLSGLPPSHQWYTVLDLKDAFFCLRLHPTSQPLFAFEWRDPEMGISGQLTWTRLPQGFKNSPTLFNEALHRDLAGFRIQHPDLILLQYVDDLLLAATSELDCQQGTRALLQTLGDLGYRASAKKAQICQKQVKYLGYLLKEGQRWLTEARKETVMGQPIPKTPRQLREFLGKAGFCRLFIPGFAEMAAPLYPLTKPGTLFNWGPDQQKAFQEIKQALLTAPALGLPDLTKPFELFVDEKQGYAKGVLTQKLGPWRRPVAYLSKKLDPVAAGWPPCLRMVAAIAVLTKDAGKLTMGQPLVILAPHAVEALVKQPPDRWLSNARMTHYQALLLDTDRVQFGPVVALNPATLLPLPEEGLQHDCLDILAEAHGTRSDLMDQPLPDADHTWYTDGSSFLQEGQRKAGAAVTTETEVIWARALPAGTSAQRAELIALTQALKMAEGKKLNVYTDSRYAFATAHIHGEIYRRRGWLTSEGKEIKNKDEILALLKALFLPKRLSIIHCPGHQKGNSAEARGNRMADQAAREVATRETPETSTLLAGKRTADGSEFEKRTADGSEFESPKKKAKVE

SEQ ID NO: 2397 - protein, 2091 aa, synthetic construct
MPAAKRVKLDGGDKKYSIGLDIGTNSVGWAVITDEYKVPSKKFKVLGNTDRHSIKKNLIGALLFDSGETAEATRLKRTARRRYTRRKNRICYLQEIFSNEMAKVDDSFFHRLEESFLVEEDKKHERHPIFGNIVDEVAYHEKYPTIYHLRKKLVDSTDKADLRLIYLALAHMIKFRGHFLIEGDLNPDNSDVDKLFIQLVQTYNQLFEENPINASGVDAKAILSARLSKSRRLENLIAQLPGEKKNGLFGNLIALSLGLTPNFKSNFDLAEDAKLQLSKDTYDDDLDNLLAQIGDQYADLFLAAKNLSDAILLSDILRVNTEITKAPLSASMIKRYDEHHQDLTLLKALVRQQLPEKYKEIFFDQSKNGYAGYIDGGASQEEFYKFIKPILEKMDGTEELLVKLNREDLLRKQRTFDNGSIPHQIHLGELHAILRRQEDFYPFLKDNREKIEKILTFRIPYYVGPLARGNSRFAWMTRKSEETITPWNFEEVVDKGASAQSFIERMTNFDKNLPNEKVLPKHSLLYEYFTVYNELTKVKYVTEGMRKPAFLSGEQKKAIVDLLFKTNRKVTVKQLKEDYFKKIECFDSVEISGVEDRFNASLGTYHDLLKIIKDKDFLDNEENEDILEDIVLTLTLFEDREMIEERLKTYAHLFDDKVMKQLKRRRYTGWGRLSRKLINGIRDKQSGKTILDFLKSDGFANRNFMQLIHDDSLTFKEDIQKAQVSGQGDSLHEHIANLAGSPAIKKGILQTVKVVDELVKVMGRHKPENIVIEMARENQTTQKGQKNSRERMKRIEEGIKELGSQILKEHPVENTQLQNEKLYLYYLQNGRDMYVDQELDINRLSDYDVDHIVPQSFLKDDSIDNKVLTRSDKARGKSDNVPSEEVVKKMKNYWRQLLNAKLITQRKFDNLTKAERGGLSELDKAGFIKRQLVETRQITKHVAQILDSRMNTKYDENDKLIREVKVITLKSKLVSDFRKDFQFYKVREINNYHHAHDAYLNAVVGTALIKKYPKLESEFVYGDYKVYDVRKMIAKSEQEIGKATAKYFFYSNIMNFFKTEITLANGEIRKRPLIETNGETGEIVWDKGRDFATVRKVLSMPQVNIVKKTEVQTGGFSKESILPKRNSDKLIARKKDWDPKKYGGFDSPTVAYSVLVVAKVEKGKSKKLKSVKELLGITIMERSSFEKNPIDFLEAKGYKEVKKDLIIKLPKYSLFELENGRKRMLASAGELQKGNELALPSKYVNFLYLASHYEKLKGSPEDNEQKQLFVEQHKHYLDEIIEQISEFSKRVILADANLDKVLSAYNKHRDKPIREQAENIIHLFTLTNLGAPAAFKYFDTTIDRKRYTSTKEVLDATLIHQSITGLYETRIDLSQLGGDGGGGGGGSGGTLNIEDEYRLHETSKEPDVSLGSTWLSDFPQAWAETGGMGLAVRQAPLIIPLKATSTPVSIKQYPMSQEARLGIKPHIQRLLDQGILVPCQSPWNTPLLPVKKPGTNDYRPVQDLREVNKRVEDIHPTVPNPYNLLSGLPPSHQWYTVLDLKDAFFCLRLHPTSQPLFAFEWRDPEMGISGQLTWTRLPQGFKNSPTLFNEALHRDLAGFRIQHPDLILLQYVDDLLLAATSELDCQQGTRALLQTLGDLGYRASAKKAQICQKQVKYLGYLLKEGQRWLTEARKETVMGQPIPKTPRQLREFLGKAGFCRLFIPGFAEMAAPLYPLTKPGTLFNWGPDQQKAFQEIKQALLTAPALGLPDLTKPFELFVDEKQGYAKGVLTQKLGPWRRPVAYLSKKLDPVAAGWPPCLRMVAAIAVLTKDAGKLTMGQPLVILAPHAVEALVKQPPDRWLSNARMTHYQALLLDTDRVQFGPVVALNPATLLPLPEEGLQHDCLDILAEAHGTRSDLMDQPLPDADHTWYTDGSSFLQEGQRKAGAAVTTETEVIWARALPAGTSAQRAELIALTQALKMAEGKKLNVYTDSRYAFATAHIHGEIYRRRGWLTSEGKEIKNKDEILALLKALFLPKRLSIIHCPGHQKGNSAEARGNRMADQAAREVATRETPETSTLLAGKRTADGSEFEKRTADGSEFESPKKKAKVE

SEQ ID NO: 2398 - protein, 2091 aa, synthetic construct
MPAAKRVKLDGGDKKYSIGLDIGTNSVGWAVITDEYKVPSKKFKVLGNTDRHSIKKNLIGALLFDSGETAEATRLKRTARRRYTRRKNRICYLQEIFSNEMAKVDDSFFHRLEESFLVEEDKKHERHPIFGNIVDEVAYHEKYPTIYHLRKKLVDSTDKADLRLIYLALAHMIKFRGHFLIEGDLNPDNSDVDKLFIQLVQTYNQLFEENPINASGVDAKAILSARLSKSRRLENLIAQLPGEKKNGLFGNLIALSLGLTPNFKSNFDLAEDAKLQLSKDTYDDDLDNLLAQIGDQYADLFLAAKNLSDAILLSDILRVNTEITKAPLSASMIKRYDEHHQDLTLLKALVRQQLPEKYKEIFFDQSKNGYAGYIDGGASQEEFYKFIKPILEKMDGTEELLVKLNREDLLRKQRTFDNGSIPHQIHLGELHAILRRQEDFYPFLKDNREKIEKILTFRIPYYVGPLARGNSRFAWMTRKSEETITPWNFEEVVDKGASAQSFIERMTNFDKNLPNEKVLPKHSLLYEYFTVYNELTKVKYVTEGMRKPAFLSGEQKKAIVDLLFKTNRKVTVKQLKEDYFKKIECFDSVEISGVEDRFNASLGTYHDLLKIIKDKDFLDNEENEDILEDIVLTLTLFEDREMIEERLKTYAHLFDDKVMKQLKRRRYTGWGRLSRKLINGIRDKQSGKTILDFLKSDGFANRNFMQLIHDDSLTFKEDIQKAQVSGQGDSLHEHIANLAGSPAIKKGILQTVKVVDELVKVMGRHKPENIVIEMARENQTTQKGQKNSRERMKRIEEGIKELGSQILKEHPVENTQLQNEKLYLYYLQNGRDMYVDQELDINRLSDYDVDHIVPQSFLKDDSIDNKVLTRSDKARGKSDNVPSEEVVKKMKNYWRQLLNAKLITQRKFDNLTKAERGGLSELDKAGFIKRQLVETRQITKHVAQILDSRMNTKYDENDKLIREVKVITLKSKLVSDFRKDFQFYKVREINNYHHAHDAYLNAVVGTALIKKYPKLESEFVYGDYKVYDVRKMIAKSEQEIGKATAKYFFYSNIMNFFKTEITLANGEIRKRPLIETNGETGEIVWDKGRDFATVRKVLSMPQVNIVKKTEVQTGGFSKESILPKRNSDKLIARKKDWDPKKYGGFDSPTVAYSVLVVAKVEKGKSKKLKSVKELLGITIMERSSFEKNPIDFLEAKGYKEVKKDLIIKLPKYSLFELENGRKRMLASAGELQKGNELALPSKYVNFLYLASHYEKLKGSPEDNEQKQLFVEQHKHYLDEIIEQISEFSKRVILADANLDKVLSAYNKHRDKPIREQAENIIHLFTLTNLGAPAAFKYFDTTIDRKRYTSTKEVLDATLIHQSITGLYETRIDLSQLGGDGGGGSGGSGGTLNIEDEYRLHETSKEPDVSLGSTWLSDFPQAWAETGGMGLAVRQAPLIIPLKATSTPVSIKQYPMSQEARLGIKPHIQRLLDQGILVPCQSPWNTPLLPVKKPGTNDYRPVQDLREVNKRVEDIHPTVPNPYNLLSGLPPSHQWYTVLDLKDAFFCLRLHPTSQPLFAFEWRDPEMGISGQLTWTRLPQGFKNSPTLFNEALHRDLAGFRIQHPDLILLQYVDDLLLAATSELDCQQGTRALLQTLGDLGYRASAKKAQICQKQVKYLGYLLKEGQRWLTEARKETVMGQPIPKTPRQLREFLGKAGFCRLFIPGFAEMAAPLYPLTKPGTLFNWGPDQQKAFQEIKQALLTAPALGLPDLTKPFELFVDEKQGYAKGVLTQKLGPWRRPVAYLSKKLDPVAAGWPPCLRMVAAIAVLTKDAGKLTMGQPLVILAPHAVEALVKQPPDRWLSNARMTHYQALLLDTDRVQFGPVVALNPATLLPLPEEGLQHDCLDILAEAHGTRSDLMDQPLPDADHTWYTDGSSFLQEGQRKAGAAVTTETEVIWARALPAGTSAQRAELIALTQALKMAEGKKLNVYTDSRYAFATAHIHGEIYRRRGWLTSEGKEIKNKDEILALLKALFLPKRLSIIHCPGHQKGNSAEARGNRMADQAAREVATRETPETSTLLAGKRTADGSEFEKRTADGSEFESPKKKAKVE

SEQ ID NO: 2399 - protein, 2094 aa, synthetic construct
MPAAKRVKLDGGDKKYSIGLDIGTNSVGWAVITDEYKVPSKKFKVLGNTDRHSIKKNLIGALLFDSGETAEATRLKRTARRRYTRRKNRICYLQEIFSNEMAKVDDSFFHRLEESFLVEEDKKHERHPIFGNIVDEVAYHEKYPTIYHLRKKLVDSTDKADLRLIYLALAHMIKFRGHFLIEGDLNPDNSDVDKLFIQLVQTYNQLFEENPINASGVDAKAILSARLSKSRRLENLIAQLPGEKKNGLFGNLIALSLGLTPNFKSNFDLAEDAKLQLSKDTYDDDLDNLLAQIGDQYADLFLAAKNLSDAILLSDILRVNTEITKAPLSASMIKRYDEHHQDLTLLKALVRQQLPEKYKEIFFDQSKNGYAGYIDGGASQEEFYKFIKPILEKMDGTEELLVKLNREDLLRKQRTFDNGSIPHQIHLGELHAILRRQEDFYPFLKDNREKIEKILTFRIPYYVGPLARGNSRFAWMTRKSEETITPWNFEEVVDKGASAQSFIERMTNFDKNLPNEKVLPKHSLLYEYFTVYNELTKVKYVTEGMRKPAFLSGEQKKAIVDLLFKTNRKVTVKQLKEDYFKKIECFDSVEISGVEDRFNASLGTYHDLLKIIKDKDFLDNEENEDILEDIVLTLTLFEDREMIEERLKTYAHLFDDKVMKQLKRRRYTGWGRLSRKLINGIRDKQSGKTILDFLKSDGFANRNFMQLIHDDSLTFKEDIQKAQVSGQGDSLHEHIANLAGSPAIKKGILQTVKVVDELVKVMGRHKPENIVIEMARENQTTQKGQKNSRERMKRIEEGIKELGSQILKEHPVENTQLQNEKLYLYYLQNGRDMYVDQELDINRLSDYDVDHIVPQSFLKDDSIDNKVLTRSDKARGKSDNVPSEEVVKKMKNYWRQLLNAKLITQRKFDNLTKAERGGLSELDKAGFIKRQLVETRQITKHVAQILDSRMNTKYDENDKLIREVKVITLKSKLVSDFRKDFQFYKVREINNYHHAHDAYLNAVVGTALIKKYPKLESEFVYGDYKVYDVRKMIAKSEQEIGKATAKYFFYSNIMNFFKTEITLANGEIRKRPLIETNGETGEIVWDKGRDFATVRKVLSMPQVNIVKKTEVQTGGFSKESILPKRNSDKLIARKKDWDPKKYGGFDSPTVAYSVLVVAKVEKGKSKKLKSVKELLGITIMERSSFEKNPIDFLEAKGYKEVKKDLIIKLPKYSLFELENGRKRMLASAGELQKGNELALPSKYVNFLYLASHYEKLKGSPEDNEQKQLFVEQHKHYLDEIIEQISEFSKRVILADANLDKVLSAYNKHRDKPIREQAENIIHLFTLTNLGAPAAFKYFDTTIDRKRYTSTKEVLDATLIHQSITGLYETRIDLSQLGGDGGGSSGGSPAPGGTLNIEDEYRLHETSKEPDVSLGSTWLSDFPQAWAETGGMGLAVRQAPLIIPLKATSTPVSIKQYPMSQEARLGIKPHIQRLLDQGILVPCQSPWNTPLLPVKKPGTNDYRPVQDLREVNKRVEDIHPTVPNPYNLLSGLPPSHQWYTVLDLKDAFFCLRLHPTSQPLFAFEWRDPEMGISGQLTWTRLPQGFKNSPTLFNEALHRDLAGFRIQHPDLILLQYVDDLLLAATSELDCQQGTRALLQTLGDLGYRASAKKAQICQKQVKYLGYLLKEGQRWLTEARKETVMGQPIPKTPRQLREFLGKAGFCRLFIPGFAEMAAPLYPLTKPGTLFNWGPDQQKAFQEIKQALLTAPALGLPDLTKPFELFVDEKQGYAKGVLTQKLGPWRRPVAYLSKKLDPVAAGWPPCLRMVAAIAVLTKDAGKLTMGQPLVILAPHAVEALVKQPPDRWLSNARMTHYQALLLDTDRVQFGPVVALNPATLLPLPEEGLQHDCLDILAEAHGTRSDLMDQPLPDADHTWYTDGSSFLQEGQRKAGAAVTTETEVIWARALPAGTSAQRAELIALTQALKMAEGKKLNVYTDSRYAFATAHIHGEIYRRRGWLTSEGKEIKNKDEILALLKALFLPKRLSIIHCPGHQKGNSAEARGNRMADQAAREVATRETPETSTLLAGKRTADGSEFEKRTADGSEFESPKKKAKVE

SEQ ID NO: 2400 - protein, 2096 aa, synthetic construct
MPAAKRVKLDGGDKKYSIGLDIGTNSVGWAVITDEYKVPSKKFKVLGNTDRHSIKKNLIGALLFDSGETAEATRLKRTARRRYTRRKNRICYLQEIFSNEMAKVDDSFFHRLEESFLVEEDKKHERHPIFGNIVDEVAYHEKYPTIYHLRKKLVDSTDKADLRLIYLALAHMIKFRGHFLIEGDLNPDNSDVDKLFIQLVQTYNQLFEENPINASGVDAKAILSARLSKSRRLENLIAQLPGEKKNGLFGNLIALSLGLTPNFKSNFDLAEDAKLQLSKDTYDDDLDNLLAQIGDQYADLFLAAKNLSDAILLSDILRVNTEITKAPLSASMIKRYDEHHQDLTLLKALVRQQLPEKYKEIFFDQSKNGYAGYIDGGASQEEFYKFIKPILEKMDGTEELLVKLNREDLLRKQRTFDNGSIPHQIHLGELHAILRRQEDFYPFLKDNREKIEKILTFRIPYYVGPLARGNSRFAWMTRKSEETITPWNFEEVVDKGASAQSFIERMTNFDKNLPNEKVLPKHSLLYEYFTVYNELTKVKYVTEGMRKPAFLSGEQKKAIVDLLFKTNRKVTVKQLKEDYFKKIECFDSVEISGVEDRFNASLGTYHDLLKIIKDKDFLDNEENEDILEDIVLTLTLFEDREMIEERLKTYAHLFDDKVMKQLKRRRYTGWGRLSRKLINGIRDKQSGKTILDFLKSDGFANRNFMQLIHDDSLTFKEDIQKAQVSGQGDSLHEHIANLAGSPAIKKGILQTVKVVDELVKVMGRHKPENIVIEMARENQTTQKGQKNSRERMKRIEEGIKELGSQILKEHPVENTQLQNEKLYLYYLQNGRDMYVDQELDINRLSDYDVDHIVPQSFLKDDSIDNKVLTRSDKARGKSDNVPSEEVVKKMKNYWRQLLNAKLITQRKFDNLTKAERGGLSELDKAGFIKRQLVETRQITKHVAQILDSRMNTKYDENDKLIREVKVITLKSKLVSDFRKDFQFYKVREINNYHHAHDAYLNAVVGTALIKKYPKLESEFVYGDYKVYDVRKMIAKSEQEIGKATAKYFFYSNIMNFFKTEITLANGEIRKRPLIETNGETGEIVWDKGRDFATVRKVLSMPQVNIVKKTEVQTGGFSKESILPKRNSDKLIARKKDWDPKKYGGFDSPTVAYSVLVVAKVEKGKSKKLKSVKELLGITIMERSSFEKNPIDFLEAKGYKEVKKDLIIKLPKYSLFELENGRKRMLASAGELQKGNELALPSKYVNFLYLASHYEKLKGSPEDNEQKQLFVEQHKHYLDEIIEQISEFSKRVILADANLDKVLSAYNKHRDKPIREQAENIIHLFTLTNLGAPAAFKYFDTTIDRKRYTSTKEVLDATLIHQSITGLYETRIDLSQLGGDGGPAPEAAAKGGGGGTLNIEDEYRLHETSKEPDVSLGSTWLSDFPQAWAETGGMGLAVRQAPLIIPLKATSTPVSIKQYPMSQEARLGIKPHIQRLLDQGILVPCQSPWNTPLLPVKKPGTNDYRPVQDLREVNKRVEDIHPTVPNPYNLLSGLPPSHQWYTVLDLKDAFFCLRLHPTSQPLFAFEWRDPEMGISGQLTWTRLPQGFKNSPTLFNEALHRDLAGFRIQHPDLILLQYVDDLLLAATSELDCQQGTRALLQTLGDLGYRASAKKAQICQKQVKYLGYLLKEGQRWLTEARKETVMGQPIPKTPRQLREFLGKAGFCRLFIPGFAEMAAPLYPLTKPGTLFNWGPDQQKAFQEIKQALLTAPALGLPDLTKPFELFVDEKQGYAKGVLTQKLGPWRRPVAYLSKKLDPVAAGWPPCLRMVAAIAVLTKDAGKLTMGQPLVILAPHAVEALVKQPPDRWLSNARMTHYQALLLDTDRVQFGPVVALNPATLLPLPEEGLQHDCLDILAEAHGTRSDLMDQPLPDADHTWYTDGSSFLQEGQRKAGAAVTTETEVIWARALPAGTSAQRAELIALTQALKMAEGKKLNVYTDSRYAFATAHIHGEIYRRRGWLTSEGKEIKNKDEILALLKALFLPKRLSIIHCPGHQKGNSAEARGNRMADQAAREVATRETPETSTLLAGKRTADGSEFEKRTADGSEFESPKKKAKVE

SEQ ID NO: 2401 - protein, 2094 aa, synthetic construct
MPAAKRVKLDGGDKKYSIGLDIGTNSVGWAVITDEYKVPSKKFKVLGNTDRHSIKKNLIGALLFDSGETAEATRLKRTARRRYTRRKNRICYLQEIFSNEMAKVDDSFFHRLEESFLVEEDKKHERHPIFGNIVDEVAYHEKYPTIYHLRKKLVDSTDKADLRLIYLALAHMIKFRGHFLIEGDLNPDNSDVDKLFIQLVQTYNQLFEENPINASGVDAKAILSARLSKSRRLENLIAQLPGEKKNGLFGNLIALSLGLTPNFKSNFDLAEDAKLQLSKDTYDDDLDNLLAQIGDQYADLFLAAKNLSDAILLSDILRVNTEITKAPLSASMIKRYDEHHQDLTLLKALVRQQLPEKYKEIFFDQSKNGYAGYIDGGASQEEFYKFIKPILEKMDGTEELLVKLNREDLLRKQRTFDNGSIPHQIHLGELHAILRRQEDFYPFLKDNREKIEKILTFRIPYYVGPLARGNSRFAWMTRKSEETITPWNFEEVVDKGASAQSFIERMTNFDKNLPNEKVLPKHSLLYEYFTVYNELTKVKYVTEGMRKPAFLSGEQKKAIVDLLFKTNRKVTVKQLKEDYFKKIECFDSVEISGVEDRFNASLGTYHDLLKIIKDKDFLDNEENEDILEDIVLTLTLFEDREMIEERLKTYAHLFDDKVMKQLKRRRYTGWGRLSRKLINGIRDKQSGKTILDFLKSDGFANRNFMQLIHDDSLTFKEDIQKAQVSGQGDSLHEHIANLAGSPAIKKGILQTVKVVDELVKVMGRHKPENIVIEMARENQTTQKGQKNSRERMKRIEEGIKELGSQILKEHPVENTQLQNEKLYLYYLQNGRDMYVDQELDINRLSDYDVDHIVPQSFLKDDSIDNKVLTRSDKARGKSDNVPSEEVVKKMKNYWRQLLNAKLITQRKFDNLTKAERGGLSELDKAGFIKRQLVETRQITKHVAQILDSRMNTKYDENDKLIREVKVITLKSKLVSDFRKDFQFYKVREINNYHHAHDAYLNAVVGTALIKKYPKLESEFVYGDYKVYDVRKMIAKSEQEIGKATAKYFFYSNIMNFFKTEITLANGEIRKRPLIETNGETGEIVWDKGRDFATVRKVLSMPQVNIVKKTEVQTGGFSKESILPKRNSDKLIARKKDWDPKKYGGFDSPTVAYSVLVVAKVEKGKSKKLKSVKELLGITIMERSSFEKNPIDFLEAKGYKEVKKDLIIKLPKYSLFELENGRKRMLASAGELQKGNELALPSKYVNFLYLASHYEKLKGSPEDNEQKQLFVEQHKHYLDEIIEQISEFSKRVILADANLDKVLSAYNKHRDKPIREQAENIIHLFTLTNLGAPAAFKYFDTTIDRKRYTSTKEVLDATLIHQSITGLYETRIDLSQLGGDGGPAPGGGGGSGGTLNIEDEYRLHETSKEPDVSLGSTWLSDFPQAWAETGGMGLAVRQAPLIIPLKATSTPVSIKQYPMSQEARLGIKPHIQRLLDQGILVPCQSPWNTPLLPVKKPGTNDYRPVQDLREVNKRVEDIHPTVPNPYNLLSGLPPSHQWYTVLDLKDAFFCLRLHPTSQPLFAFEWRDPEMGISGQLTWTRLPQGFKNSPTLFNEALHRDLAGFRIQHPDLILLQYVDDLLLAATSELDCQQGTRALLQTLGDLGYRASAKKAQICQKQVKYLGYLLKEGQRWLTEARKETVMGQPIPKTPRQLREFLGKAGFCRLFIPGFAEMAAPLYPLTKPGTLFNWGPDQQKAFQEIKQALLTAPALGLPDLTKPFELFVDEKQGYAKGVLTQKLGPWRRPVAYLSKKLDPVAAGWPPCLRMVAAIAVLTKDAGKLTMGQPLVILAPHAVEALVKQPPDRWLSNARMTHYQALLLDTDRVQFGPVVALNPATLLPLPEEGLQHDCLDILAEAHGTRSDLMDQPLPDADHTWYTDGSSFLQEGQRKAGAAVTTETEVIWARALPAGTSAQRAELIALTQALKMAEGKKLNVYTDSRYAFATAHIHGEIYRRRGWLTSEGKEIKNKDEILALLKALFLPKRLSIIHCPGHQKGNSAEARGNRMADQAAREVATRETPETSTLLAGKRTADGSEFEKRTADGSEFESPKKKAKVE

SEQ ID NO: 2402 - protein, 2094 aa, synthetic construct
MPAAKRVKLDGGDKKYSIGLDIGTNSVGWAVITDEYKVPSKKFKVLGNTDRHSIKKNLIGALLFDSGETAEATRLKRTARRRYTRRKNRICYLQEIFSNEMAKVDDSFFHRLEESFLVEEDKKHERHPIFGNIVDEVAYHEKYPTIYHLRKKLVDSTDKADLRLIYLALAHMIKFRGHFLIEGDLNPDNSDVDKLFIQLVQTYNQLFEENPINASGVDAKAILSARLSKSRRLENLIAQLPGEKKNGLFGNLIALSLGLTPNFKSNFDLAEDAKLQLSKDTYDDDLDNLLAQIGDQYADLFLAAKNLSDAILLSDILRVNTEITKAPLSASMIKRYDEHHQDLTLLKALVRQQLPEKYKEIFFDQSKNGYAGYIDGGASQEEFYKFIKPILEKMDGTEELLVKLNREDLLRKQRTFDNGSIPHQIHLGELHAILRRQEDFYPFLKDNREKIEKILTFRIPYYVGPLARGNSRFAWMTRKSEETITPWNFEEVVDKGASAQSFIERMTNFDKNLPNEKVLPKHSLLYEYFTVYNELTKVKYVTEGMRKPAFLSGEQKKAIVDLLFKTNRKVTVKQLKEDYFKKIECFDSVEISGVEDRFNASLGTYHDLLKIIKDKDFLDNEENEDILEDIVLTLTLFEDREMIEERLKTYAHLFDDKVMKQLKRRRYTGWGRLSRKLINGIRDKQSGKTILDFLKSDGFANRNFMQLIHDDSLTFKEDIQKAQVSGQGDSLHEHIANLAGSPAIKKGILQTVKVVDELVKVMGRHKPENIVIEMARENQTTQKGQKNSRERMKRIEEGIKELGSQILKEHPVENTQLQNEKLYLYYLQNGRDMYVDQELDINRLSDYDVDHIVPQSFLKDDSIDNKVLTRSDKARGKSDNVPSEEVVKKMKNYWRQLLNAKLITQRKFDNLTKAERGGLSELDKAGFIKRQLVETRQITKHVAQILDSRMNTKYDENDKLIREVKVITLKSKLVSDFRKDFQFYKVREINNYHHAHDAYLNAVVGTALIKKYPKLESEFVYGDYKVYDVRKMIAKSEQEIGKATAKYFFYSNIMNFFKTEITLANGEIRKRPLIETNGETGEIVWDKGRDFATVRKVLSMPQVNIVKKTEVQTGGFSKESILPKRNSDKLIARKKDWDPKKYGGFDSPTVAYSVLVVAKVEKGKSKKLKSVKELLGITIMERSSFEKNPIDFLEAKGYKEVKKDLIIKLPKYSLFELENGRKRMLASAGELQKGNELALPSKYVNFLYLASHYEKLKGSPEDNEQKQLFVEQHKHYLDEIIEQISEFSKRVILADANLDKVLSAYNKHRDKPIREQAENIIHLFTLTNLGAPAAFKYFDTTIDRKRYTSTKEVLDATLIHQSITGLYETRIDLSQLGGDGGGSSGGGPAPGGTLNIEDEYRLHETSKEPDVSLGSTWLSDFPQAWAETGGMGLAVRQAPLIIPLKATSTPVSIKQYPMSQEARLGIKPHIQRLLDQGILVPCQSPWNTPLLPVKKPGTNDYRPVQDLREVNKRVEDIHPTVPNPYNLLSGLPPSHQWYTVLDLKDAFFCLRLHPTSQPLFAFEWRDPEMGISGQLTWTRLPQGFKNSPTLFNEALHRDLAGFRIQHPDLILLQYVDDLLLAATSELDCQQGTRALLQTLGDLGYRASAKKAQICQKQVKYLGYLLKEGQRWLTEARKETVMGQPIPKTPRQLREFLGKAGFCRLFIPGFAEMAAPLYPLTKPGTLFNWGPDQQKAFQEIKQALLTAPALGLPDLTKPFELFVDEKQGYAKGVLTQKLGPWRRPVAYLSKKLDPVAAGWPPCLRMVAAIAVLTKDAGKLTMGQPLVILAPHAVEALVKQPPDRWLSNARMTHYQALLLDTDRVQFGPVVALNPATLLPLPEEGLQHDCLDILAEAHGTRSDLMDQPLPDADHTWYTDGSSFLQEGQRKAGAAVTTETEVIWARALPAGTSAQRAELIALTQALKMAEGKKLNVYTDSRYAFATAHIHGEIYRRRGWLTSEGKEIKNKDEILALLKALFLPKRLSIIHCPGHQKGNSAEARGNRMADQAAREVATRETPETSTLLAGKRTADGSEFEKRTADGSEFESPKKKAKVE

SEQ ID NO: 2403 - protein, 2094 aa, synthetic construct
MPAAKRVKLDGGDKKYSIGLDIGTNSVGWAVITDEYKVPSKKFKVLGNTDRHSIKKNLIGALLFDSGETAEATRLKRTARRRYTRRKNRICYLQEIFSNEMAKVDDSFFHRLEESFLVEEDKKHERHPIFGNIVDEVAYHEKYPTIYHLRKKLVDSTDKADLRLIYLALAHMIKFRGHFLIEGDLNPDNSDVDKLFIQLVQTYNQLFEENPINASGVDAKAILSARLSKSRRLENLIAQLPGEKKNGLFGNLIALSLGLTPNFKSNFDLAEDAKLQLSKDTYDDDLDNLLAQIGDQYADLFLAAKNLSDAILLSDILRVNTEITKAPLSASMIKRYDEHHQDLTLLKALVRQQLPEKYKEIFFDQSKNGYAGYIDGGASQEEFYKFIKPILEKMDGTEELLVKLNREDLLRKQRTFDNGSIPHQIHLGELHAILRRQEDFYPFLKDNREKIEKILTFRIPYYVGPLARGNSRFAWMTRKSEETITPWNFEEVVDKGASAQSFIERMTNFDKNLPNEKVLPKHSLLYEYFTVYNELTKVKYVTEGMRKPAFLSGEQKKAIVDLLFKTNRKVTVKQLKEDYFKKIECFDSVEISGVEDRFNASLGTYHDLLKIIKDKDFLDNEENEDILEDIVLTLTLFEDREMIEERLKTYAHLFDDKVMKQLKRRRYTGWGRLSRKLINGIRDKQSGKTILDFLKSDGFANRNFMQLIHDDSLTFKEDIQKAQVSGQGDSLHEHIANLAGSPAIKKGILQTVKVVDELVKVMGRHKPENIVIEMARENQTTQKGQKNSRERMKRIEEGIKELGSQILKEHPVENTQLQNEKLYLYYLQNGRDMYVDQELDINRLSDYDVDHIVPQSFLKDDSIDNKVLTRSDKARGKSDNVPSEEVVKKMKNYWRQLLNAKLITQRKFDNLTKAERGGLSELDKAGFIKRQLVETRQITKHVAQILDSRMNTKYDENDKLIREVKVITLKSKLVSDFRKDFQFYKVREINNYHHAHDAYLNAVVGTALIKKYPKLESEFVYGDYKVYDVRKMIAKSEQEIGKATAKYFFYSNIMNFFKTEITLANGEIRKRPLIETNGETGEIVWDKGRDFATVRKVLSMPQVNIVKKTEVQTGGFSKESILPKRNSDKLIARKKDWDPKKYGGFDSPTVAYSVLVVAKVEKGKSKKLKSVKELLGITIMERSSFEKNPIDFLEAKGYKEVKKDLIIKLPKYSLFELENGRKRMLASAGELQKGNELALPSKYVNFLYLASHYEKLKGSPEDNEQKQLFVEQHKHYLDEIIEQISEFSKRVILADANLDKVLSAYNKHRDKPIREQAENIIHLFTLTNLGAPAAFKYFDTTIDRKRYTSTKEVLDATLIHQSITGLYETRIDLSQLGGDGGPAPGGSGGGGGTLNIEDEYRLHETSKEPDVSLGSTWLSDFPQAWAETGGMGLAVRQAPLIIPLKATSTPVSIKQYPMSQEARLGIKPHIQRLLDQGILVPCQSPWNTPLLPVKKPGTNDYRPVQDLREVNKRVEDIHPTVPNPYNLLSGLPPSHQWYTVLDLKDAFFCLRLHPTSQPLFAFEWRDPEMGISGQLTWTRLPQGFKNSPTLFNEALHRDLAGFRIQHPDLILLQYVDDLLLAATSELDCQQGTRALLQTLGDLGYRASAKKAQICQKQVKYLGYLLKEGQRWLTEARKETVMGQPIPKTPRQLREFLGKAGFCRLFIPGFAEMAAPLYPLTKPGTLFNWGPDQQKAFQEIKQALLTAPALGLPDLTKPFELFVDEKQGYAKGVLTQKLGPWRRPVAYLSKKLDPVAAGWPPCLRMVAAIAVLTKDAGKLTMGQPLVILAPHAVEALVKQPPDRWLSNARMTHYQALLLDTDRVQFGPVVALNPATLLPLPEEGLQHDCLDILAEAHGTRSDLMDQPLPDADHTWYTDGSSFLQEGQRKAGAAVTTETEVIWARALPAGTSAQRAELIALTQALKMAEGKKLNVYTDSRYAFATAHIHGEIYRRRGWLTSEGKEIKNKDEILALLKALFLPKRLSIIHCPGHQKGNSAEARGNRMADQAAREVATRETPETSTLLAGKRTADGSEFEKRTADGSEFESPKKKAKVE

SEQ ID NO: 2404 - protein, 2096 aa, synthetic construct
MPAAKRVKLDGGDKKYSIGLDIGTNSVGWAVITDEYKVPSKKFKVLGNTDRHSIKKNLIGALLFDSGETAEATRLKRTARRRYTRRKNRICYLQEIFSNEMAKVDDSFFHRLEESFLVEEDKKHERHPIFGNIVDEVAYHEKYPTIYHLRKKLVDSTDKADLRLIYLALAHMIKFRGHFLIEGDLNPDNSDVDKLFIQLVQTYNQLFEENPINASGVDAKAILSARLSKSRRLENLIAQLPGEKKNGLFGNLIALSLGLTPNFKSNFDLAEDAKLQLSKDTYDDDLDNLLAQIGDQYADLFLAAKNLSDAILLSDILRVNTEITKAPLSASMIKRYDEHHQDLTLLKALVRQQLPEKYKEIFFDQSKNGYAGYIDGGASQEEFYKFIKPILEKMDGTEELLVKLNREDLLRKQRTFDNGSIPHQIHLGELHAILRRQEDFYPFLKDNREKIEKILTFRIPYYVGPLARGNSRFAWMTRKSEETITPWNFEEVVDKGASAQSFIERMTNFDKNLPNEKVLPKHSLLYEYFTVYNELTKVKYVTEGMRKPAFLSGEQKKAIVDLLFKTNRKVTVKQLKEDYFKKIECFDSVEISGVEDRFNASLGTYHDLLKIIKDKDFLDNEENEDILEDIVLTLTLFEDREMIEERLKTYAHLFDDKVMKQLKRRRYTGWGRLSRKLINGIRDKQSGKTILDFLKSDGFANRNFMQLIHDDSLTFKEDIQKAQVSGQGDSLHEHIANLAGSPAIKKGILQTVKVVDELVKVMGRHKPENIVIEMARENQTTQKGQKNSRERMKRIEEGIKELGSQILKEHPVENTQLQNEKLYLYYLQNGRDMYVDQELDINRLSDYDVDHIVPQSFLKDDSIDNKVLTRSDKARGKSDNVPSEEVVKKMKNYWRQLLNAKLITQRKFDNLTKAERGGLSELDKAGFIKRQLVETRQITKHVAQILDSRMNTKYDENDKLIREVKVITLKSKLVSDFRKDFQFYKVREINNYHHAHDAYLNAVVGTALIKKYPKLESEFVYGDYKVYDVRKMIAKSEQEIGKATAKYFFYSNIMNFFKTEITLANGEIRKRPLIETNGETGEIVWDKGRDFATVRKVLSMPQVNIVKKTEVQTGGFSKESILPKRNSDKLIARKKDWDPKKYGGFDSPTVAYSVLVVAKVEKGKSKKLKSVKELLGITIMERSSFEKNPIDFLEAKGYKEVKKDLIIKLPKYSLFELENGRKRMLASAGELQKGNELALPSKYVNFLYLASHYEKLKGSPEDNEQKQLFVEQHKHYLDEIIEQISEFSKRVILADANLDKVLSAYNKHRDKPIREQAENIIHLFTLTNLGAPAAFKYFDTTIDRKRYTSTKEVLDATLIHQSITGLYETRIDLSQLGGDGGGGSGSSEAAAKGGTLNIEDEYRLHETSKEPDVSLGSTWLSDFPQAWAETGGMGLAVRQAPLIIPLKATSTPVSIKQYPMSQEARLGIKPHIQRLLDQGILVPCQSPWNTPLLPVKKPGTNDYRPVQDLREVNKRVEDIHPTVPNPYNLLSGLPPSHQWYTVLDLKDAFFCLRLHPTSQPLFAFEWRDPEMGISGQLTWTRLPQGFKNSPTLFNEALHRDLAGFRIQHPDLILLQYVDDLLLAATSELDCQQGTRALLQTLGDLGYRASAKKAQICQKQVKYLGYLLKEGQRWLTEARKETVMGQPIPKTPRQLREFLGKAGFCRLFIPGFAEMAAPLYPLTKPGTLFNWGPDQQKAFQEIKQALLTAPALGLPDLTKPFELFVDEKQGYAKGVLTQKLGPWRRPVAYLSKKLDPVAAGWPPCLRMVAAIAVLTKDAGKLTMGQPLVILAPHAVEALVKQPPDRWLSNARMTHYQALLLDTDRVQFGPVVALNPATLLPLPEEGLQHDCLDILAEAHGTRSDLMDQPLPDADHTWYTDGSSFLQEGQRKAGAAVTTETEVIWARALPAGTSAQRAELIALTQALKMAEGKKLNVYTDSRYAFATAHIHGEIYRRRGWLTSEGKEIKNKDEILALLKALFLPKRLSIIHCPGHQKGNSAEARGNRMADQAAREVATRETPETSTLLAGKRTADGSEFEKRTADGSEFESPKKKAKVE

SEQ ID NO: 2405 - protein, 2100 aa, synthetic construct
MPAAKRVKLDGGDKKYSIGLDIGTNSVGWAVITDEYKVPSKKFKVLGNTDRHSIKKNLIGALLFDSGETAEATRLKRTARRRYTRRKNRICYLQEIFSNEMAKVDDSFFHRLEESFLVEEDKKHERHPIFGNIVDEVAYHEKYPTIYHLRKKLVDSTDKADLRLIYLALAHMIKFRGHFLIEGDLNPDNSDVDKLFIQLVQTYNQLFEENPINASGVDAKAILSARLSKSRRLENLIAQLPGEKKNGLFGNLIALSLGLTPNFKSNFDLAEDAKLQLSKDTYDDDLDNLLAQIGDQYADLFLAAKNLSDAILLSDILRVNTEITKAPLSASMIKRYDEHHQDLTLLKALVRQQLPEKYKEIFFDQSKNGYAGYIDGGASQEEFYKFIKPILEKMDGTEELLVKLNREDLLRKQRTFDNGSIPHQIHLGELHAILRRQEDFYPFLKDNREKIEKILTFRIPYYVGPLARGNSRFAWMTRKSEETITPWNFEEVVDKGASAQSFIERMTNFDKNLPNEKVLPKHSLLYEYFTVYNELTKVKYVTEGMRKPAFLSGEQKKAIVDLLFKTNRKVTVKQLKEDYFKKIECFDSVEISGVEDRFNASLGTYHDLLKIIKDKDFLDNEENEDILEDIVLTLTLFEDREMIEERLKTYAHLFDDKVMKQLKRRRYTGWGRLSRKLINGIRDKQSGKTILDFLKSDGFANRNFMQLIHDDSLTFKEDIQKAQVSGQGDSLHEHIANLAGSPAIKKGILQTVKVVDELVKVMGRHKPENIVIEMARENQTTQKGQKNSRERMKRIEEGIKELGSQILKEHPVENTQLQNEKLYLYYLQNGRDMYVDQELDINRLSDYDVDHIVPQSFLKDDSIDNKVLTRSDKARGKSDNVPSEEVVKKMKNYWRQLLNAKLITQRKFDNLTKAERGGLSELDKAGFIKRQLVETRQITKHVAQILDSRMNTKYDENDKLIREVKVITLKSKLVSDFRKDFQFYKVREINNYHHAHDAYLNAVVGTALIKKYPKLESEFVYGDYKVYDVRKMIAKSEQEIGKATAKYFFYSNIMNFFKTEITLANGEIRKRPLIETNGETGEIVWDKGRDFATVRKVLSMPQVNIVKKTEVQTGGFSKESILPKRNSDKLIARKKDWDPKKYGGFDSPTVAYSVLVVAKVEKGKSKKLKSVKELLGITIMERSSFEKNPIDFLEAKGYKEVKKDLIIKLPKYSLFELENGRKRMLASAGELQKGNELALPSKYVNFLYLASHYEKLKGSPEDNEQKQLFVEQHKHYLDEIIEQISEFSKRVILADANLDKVLSAYNKHRDKPIREQAENIIHLFTLTNLGAPAAFKYFDTTIDRKRYTSTKEVLDATLIHQSITGLYETRIDLSQLGGDGGGSSGSSGSSGSSGSSGGTLNIEDEYRLHETSKEPDVSLGSTWLSDFPQAWAETGGMGLAVRQAPLIIPLKATSTPVSIKQYPMSQEARLGIKPHIQRLLDQGILVPCQSPWNTPLLPVKKPGTNDYRPVQDLREVNKRVEDIHPTVPNPYNLLSGLPPSHQWYTVLDLKDAFFCLRLHPTSQPLFAFEWRDPEMGISGQLTWTRLPQGFKNSPTLFNEALHRDLAGFRIQHPDLILLQYVDDLLLAATSELDCQQGTRALLQTLGDLGYRASAKKAQICQKQVKYLGYLLKEGQRWLTEARKETVMGQPIPKTPRQLREFLGKAGFCRLFIPGFAEMAAPLYPLTKPGTLFNWGPDQQKAFQEIKQALLTAPALGLPDLTKPFELFVDEKQGYAKGVLTQKLGPWRRPVAYLSKKLDPVAAGWPPCLRMVAAIAVLTKDAGKLTMGQPLVILAPHAVEALVKQPPDRWLSNARMTHYQALLLDTDRVQFGPVVALNPATLLPLPEEGLQHDCLDILAEAHGTRSDLMDQPLPDADHTWYTDGSSFLQEGQRKAGAAVTTETEVIWARALPAGTSAQRAELIALTQALKMAEGKKLNVYTDSRYAFATAHIHGEIYRRRGWLTSEGKEIKNKDEILALLKALFLPKRLSIIHCPGHQKGNSAEARGNRMADQAAREVATRETPETSTLLAGKRTADGSEFEKRTADGSEFESPKKKAKVE

SEQ ID NO: 2406 - protein, 2091 aa, synthetic construct
MPAAKRVKLDGGDKKYSIGLDIGTNSVGWAVITDEYKVPSKKFKVLGNTDRHSIKKNLIGALLFDSGETAEATRLKRTARRRYTRRKNRICYLQEIFSNEMAKVDDSFFHRLEESFLVEEDKKHERHPIFGNIVDEVAYHEKYPTIYHLRKKLVDSTDKADLRLIYLALAHMIKFRGHFLIEGDLNPDNSDVDKLFIQLVQTYNQLFEENPINASGVDAKAILSARLSKSRRLENLIAQLPGEKKNGLFGNLIALSLGLTPNFKSNFDLAEDAKLQLSKDTYDDDLDNLLAQIGDQYADLFLAAKNLSDAILLSDILRVNTEITKAPLSASMIKRYDEHHQDLTLLKALVRQQLPEKYKEIFFDQSKNGYAGYIDGGASQEEFYKFIKPILEKMDGTEELLVKLNREDLLRKQRTFDNGSIPHQIHLGELHAILRRQEDFYPFLKDNREKIEKILTFRIPYYVGPLARGNSRFAWMTRKSEETITPWNFEEVVDKGASAQSFIERMTNFDKNLPNEKVLPKHSLLYEYFTVYNELTKVKYVTEGMRKPAFLSGEQKKAIVDLLFKTNRKVTVKQLKEDYFKKIECFDSVEISGVEDRFNASLGTYHDLLKIIKDKDFLDNEENEDILEDIVLTLTLFEDREMIEERLKTYAHLFDDKVMKQLKRRRYTGWGRLSRKLINGIRDKQSGKTILDFLKSDGFANRNFMQLIHDDSLTFKEDIQKAQVSGQGDSLHEHIANLAGSPAIKKGILQTVKVVDELVKVMGRHKPENIVIEMARENQTTQKGQKNSRERMKRIEEGIKELGSQILKEHPVENTQLQNEKLYLYYLQNGRDMYVDQELDINRLSDYDVDHIVPQSFLKDDSIDNKVLTRSDKARGKSDNVPSEEVVKKMKNYWRQLLNAKLITQRKFDNLTKAERGGLSELDKAGFIKRQLVETRQITKHVAQILDSRMNTKYDENDKLIREVKVITLKSKLVSDFRKDFQFYKVREINNYHHAHDAYLNAVVGTALIKKYPKLESEFVYGDYKVYDVRKMIAKSEQEIGKATAKYFFYSNIMNFFKTEITLANGEIRKRPLIETNGETGEIVWDKGRDFATVRKVLSMPQVNIVKKTEVQTGGFSKESILPKRNSDKLIARKKDWDPKKYGGFDSPTVAYSVLVVAKVEKGKSKKLKSVKELLGITIMERSSFEKNPIDFLEAKGYKEVKKDLIIKLPKYSLFELENGRKRMLASAGELQKGNELALPSKYVNFLYLASHYEKLKGSPEDNEQKQLFVEQHKHYLDEIIEQISEFSKRVILADANLDKVLSAYNKHRDKPIREQAENIIHLFTLTNLGAPAAFKYFDTTIDRKRYTSTKEVLDATLIHQSITGLYETRIDLSQLGGDGGGSSGGSGGTLNIEDEYRLHETSKEPDVSLGSTWLSDFPQAWAETGGMGLAVRQAPLIIPLKATSTPVSIKQYPMSQEARLGIKPHIQRLLDQGILVPCQSPWNTPLLPVKKPGTNDYRPVQDLREVNKRVEDIHPTVPNPYNLLSGLPPSHQWYTVLDLKDAFFCLRLHPTSQPLFAFEWRDPEMGISGQLTWTRLPQGFKNSPTLFNEALHRDLAGFRIQHPDLILLQYVDDLLLAATSELDCQQGTRALLQTLGDLGYRASAKKAQICQKQVKYLGYLLKEGQRWLTEARKETVMGQPIPKTPRQLREFLGKAGFCRLFIPGFAEMAAPLYPLTKPGTLFNWGPDQQKAFQEIKQALLTAPALGLPDLTKPFELFVDEKQGYAKGVLTQKLGPWRRPVAYLSKKLDPVAAGWPPCLRMVAAIAVLTKDAGKLTMGQPLVILAPHAVEALVKQPPDRWLSNARMTHYQALLLDTDRVQFGPVVALNPATLLPLPEEGLQHDCLDILAEAHGTRSDLMDQPLPDADHTWYTDGSSFLQEGQRKAGAAVTTETEVIWARALPAGTSAQRAELIALTQALKMAEGKKLNVYTDSRYAFATAHIHGEIYRRRGWLTSEGKEIKNKDEILALLKALFLPKRLSIIHCPGHQKGNSAEARGNRMADQAAREVATRETPETSTLLAGKRTADGSEFEKRTADGSEFESPKKKAKVE

SEQ ID NO: 2407 - protein, 2094 aa, synthetic construct
MPAAKRVKLDGGDKKYSIGLDIGTNSVGWAVITDEYKVPSKKFKVLGNTDRHSIKKNLIGALLFDSGETAEATRLKRTARRRYTRRKNRICYLQEIFSNEMAKVDDSFFHRLEESFLVEEDKKHERHPIFGNIVDEVAYHEKYPTIYHLRKKLVDSTDKADLRLIYLALAHMIKFRGHFLIEGDLNPDNSDVDKLFIQLVQTYNQLFEENPINASGVDAKAILSARLSKSRRLENLIAQLPGEKKNGLFGNLIALSLGLTPNFKSNFDLAEDAKLQLSKDTYDDDLDNLLAQIGDQYADLFLAAKNLSDAILLSDILRVNTEITKAPLSASMIKRYDEHHQDLTLLKALVRQQLPEKYKEIFFDQSKNGYAGYIDGGASQEEFYKFIKPILEKMDGTEELLVKLNREDLLRKQRTFDNGSIPHQIHLGELHAILRRQEDFYPFLKDNREKIEKILTFRIPYYVGPLARGNSRFAWMTRKSEETITPWNFEEVVDKGASAQSFIERMTNFDKNLPNEKVLPKHSLLYEYFTVYNELTKVKYVTEGMRKPAFLSGEQKKAIVDLLFKTNRKVTVKQLKEDYFKKIECFDSVEISGVEDRFNASLGTYHDLLKIIKDKDFLDNEENEDILEDIVLTLTLFEDREMIEERLKTYAHLFDDKVMKQLKRRRYTGWGRLSRKLINGIRDKQSGKTILDFLKSDGFANRNFMQLIHDDSLTFKEDIQKAQVSGQGDSLHEHIANLAGSPAIKKGILQTVKVVDELVKVMGRHKPENIVIEMARENQTTQKGQKNSRERMKRIEEGIKELGSQILKEHPVENTQLQNEKLYLYYLQNGRDMYVDQELDINRLSDYDVDHIVPQSFLKDDSIDNKVLTRSDKARGKSDNVPSEEVVKKMKNYWRQLLNAKLITQRKFDNLTKAERGGLSELDKAGFIKRQLVETRQITKHVAQILDSRMNTKYDENDKLIREVKVITLKSKLVSDFRKDFQFYKVREINNYHHAHDAYLNAVVGTALIKKYPKLESEFVYGDYKVYDVRKMIAKSEQEIGKATAKYFFYSNIMNFFKTEITLANGEIRKRPLIETNGETGEIVWDKGRDFATVRKVLSMPQVNIVKKTEVQTGGFSKESILPKRNSDKLIARKKDWDPKKYGGFDSPTVAYSVLVVAKVEKGKSKKLKSVKELLGITIMERSSFEKNPIDFLEAKGYKEVKKDLIIKLPKYSLFELENGRKRMLASAGELQKGNELALPSKYVNFLYLASHYEKLKGSPEDNEQKQLFVEQHKHYLDEIIEQISEFSKRVILADANLDKVLSAYNKHRDKPIREQAENIIHLFTLTNLGAPAAFKYFDTTIDRKRYTSTKEVLDATLIHQSITGLYETRIDLSQLGGDGGGSSPAPGGSGGTLNIEDEYRLHETSKEPDVSLGSTWLSDFPQAWAETGGMGLAVRQAPLIIPLKATSTPVSIKQYPMSQEARLGIKPHIQRLLDQGILVPCQSPWNTPLLPVKKPGTNDYRPVQDLREVNKRVEDIHPTVPNPYNLLSGLPPSHQWYTVLDLKDAFFCLRLHPTSQPLFAFEWRDPEMGISGQLTWTRLPQGFKNSPTLFNEALHRDLAGFRIQHPDLILLQYVDDLLLAATSELDCQQGTRALLQTLGDLGYRASAKKAQICQKQVKYLGYLLKEGQRWLTEARKETVMGQPIPKTPRQLREFLGKAGFCRLFIPGFAEMAAPLYPLTKPGTLFNWGPDQQKAFQEIKQALLTAPALGLPDLTKPFELFVDEKQGYAKGVLTQKLGPWRRPVAYLSKKLDPVAAGWPPCLRMVAAIAVLTKDAGKLTMGQPLVILAPHAVEALVKQPPDRWLSNARMTHYQALLLDTDRVQFGPVVALNPATLLPLPEEGLQHDCLDILAEAHGTRSDLMDQPLPDADHTWYTDGSSFLQEGQRKAGAAVTTETEVIWARALPAGTSAQRAELIALTQALKMAEGKKLNVYTDSRYAFATAHIHGEIYRRRGWLTSEGKEIKNKDEILALLKALFLPKRLSIIHCPGHQKGNSAEARGNRMADQAAREVATRETPETSTLLAGKRTADGSEFEKRTADGSEFESPKKKAKVE

SEQ ID NO: 2408 - protein, 2096 aa, synthetic construct
MPAAKRVKLDGGDKKYSIGLDIGTNSVGWAVITDEYKVPSKKFKVLGNTDRHSIKKNLIGALLFDSGETAEATRLKRTARRRYTRRKNRICYLQEIFSNEMAKVDDSFFHRLEESFLVEEDKKHERHPIFGNIVDEVAYHEKYPTIYHLRKKLVDSTDKADLRLIYLALAHMIKFRGHFLIEGDLNPDNSDVDKLFIQLVQTYNQLFEENPINASGVDAKAILSARLSKSRRLENLIAQLPGEKKNGLFGNLIALSLGLTPNFKSNFDLAEDAKLQLSKDTYDDDLDNLLAQIGDQYADLFLAAKNLSDAILLSDILRVNTEITKAPLSASMIKRYDEHHQDLTLLKALVRQQLPEKYKEIFFDQSKNGYAGYIDGGASQEEFYKFIKPILEKMDGTEELLVKLNREDLLRKQRTFDNGSIPHQIHLGELHAILRRQEDFYPFLKDNREKIEKILTFRIPYYVGPLARGNSRFAWMTRKSEETITPWNFEEVVDKGASAQSFIERMTNFDKNLPNEKVLPKHSLLYEYFTVYNELTKVKYVTEGMRKPAFLSGEQKKAIVDLLFKTNRKVTVKQLKEDYFKKIECFDSVEISGVEDRFNASLGTYHDLLKIIKDKDFLDNEENEDILEDIVLTLTLFEDREMIEERLKTYAHLFDDKVMKQLKRRRYTGWGRLSRKLINGIRDKQSGKTILDFLKSDGFANRNFMQLIHDDSLTFKEDIQKAQVSGQGDSLHEHIANLAGSPAIKKGILQTVKVVDELVKVMGRHKPENIVIEMARENQTTQKGQKNSRERMKRIEEGIKELGSQILKEHPVENTQLQNEKLYLYYLQNGRDMYVDQELDINRLSDYDVDHIVPQSFLKDDSIDNKVLTRSDKARGKSDNVPSEEVVKKMKNYWRQLLNAKLITQRKFDNLTKAERGGLSELDKAGFIKRQLVETRQITKHVAQILDSRMNTKYDENDKLIREVKVITLKSKLVSDFRKDFQFYKVREINNYHHAHDAYLNAVVGTALIKKYPKLESEFVYGDYKVYDVRKMIAKSEQEIGKATAKYFFYSNIMNFFKTEITLANGEIRKRPLIETNGETGEIVWDKGRDFATVRKVLSMPQVNIVKKTEVQTGGFSKESILPKRNSDKLIARKKDWDPKKYGGFDSPTVAYSVLVVAKVEKGKSKKLKSVKELLGITIMERSSFEKNPIDFLEAKGYKEVKKDLIIKLPKYSLFELENGRKRMLASAGELQKGNELALPSKYVNFLYLASHYEKLKGSPEDNEQKQLFVEQHKHYLDEIIEQISEFSKRVILADANLDKVLSAYNKHRDKPIREQAENIIHLFTLTNLGAPAAFKYFDTTIDRKRYTSTKEVLDATLIHQSITGLYETRIDLSQLGGDGGGGSEAAAKGSSGGTLNIEDEYRLHETSKEPDVSLGSTWLSDFPQAWAETGGMGLAVRQAPLIIPLKATSTPVSIKQYPMSQEARLGIKPHIQRLLDQGILVPCQSPWNTPLLPVKKPGTNDYRPVQDLREVNKRVEDIHPTVPNPYNLLSGLPPSHQWYTVLDLKDAFFCLRLHPTSQPLFAFEWRDPEMGISGQLTWTRLPQGFKNSPTLFNEALHRDLAGFRIQHPDLILLQYVDDLLLAATSELDCQQGTRALLQTLGDLGYRASAKKAQICQKQVKYLGYLLKEGQRWLTEARKETVMGQPIPKTPRQLREFLGKAGFCRLFIPGFAEMAAPLYPLTKPGTLFNWGPDQQKAFQEIKQALLTAPALGLPDLTKPFELFVDEKQGYAKGVLTQKLGPWRRPVAYLSKKLDPVAAGWPPCLRMVAAIAVLTKDAGKLTMGQPLVILAPHAVEALVKQPPDRWLSNARMTHYQALLLDTDRVQFGPVVALNPATLLPLPEEGLQHDCLDILAEAHGTRSDLMDQPLPDADHTWYTDGSSFLQEGQRKAGAAVTTETEVIWARALPAGTSAQRAELIALTQALKMAEGKKLNVYTDSRYAFATAHIHGEIYRRRGWLTSEGKEIKNKDEILALLKALFLPKRLSIIHCPGHQKGNSAEARGNRMADQAAREVATRETPETSTLLAGKRTADGSEFEKRTADGSEFESPKKKAKVE

SEQ ID NO: 2409 - protein, 2094 aa, synthetic construct
MPAAKRVKLDGGDKKYSIGLDIGTNSVGWAVITDEYKVPSKKFKVLGNTDRHSIKKNLIGALLFDSGETAEATRLKRTARRRYTRRKNRICYLQEIFSNEMAKVDDSFFHRLEESFLVEEDKKHERHPIFGNIVDEVAYHEKYPTIYHLRKKLVDSTDKADLRLIYLALAHMIKFRGHFLIEGDLNPDNSDVDKLFIQLVQTYNQLFEENPINASGVDAKAILSARLSKSRRLENLIAQLPGEKKNGLFGNLIALSLGLTPNFKSNFDLAEDAKLQLSKDTYDDDLDNLLAQIGDQYADLFLAAKNLSDAILLSDILRVNTEITKAPLSASMIKRYDEHHQDLTLLKALVRQQLPEKYKEIFFDQSKNGYAGYIDGGASQEEFYKFIKPILEKMDGTEELLVKLNREDLLRKQRTFDNGSIPHQIHLGELHAILRRQEDFYPFLKDNREKIEKILTFRIPYYVGPLARGNSRFAWMTRKSEETITPWNFEEVVDKGASAQSFIERMTNFDKNLPNEKVLPKHSLLYEYFTVYNELTKVKYVTEGMRKPAFLSGEQKKAIVDLLFKTNRKVTVKQLKEDYFKKIECFDSVEISGVEDRFNASLGTYHDLLKIIKDKDFLDNEENEDILEDIVLTLTLFEDREMIEERLKTYAHLFDDKVMKQLKRRRYTGWGRLSRKLINGIRDKQSGKTILDFLKSDGFANRNFMQLIHDDSLTFKEDIQKAQVSGQGDSLHEHIANLAGSPAIKKGILQTVKVVDELVKVMGRHKPENIVIEMARENQTTQKGQKNSRERMKRIEEGIKELGSQILKEHPVENTQLQNEKLYLYYLQNGRDMYVDQELDINRLSDYDVDHIVPQSFLKDDSIDNKVLTRSDKARGKSDNVPSEEVVKKMKNYWRQLLNAKLITQRKFDNLTKAERGGLSELDKAGFIKRQLVETRQITKHVAQILDSRMNTKYDENDKLIREVKVITLKSKLVSDFRKDFQFYKVREINNYHHAHDAYLNAVVGTALIKKYPKLESEFVYGDYKVYDVRKMIAKSEQEIGKATAKYFFYSNIMNFFKTEITLANGEIRKRPLIETNGETGEIVWDKGRDFATVRKVLSMPQVNIVKKTEVQTGGFSKESILPKRNSDKLIARKKDWDPKKYGGFDSPTVAYSVLVVAKVEKGKSKKLKSVKELLGITIMERSSFEKNPIDFLEAKGYKEVKKDLIIKLPKYSLFELENGRKRMLASAGELQKGNELALPSKYVNFLYLASHYEKLKGSPEDNEQKQLFVEQHKHYLDEIIEQISEFSKRVILADANLDKVLSAYNKHRDKPIREQAENIIHLFTLTNLGAPAAFKYFDTTIDRKRYTSTKEVLDATLIHQSITGLYETRIDLSQLGGDGGGGGGSSGGSGGTLNIEDEYRLHETSKEPDVSLGSTWLSDFPQAWAETGGMGLAVRQAPLIIPLKATSTPVSIKQYPMSQEARLGIKPHIQRLLDQGILVPCQSPWNTPLLPVKKPGTNDYRPVQDLREVNKRVEDIHPTVPNPYNLLSGLPPSHQWYTVLDLKDAFFCLRLHPTSQPLFAFEWRDPEMGISGQLTWTRLPQGFKNSPTLFNEALHRDLAGFRIQHPDLILLQYVDDLLLAATSELDCQQGTRALLQTLGDLGYRASAKKAQICQKQVKYLGYLLKEGQRWLTEARKETVMGQPIPKTPRQLREFLGKAGFCRLFIPGFAEMAAPLYPLTKPGTLFNWGPDQQKAFQEIKQALLTAPALGLPDLTKPFELFVDEKQGYAKGVLTQKLGPWRRPVAYLSKKLDPVAAGWPPCLRMVAAIAVLTKDAGKLTMGQPLVILAPHAVEALVKQPPDRWLSNARMTHYQALLLDTDRVQFGPVVALNPATLLPLPEEGLQHDCLDILAEAHGTRSDLMDQPLPDADHTWYTDGSSFLQEGQRKAGAAVTTETEVIWARALPAGTSAQRAELIALTQALKMAEGKKLNVYTDSRYAFATAHIHGEIYRRRGWLTSEGKEIKNKDEILALLKALFLPKRLSIIHCPGHQKGNSAEARGNRMADQAAREVATRETPETSTLLAGKRTADGSEFEKRTADGSEFESPKKKAKVE

SEQ ID NO: 2410 - protein, 2110 aa, synthetic construct
MPAAKRVKLDGGDKKYSIGLDIGTNSVGWAVITDEYKVPSKKFKVLGNTDRHSIKKNLIGALLFDSGETAEATRLKRTARRRYTRRKNRICYLQEIFSNEMAKVDDSFFHRLEESFLVEEDKKHERHPIFGNIVDEVAYHEKYPTIYHLRKKLVDSTDKADLRLIYLALAHMIKFRGHFLIEGDLNPDNSDVDKLFIQLVQTYNQLFEENPINASGVDAKAILSARLSKSRRLENLIAQLPGEKKNGLFGNLIALSLGLTPNFKSNFDLAEDAKLQLSKDTYDDDLDNLLAQIGDQYADLFLAAKNLSDAILLSDILRVNTEITKAPLSASMIKRYDEHHQDLTLLKALVRQQLPEKYKEIFFDQSKNGYAGYIDGGASQEEFYKFIKPILEKMDGTEELLVKLNREDLLRKQRTFDNGSIPHQIHLGELHAILRRQEDFYPFLKDNREKIEKILTFRIPYYVGPLARGNSRFAWMTRKSEETITPWNFEEVVDKGASAQSFIERMTNFDKNLPNEKVLPKHSLLYEYFTVYNELTKVKYVTEGMRKPAFLSGEQKKAIVDLLFKTNRKVTVKQLKEDYFKKIECFDSVEISGVEDRFNASLGTYHDLLKIIKDKDFLDNEENEDILEDIVLTLTLFEDREMIEERLKTYAHLFDDKVMKQLKRRRYTGWGRLSRKLINGIRDKQSGKTILDFLKSDGFANRNFMQLIHDDSLTFKEDIQKAQVSGQGDSLHEHIANLAGSPAIKKGILQTVKVVDELVKVMGRHKPENIVIEMARENQTTQKGQKNSRERMKRIEEGIKELGSQILKEHPVENTQLQNEKLYLYYLQNGRDMYVDQELDINRLSDYDVDHIVPQSFLKDDSIDNKVLTRSDKARGKSDNVPSEEVVKKMKNYWRQLLNAKLITQRKFDNLTKAERGGLSELDKAGFIKRQLVETRQITKHVAQILDSRMNTKYDENDKLIREVKVITLKSKLVSDFRKDFQFYKVREINNYHHAHDAYLNAVVGTALIKKYPKLESEFVYGDYKVYDVRKMIAKSEQEIGKATAKYFFYSNIMNFFKTEITLANGEIRKRPLIETNGETGEIVWDKGRDFATVRKVLSMPQVNIVKKTEVQTGGFSKESILPKRNSDKLIARKKDWDPKKYGGFDSPTVAYSVLVVAKVEKGKSKKLKSVKELLGITIMERSSFEKNPIDFLEAKGYKEVKKDLIIKLPKYSLFELENGRKRMLASAGELQKGNELALPSKYVNFLYLASHYEKLKGSPEDNEQKQLFVEQHKHYLDEIIEQISEFSKRVILADANLDKVLSAYNKHRDKPIREQAENIIHLFTLTNLGAPAAFKYFDTTIDRKRYTSTKEVLDATLIHQSITGLYETRIDLSQLGGDGGGGGGSGGGGSGGGGSGGGGSGGGGSGGTLNIEDEYRLHETSKEPDVSLGSTWLSDFPQAWAETGGMGLAVRQAPLIIPLKATSTPVSIKQYPMSQEARLGIKPHIQRLLDQGILVPCQSPWNTPLLPVKKPGTNDYRPVQDLREVNKRVEDIHPTVPNPYNLLSGLPPSHQWYTVLDLKDAFFCLRLHPTSQPLFAFEWRDPEMGISGQLTWTRLPQGFKNSPTLFNEALHRDLAGFRIQHPDLILLQYVDDLLLAATSELDCQQGTRALLQTLGDLGYRASAKKAQICQKQVKYLGYLLKEGQRWLTEARKETVMGQPIPKTPRQLREFLGKAGFCRLFIPGFAEMAAPLYPLTKPGTLFNWGPDQQKAFQEIKQALLTAPALGLPDLTKPFELFVDEKQGYAKGVLTQKLGPWRRPVAYLSKKLDPVAAGWPPCLRMVAAIAVLTKDAGKLTMGQPLVILAPHAVEALVKQPPDRWLSNARMTHYQALLLDTDRVQFGPVVALNPATLLPLPEEGLQHDCLDILAEAHGTRSDLMDQPLPDADHTWYTDGSSFLQEGQRKAGAAVTTETEVIWARALPAGTSAQRAELIALTQALKMAEGKKLNVYTDSRYAFATAHIHGEIYRRRGWLTSEGKEIKNKDEILALLKALFLPKRLSIIHCPGHQKGNSAEARGNRMADQAAREVATRETPETSTLLAGKRTADGSEFEKRTADGSEFESPKKKAKVE

SEQ ID NO: 2411 - protein, 2091 aa, synthetic construct
MPAAKRVKLDGGDKKYSIGLDIGTNSVGWAVITDEYKVPSKKFKVLGNTDRHSIKKNLIGALLFDSGETAEATRLKRTARRRYTRRKNRICYLQEIFSNEMAKVDDSFFHRLEESFLVEEDKKHERHPIFGNIVDEVAYHEKYPTIYHLRKKLVDSTDKADLRLIYLALAHMIKFRGHFLIEGDLNPDNSDVDKLFIQLVQTYNQLFEENPINASGVDAKAILSARLSKSRRLENLIAQLPGEKKNGLFGNLIALSLGLTPNFKSNFDLAEDAKLQLSKDTYDDDLDNLLAQIGDQYADLFLAAKNLSDAILLSDILRVNTEITKAPLSASMIKRYDEHHQDLTLLKALVRQQLPEKYKEIFFDQSKNGYAGYIDGGASQEEFYKFIKPILEKMDGTEELLVKLNREDLLRKQRTFDNGSIPHQIHLGELHAILRRQEDFYPFLKDNREKIEKILTFRIPYYVGPLARGNSRFAWMTRKSEETITPWNFEEVVDKGASAQSFIERMTNFDKNLPNEKVLPKHSLLYEYFTVYNELTKVKYVTEGMRKPAFLSGEQKKAIVDLLFKTNRKVTVKQLKEDYFKKIECFDSVEISGVEDRFNASLGTYHDLLKIIKDKDFLDNEENEDILEDIVLTLTLFEDREMIEERLKTYAHLFDDKVMKQLKRRRYTGWGRLSRKLINGIRDKQSGKTILDFLKSDGFANRNFMQLIHDDSLTFKEDIQKAQVSGQGDSLHEHIANLAGSPAIKKGILQTVKVVDELVKVMGRHKPENIVIEMARENQTTQKGQKNSRERMKRIEEGIKELGSQILKEHPVENTQLQNEKLYLYYLQNGRDMYVDQELDINRLSDYDVDHIVPQSFLKDDSIDNKVLTRSDKARGKSDNVPSEEVVKKMKNYWRQLLNAKLITQRKFDNLTKAERGGLSELDKAGFIKRQLVETRQITKHVAQILDSRMNTKYDENDKLIREVKVITLKSKLVSDFRKDFQFYKVREINNYHHAHDAYLNAVVGTALIKKYPKLESEFVYGDYKVYDVRKMIAKSEQEIGKATAKYFFYSNIMNFFKTEITLANGEIRKRPLIETNGETGEIVWDKGRDFATVRKVLSMPQVNIVKKTEVQTGGFSKESILPKRNSDKLIARKKDWDPKKYGGFDSPTVAYSVLVVAKVEKGKSKKLKSVKELLGITIMERSSFEKNPIDFLEAKGYKEVKKDLIIKLPKYSLFELENGRKRMLASAGELQKGNELALPSKYVNFLYLASHYEKLKGSPEDNEQKQLFVEQHKHYLDEIIEQISEFSKRVILADANLDKVLSAYNKHRDKPIREQAENIIHLFTLTNLGAPAAFKYFDTTIDRKRYTSTKEVLDATLIHQSITGLYETRIDLSQLGGDGGGSSGSSGGTLNIEDEYRLHETSKEPDVSLGSTWLSDFPQAWAETGGMGLAVRQAPLIIPLKATSTPVSIKQYPMSQEARLGIKPHIQRLLDQGILVPCQSPWNTPLLPVKKPGTNDYRPVQDLREVNKRVEDIHPTVPNPYNLLSGLPPSHQWYTVLDLKDAFFCLRLHPTSQPLFAFEWRDPEMGISGQLTWTRLPQGFKNSPTLFNEALHRDLAGFRIQHPDLILLQYVDDLLLAATSELDCQQGTRALLQTLGDLGYRASAKKAQICQKQVKYLGYLLKEGQRWLTEARKETVMGQPIPKTPRQLREFLGKAGFCRLFIPGFAEMAAPLYPLTKPGTLFNWGPDQQKAFQEIKQALLTAPALGLPDLTKPFELFVDEKQGYAKGVLTQKLGPWRRPVAYLSKKLDPVAAGWPPCLRMVAAIAVLTKDAGKLTMGQPLVILAPHAVEALVKQPPDRWLSNARMTHYQALLLDTDRVQFGPVVALNPATLLPLPEEGLQHDCLDILAEAHGTRSDLMDQPLPDADHTWYTDGSSFLQEGQRKAGAAVTTETEVIWARALPAGTSAQRAELIALTQALKMAEGKKLNVYTDSRYAFATAHIHGEIYRRRGWLTSEGKEIKNKDEILALLKALFLPKRLSIIHCPGHQKGNSAEARGNRMADQAAREVATRETPETSTLLAGKRTADGSEFEKRTADGSEFESPKKKAKVE

SEQ ID NO: 2412 - protein, 2096 aa, synthetic construct
MPAAKRVKLDGGDKKYSIGLDIGTNSVGWAVITDEYKVPSKKFKVLGNTDRHSIKKNLIGALLFDSGETAEATRLKRTARRRYTRRKNRICYLQEIFSNEMAKVDDSFFHRLEESFLVEEDKKHERHPIFGNIVDEVAYHEKYPTIYHLRKKLVDSTDKADLRLIYLALAHMIKFRGHFLIEGDLNPDNSDVDKLFIQLVQTYNQLFEENPINASGVDAKAILSARLSKSRRLENLIAQLPGEKKNGLFGNLIALSLGLTPNFKSNFDLAEDAKLQLSKDTYDDDLDNLLAQIGDQYADLFLAAKNLSDAILLSDILRVNTEITKAPLSASMIKRYDEHHQDLTLLKALVRQQLPEKYKEIFFDQSKNGYAGYIDGGASQEEFYKFIKPILEKMDGTEELLVKLNREDLLRKQRTFDNGSIPHQIHLGELHAILRRQEDFYPFLKDNREKIEKILTFRIPYYVGPLARGNSRFAWMTRKSEETITPWNFEEVVDKGASAQSFIERMTNFDKNLPNEKVLPKHSLLYEYFTVYNELTKVKYVTEGMRKPAFLSGEQKKAIVDLLFKTNRKVTVKQLKEDYFKKIECFDSVEISGVEDRFNASLGTYHDLLKIIKDKDFLDNEENEDILEDIVLTLTLFEDREMIEERLKTYAHLFDDKVMKQLKRRRYTGWGRLSRKLINGIRDKQSGKTILDFLKSDGFANRNFMQLIHDDSLTFKEDIQKAQVSGQGDSLHEHIANLAGSPAIKKGILQTVKVVDELVKVMGRHKPENIVIEMARENQTTQKGQKNSRERMKRIEEGIKELGSQILKEHPVENTQLQNEKLYLYYLQNGRDMYVDQELDINRLSDYDVDHIVPQSFLKDDSIDNKVLTRSDKARGKSDNVPSEEVVKKMKNYWRQLLNAKLITQRKFDNLTKAERGGLSELDKAGFIKRQLVETRQITKHVAQILDSRMNTKYDENDKLIREVKVITLKSKLVSDFRKDFQFYKVREINNYHHAHDAYLNAVVGTALIKKYPKLESEFVYGDYKVYDVRKMIAKSEQEIGKATAKYFFYSNIMNFFKTEITLANGEIRKRPLIETNGETGEIVWDKGRDFATVRKVLSMPQVNIVKKTEVQTGGFSKESILPKRNSDKLIARKKDWDPKKYGGFDSPTVAYSVLVVAKVEKGKSKKLKSVKELLGITIMERSSFEKNPIDFLEAKGYKEVKKDLIIKLPKYSLFELENGRKRMLASAGELQKGNELALPSKYVNFLYLASHYEKLKGSPEDNEQKQLFVEQHKHYLDEIIEQISEFSKRVILADANLDKVLSAYNKHRDKPIREQAENIIHLFTLTNLGAPAAFKYFDTTIDRKRYTSTKEVLDATLIHQSITGLYETRIDLSQLGGDGGEAAAKGGGGSSGGTLNIEDEYRLHETSKEPDVSLGSTWLSDFPQAWAETGGMGLAVRQAPLIIPLKATSTPVSIKQYPMSQEARLGIKPHIQRLLDQGILVPCQSPWNTPLLPVKKPGTNDYRPVQDLREVNKRVEDIHPTVPNPYNLLSGLPPSHQWYTVLDLKDAFFCLRLHPTSQPLFAFEWRDPEMGISGQLTWTRLPQGFKNSPTLFNEALHRDLAGFRIQHPDLILLQYVDDLLLAATSELDCQQGTRALLQTLGDLGYRASAKKAQICQKQVKYLGYLLKEGQRWLTEARKETVMGQPIPKTPRQLREFLGKAGFCRLFIPGFAEMAAPLYPLTKPGTLFNWGPDQQKAFQEIKQALLTAPALGLPDLTKPFELFVDEKQGYAKGVLTQKLGPWRRPVAYLSKKLDPVAAGWPPCLRMVAAIAVLTKDAGKLTMGQPLVILAPHAVEALVKQPPDRWLSNARMTHYQALLLDTDRVQFGPVVALNPATLLPLPEEGLQHDCLDILAEAHGTRSDLMDQPLPDADHTWYTDGSSFLQEGQRKAGAAVTTETEVIWARALPAGTSAQRAELIALTQALKMAEGKKLNVYTDSRYAFATAHIHGEIYRRRGWLTSEGKEIKNKDEILALLKALFLPKRLSIIHCPGHQKGNSAEARGNRMADQAAREVATRETPETSTLLAGKRTADGSEFEKRTADGSEFESPKKKAKVE

SEQ ID NO: 2413 - protein, 2096 aa, synthetic construct
MPAAKRVKLDGGDKKYSIGLDIGTNSVGWAVITDEYKVPSKKFKVLGNTDRHSIKKNLIGALLFDSGETAEATRLKRTARRRYTRRKNRICYLQEIFSNEMAKVDDSFFHRLEESFLVEEDKKHERHPIFGNIVDEVAYHEKYPTIYHLRKKLVDSTDKADLRLIYLALAHMIKFRGHFLIEGDLNPDNSDVDKLFIQLVQTYNQLFEENPINASGVDAKAILSARLSKSRRLENLIAQLPGEKKNGLFGNLIALSLGLTPNFKSNFDLAEDAKLQLSKDTYDDDLDNLLAQIGDQYADLFLAAKNLSDAILLSDILRVNTEITKAPLSASMIKRYDEHHQDLTLLKALVRQQLPEKYKEIFFDQSKNGYAGYIDGGASQEEFYKFIKPILEKMDGTEELLVKLNREDLLRKQRTFDNGSIPHQIHLGELHAILRRQEDFYPFLKDNREKIEKILTFRIPYYVGPLARGNSRFAWMTRKSEETITPWNFEEVVDKGASAQSFIERMTNFDKNLPNEKVLPKHSLLYEYFTVYNELTKVKYVTEGMRKPAFLSGEQKKAIVDLLFKTNRKVTVKQLKEDYFKKIECFDSVEISGVEDRFNASLGTYHDLLKIIKDKDFLDNEENEDILEDIVLTLTLFEDREMIEERLKTYAHLFDDKVMKQLKRRRYTGWGRLSRKLINGIRDKQSGKTILDFLKSDGFANRNFMQLIHDDSLTFKEDIQKAQVSGQGDSLHEHIANLAGSPAIKKGILQTVKVVDELVKVMGRHKPENIVIEMARENQTTQKGQKNSRERMKRIEEGIKELGSQILKEHPVENTQLQNEKLYLYYLQNGRDMYVDQELDINRLSDYDVDHIVPQSFLKDDSIDNKVLTRSDKARGKSDNVPSEEVVKKMKNYWRQLLNAKLITQRKFDNLTKAERGGLSELDKAGFIKRQLVETRQITKHVAQILDSRMNTKYDENDKLIREVKVITLKSKLVSDFRKDFQFYKVREINNYHHAHDAYLNAVVGTALIKKYPKLESEFVYGDYKVYDVRKMIAKSEQEIGKATAKYFFYSNIMNFFKTEITLANGEIRKRPLIETNGETGEIVWDKGRDFATVRKVLSMPQVNIVKKTEVQTGGFSKESILPKRNSDKLIARKKDWDPKKYGGFDSPTVAYSVLVVAKVEKGKSKKLKSVKELLGITIMERSSFEKNPIDFLEAKGYKEVKKDLIIKLPKYSLFELENGRKRMLASAGELQKGNELALPSKYVNFLYLASHYEKLKGSPEDNEQKQLFVEQHKHYLDEIIEQISEFSKRVILADANLDKVLSAYNKHRDKPIREQAENIIHLFTLTNLGAPAAFKYFDTTIDRKRYTSTKEVLDATLIHQSITGLYETRIDLSQLGGDGGGGSGGGEAAAKGGTLNIEDEYRLHETSKEPDVSLGSTWLSDFPQAWAETGGMGLAVRQAPLIIPLKATSTPVSIKQYPMSQEARLGIKPHIQRLLDQGILVPCQSPWNTPLLPVKKPGTNDYRPVQDLREVNKRVEDIHPTVPNPYNLLSGLPPSHQWYTVLDLKDAFFCLRLHPTSQPLFAFEWRDPEMGISGQLTWTRLPQGFKNSPTLFNEALHRDLAGFRIQHPDLILLQYVDDLLLAATSELDCQQGTRALLQTLGDLGYRASAKKAQICQKQVKYLGYLLKEGQRWLTEARKETVMGQPIPKTPRQLREFLGKAGFCRLFIPGFAEMAAPLYPLTKPGTLFNWGPDQQKAFQEIKQALLTAPALGLPDLTKPFELFVDEKQGYAKGVLTQKLGPWRRPVAYLSKKLDPVAAGWPPCLRMVAAIAVLTKDAGKLTMGQPLVILAPHAVEALVKQPPDRWLSNARMTHYQALLLDTDRVQFGPVVALNPATLLPLPEEGLQHDCLDILAEAHGTRSDLMDQPLPDADHTWYTDGSSFLQEGQRKAGAAVTTETEVIWARALPAGTSAQRAELIALTQALKMAEGKKLNVYTDSRYAFATAHIHGEIYRRRGWLTSEGKEIKNKDEILALLKALFLPKRLSIIHCPGHQKGNSAEARGNRMADQAAREVATRETPETSTLLAGKRTADGSEFEKRTADGSEFESPKKKAKVE

SEQ ID NO: 2414 - protein, 2094 aa, synthetic construct
MPAAKRVKLDGGDKKYSIGLDIGTNSVGWAVITDEYKVPSKKFKVLGNTDRHSIKKNLIGALLFDSGETAEATRLKRTARRRYTRRKNRICYLQEIFSNEMAKVDDSFFHRLEESFLVEEDKKHERHPIFGNIVDEVAYHEKYPTIYHLRKKLVDSTDKADLRLIYLALAHMIKFRGHFLIEGDLNPDNSDVDKLFIQLVQTYNQLFEENPINASGVDAKAILSARLSKSRRLENLIAQLPGEKKNGLFGNLIALSLGLTPNFKSNFDLAEDAKLQLSKDTYDDDLDNLLAQIGDQYADLFLAAKNLSDAILLSDILRVNTEITKAPLSASMIKRYDEHHQDLTLLKALVRQQLPEKYKEIFFDQSKNGYAGYIDGGASQEEFYKFIKPILEKMDGTEELLVKLNREDLLRKQRTFDNGSIPHQIHLGELHAILRRQEDFYPFLKDNREKIEKILTFRIPYYVGPLARGNSRFAWMTRKSEETITPWNFEEVVDKGASAQSFIERMTNFDKNLPNEKVLPKHSLLYEYFTVYNELTKVKYVTEGMRKPAFLSGEQKKAIVDLLFKTNRKVTVKQLKEDYFKKIECFDSVEISGVEDRFNASLGTYHDLLKIIKDKDFLDNEENEDILEDIVLTLTLFEDREMIEERLKTYAHLFDDKVMKQLKRRRYTGWGRLSRKLINGIRDKQSGKTILDFLKSDGFANRNFMQLIHDDSLTFKEDIQKAQVSGQGDSLHEHIANLAGSPAIKKGILQTVKVVDELVKVMGRHKPENIVIEMARENQTTQKGQKNSRERMKRIEEGIKELGSQILKEHPVENTQLQNEKLYLYYLQNGRDMYVDQELDINRLSDYDVDHIVPQSFLKDDSIDNKVLTRSDKARGKSDNVPSEEVVKKMKNYWRQLLNAKLITQRKFDNLTKAERGGLSELDKAGFIKRQLVETRQITKHVAQILDSRMNTKYDENDKLIREVKVITLKSKLVSDFRKDFQFYKVREINNYHHAHDAYLNAVVGTALIKKYPKLESEFVYGDYKVYDVRKMIAKSEQEIGKATAKYFFYSNIMNFFKTEITLANGEIRKRPLIETNGETGEIVWDKGRDFATVRKVLSMPQVNIVKKTEVQTGGFSKESILPKRNSDKLIARKKDWDPKKYGGFDSPTVAYSVLVVAKVEKGKSKKLKSVKELLGITIMERSSFEKNPIDFLEAKGYKEVKKDLIIKLPKYSLFELENGRKRMLASAGELQKGNELALPSKYVNFLYLASHYEKLKGSPEDNEQKQLFVEQHKHYLDEIIEQISEFSKRVILADANLDKVLSAYNKHRDKPIREQAENIIHLFTLTNLGAPAAFKYFDTTIDRKRYTSTKEVLDATLIHQSITGLYETRIDLSQLGGDGGPAPGSSGGGGGTLNIEDEYRLHETSKEPDVSLGSTWLSDFPQAWAETGGMGLAVRQAPLIIPLKATSTPVSIKQYPMSQEARLGIKPHIQRLLDQGILVPCQSPWNTPLLPVKKPGTNDYRPVQDLREVNKRVEDIHPTVPNPYNLLSGLPPSHQWYTVLDLKDAFFCLRLHPTSQPLFAFEWRDPEMGISGQLTWTRLPQGFKNSPTLFNEALHRDLAGFRIQHPDLILLQYVDDLLLAATSELDCQQGTRALLQTLGDLGYRASAKKAQICQKQVKYLGYLLKEGQRWLTEARKETVMGQPIPKTPRQLREFLGKAGFCRLFIPGFAEMAAPLYPLTKPGTLFNWGPDQQKAFQEIKQALLTAPALGLPDLTKPFELFVDEKQGYAKGVLTQKLGPWRRPVAYLSKKLDPVAAGWPPCLRMVAAIAVLTKDAGKLTMGQPLVILAPHAVEALVKQPPDRWLSNARMTHYQALLLDTDRVQFGPVVALNPATLLPLPEEGLQHDCLDILAEAHGTRSDLMDQPLPDADHTWYTDGSSFLQEGQRKAGAAVTTETEVIWARALPAGTSAQRAELIALTQALKMAEGKKLNVYTDSRYAFATAHIHGEIYRRRGWLTSEGKEIKNKDEILALLKALFLPKRLSIIHCPGHQKGNSAEARGNRMADQAAREVATRETPETSTLLAGKRTADGSEFEKRTADGSEFESPKKKAKVE

SEQ ID NO: 2415 - protein, 2089 aa, synthetic construct
MPAAKRVKLDGGDKKYSIGLDIGTNSVGWAVITDEYKVPSKKFKVLGNTDRHSIKKNLIGALLFDSGETAEATRLKRTARRRYTRRKNRICYLQEIFSNEMAKVDDSFFHRLEESFLVEEDKKHERHPIFGNIVDEVAYHEKYPTIYHLRKKLVDSTDKADLRLIYLALAHMIKFRGHFLIEGDLNPDNSDVDKLFIQLVQTYNQLFEENPINASGVDAKAILSARLSKSRRLENLIAQLPGEKKNGLFGNLIALSLGLTPNFKSNFDLAEDAKLQLSKDTYDDDLDNLLAQIGDQYADLFLAAKNLSDAILLSDILRVNTEITKAPLSASMIKRYDEHHQDLTLLKALVRQQLPEKYKEIFFDQSKNGYAGYIDGGASQEEFYKFIKPILEKMDGTEELLVKLNREDLLRKQRTFDNGSIPHQIHLGELHAILRRQEDFYPFLKDNREKIEKILTFRIPYYVGPLARGNSRFAWMTRKSEETITPWNFEEVVDKGASAQSFIERMTNFDKNLPNEKVLPKHSLLYEYFTVYNELTKVKYVTEGMRKPAFLSGEQKKAIVDLLFKTNRKVTVKQLKEDYFKKIECFDSVEISGVEDRFNASLGTYHDLLKIIKDKDFLDNEENEDILEDIVLTLTLFEDREMIEERLKTYAHLFDDKVMKQLKRRRYTGWGRLSRKLINGIRDKQSGKTILDFLKSDGFANRNFMQLIHDDSLTFKEDIQKAQVSGQGDSLHEHIANLAGSPAIKKGILQTVKVVDELVKVMGRHKPENIVIEMARENQTTQKGQKNSRERMKRIEEGIKELGSQILKEHPVENTQLQNEKLYLYYLQNGRDMYVDQELDINRLSDYDVDHIVPQSFLKDDSIDNKVLTRSDKARGKSDNVPSEEVVKKMKNYWRQLLNAKLITQRKFDNLTKAERGGLSELDKAGFIKRQLVETRQITKHVAQILDSRMNTKYDENDKLIREVKVITLKSKLVSDFRKDFQFYKVREINNYHHAHDAYLNAVVGTALIKKYPKLESEFVYGDYKVYDVRKMIAKSEQEIGKATAKYFFYSNIMNFFKTEITLANGEIRKRPLIETNGETGEIVWDKGRDFATVRKVLSMPQVNIVKKTEVQTGGFSKESILPKRNSDKLIARKKDWDPKKYGGFDSPTVAYSVLVVAKVEKGKSKKLKSVKELLGITIMERSSFEKNPIDFLEAKGYKEVKKDLIIKLPKYSLFELENGRKRMLASAGELQKGNELALPSKYVNFLYLASHYEKLKGSPEDNEQKQLFVEQHKHYLDEIIEQISEFSKRVILADANLDKVLSAYNKHRDKPIREQAENIIHLFTLTNLGAPAAFKYFDTTIDRKRYTSTKEVLDATLIHQSITGLYETRIDLSQLGGDGGGGGGGGTLNIEDEYRLHETSKEPDVSLGSTWLSDFPQAWAETGGMGLAVRQAPLIIPLKATSTPVSIKQYPMSQEARLGIKPHIQRLLDQGILVPCQSPWNTPLLPVKKPGTNDYRPVQDLREVNKRVEDIHPTVPNPYNLLSGLPPSHQWYTVLDLKDAFFCLRLHPTSQPLFAFEWRDPEMGISGQLTWTRLPQGFKNSPTLFNEALHRDLAGFRIQHPDLILLQYVDDLLLAATSELDCQQGTRALLQTLGDLGYRASAKKAQICQKQVKYLGYLLKEGQRWLTEARKETVMGQPIPKTPRQLREFLGKAGFCRLFIPGFAEMAAPLYPLTKPGTLFNWGPDQQKAFQEIKQALLTAPALGLPDLTKPFELFVDEKQGYAKGVLTQKLGPWRRPVAYLSKKLDPVAAGWPPCLRMVAAIAVLTKDAGKLTMGQPLVILAPHAVEALVKQPPDRWLSNARMTHYQALLLDTDRVQFGPVVALNPATLLPLPEEGLQHDCLDILAEAHGTRSDLMDQPLPDADHTWYTDGSSFLQEGQRKAGAAVTTETEVIWARALPAGTSAQRAELIALTQALKMAEGKKLNVYTDSRYAFATAHIHGEIYRRRGWLTSEGKEIKNKDEILALLKALFLPKRLSIIHCPGHQKGNSAEARGNRMADQAAREVATRETPETSTLLAGKRTADGSEFEKRTADGSEFESPKKKAKVE

SEQ ID NO: 2416 - protein, 2094 aa, synthetic construct
MPAAKRVKLDGGDKKYSIGLDIGTNSVGWAVITDEYKVPSKKFKVLGNTDRHSIKKNLIGALLFDSGETAEATRLKRTARRRYTRRKNRICYLQEIFSNEMAKVDDSFFHRLEESFLVEEDKKHERHPIFGNIVDEVAYHEKYPTIYHLRKKLVDSTDKADLRLIYLALAHMIKFRGHFLIEGDLNPDNSDVDKLFIQLVQTYNQLFEENPINASGVDAKAILSARLSKSRRLENLIAQLPGEKKNGLFGNLIALSLGLTPNFKSNFDLAEDAKLQLSKDTYDDDLDNLLAQIGDQYADLFLAAKNLSDAILLSDILRVNTEITKAPLSASMIKRYDEHHQDLTLLKALVRQQLPEKYKEIFFDQSKNGYAGYIDGGASQEEFYKFIKPILEKMDGTEELLVKLNREDLLRKQRTFDNGSIPHQIHLGELHAILRRQEDFYPFLKDNREKIEKILTFRIPYYVGPLARGNSRFAWMTRKSEETITPWNFEEVVDKGASAQSFIERMTNFDKNLPNEKVLPKHSLLYEYFTVYNELTKVKYVTEGMRKPAFLSGEQKKAIVDLLFKTNRKVTVKQLKEDYFKKIECFDSVEISGVEDRFNASLGTYHDLLKIIKDKDFLDNEENEDILEDIVLTLTLFEDREMIEERLKTYAHLFDDKVMKQLKRRRYTGWGRLSRKLINGIRDKQSGKTILDFLKSDGFANRNFMQLIHDDSLTFKEDIQKAQVSGQGDSLHEHIANLAGSPAIKKGILQTVKVVDELVKVMGRHKPENIVIEMARENQTTQKGQKNSRERMKRIEEGIKELGSQILKEHPVENTQLQNEKLYLYYLQNGRDMYVDQELDINRLSDYDVDHIVPQSFLKDDSIDNKVLTRSDKARGKSDNVPSEEVVKKMKNYWRQLLNAKLITQRKFDNLTKAERGGLSELDKAGFIKRQLVETRQITKHVAQILDSRMNTKYDENDKLIREVKVITLKSKLVSDFRKDFQFYKVREINNYHHAHDAYLNAVVGTALIKKYPKLESEFVYGDYKVYDVRKMIAKSEQEIGKATAKYFFYSNIMNFFKTEITLANGEIRKRPLIETNGETGEIVWDKGRDFATVRKVLSMPQVNIVKKTEVQTGGFSKESILPKRNSDKLIARKKDWDPKKYGGFDSPTVAYSVLVVAKVEKGKSKKLKSVKELLGITIMERSSFEKNPIDFLEAKGYKEVKKDLIIKLPKYSLFELENGRKRMLASAGELQKGNELALPSKYVNFLYLASHYEKLKGSPEDNEQKQLFVEQHKHYLDEIIEQISEFSKRVILADANLDKVLSAYNKHRDKPIREQAENIIHLFTLTNLGAPAAFKYFDTTIDRKRYTSTKEVLDATLIHQSITGLYETRIDLSQLGGDGGGGGGGSPAPGGTLNIEDEYRLHETSKEPDVSLGSTWLSDFPQAWAETGGMGLAVRQAPLIIPLKATSTPVSIKQYPMSQEARLGIKPHIQRLLDQGILVPCQSPWNTPLLPVKKPGTNDYRPVQDLREVNKRVEDIHPTVPNPYNLLSGLPPSHQWYTVLDLKDAFFCLRLHPTSQPLFAFEWRDPEMGISGQLTWTRLPQGFKNSPTLFNEALHRDLAGFRIQHPDLILLQYVDDLLLAATSELDCQQGTRALLQTLGDLGYRASAKKAQICQKQVKYLGYLLKEGQRWLTEARKETVMGQPIPKTPRQLREFLGKAGFCRLFIPGFAEMAAPLYPLTKPGTLFNWGPDQQKAFQEIKQALLTAPALGLPDLTKPFELFVDEKQGYAKGVLTQKLGPWRRPVAYLSKKLDPVAAGWPPCLRMVAAIAVLTKDAGKLTMGQPLVILAPHAVEALVKQPPDRWLSNARMTHYQALLLDTDRVQFGPVVALNPATLLPLPEEGLQHDCLDILAEAHGTRSDLMDQPLPDADHTWYTDGSSFLQEGQRKAGAAVTTETEVIWARALPAGTSAQRAELIALTQALKMAEGKKLNVYTDSRYAFATAHIHGEIYRRRGWLTSEGKEIKNKDEILALLKALFLPKRLSIIHCPGHQKGNSAEARGNRMADQAAREVATRETPETSTLLAGKRTADGSEFEKRTADGSEFESPKKKAKVE

SEQ ID NO: 2417 - protein, 2100 aa, synthetic construct
MPAAKRVKLDGGDKKYSIGLDIGTNSVGWAVITDEYKVPSKKFKVLGNTDRHSIKKNLIGALLFDSGETAEATRLKRTARRRYTRRKNRICYLQEIFSNEMAKVDDSFFHRLEESFLVEEDKKHERHPIFGNIVDEVAYHEKYPTIYHLRKKLVDSTDKADLRLIYLALAHMIKFRGHFLIEGDLNPDNSDVDKLFIQLVQTYNQLFEENPINASGVDAKAILSARLSKSRRLENLIAQLPGEKKNGLFGNLIALSLGLTPNFKSNFDLAEDAKLQLSKDTYDDDLDNLLAQIGDQYADLFLAAKNLSDAILLSDILRVNTEITKAPLSASMIKRYDEHHQDLTLLKALVRQQLPEKYKEIFFDQSKNGYAGYIDGGASQEEFYKFIKPILEKMDGTEELLVKLNREDLLRKQRTFDNGSIPHQIHLGELHAILRRQEDFYPFLKDNREKIEKILTFRIPYYVGPLARGNSRFAWMTRKSEETITPWNFEEVVDKGASAQSFIERMTNFDKNLPNEKVLPKHSLLYEYFTVYNELTKVKYVTEGMRKPAFLSGEQKKAIVDLLFKTNRKVTVKQLKEDYFKKIECFDSVEISGVEDRFNASLGTYHDLLKIIKDKDFLDNEENEDILEDIVLTLTLFEDREMIEERLKTYAHLFDDKVMKQLKRRRYTGWGRLSRKLINGIRDKQSGKTILDFLKSDGFANRNFMQLIHDDSLTFKEDIQKAQVSGQGDSLHEHIANLAGSPAIKKGILQTVKVVDELVKVMGRHKPENIVIEMARENQTTQKGQKNSRERMKRIEEGIKELGSQILKEHPVENTQLQNEKLYLYYLQNGRDMYVDQELDINRLSDYDVDHIVPQSFLKDDSIDNKVLTRSDKARGKSDNVPSEEVVKKMKNYWRQLLNAKLITQRKFDNLTKAERGGLSELDKAGFIKRQLVETRQITKHVAQILDSRMNTKYDENDKLIREVKVITLKSKLVSDFRKDFQFYKVREINNYHHAHDAYLNAVVGTALIKKYPKLESEFVYGDYKVYDVRKMIAKSEQEIGKATAKYFFYSNIMNFFKTEITLANGEIRKRPLIETNGETGEIVWDKGRDFATVRKVLSMPQVNIVKKTEVQTGGFSKESILPKRNSDKLIARKKDWDPKKYGGFDSPTVAYSVLVVAKVEKGKSKKLKSVKELLGITIMERSSFEKNPIDFLEAKGYKEVKKDLIIKLPKYSLFELENGRKRMLASAGELQKGNELALPSKYVNFLYLASHYEKLKGSPEDNEQKQLFVEQHKHYLDEIIEQISEFSKRVILADANLDKVLSAYNKHRDKPIREQAENIIHLFTLTNLGAPAAFKYFDTTIDRKRYTSTKEVLDATLIHQSITGLYETRIDLSQLGGDGGGGSGGSGGSGGSGGSGGTLNIEDEYRLHETSKGPDVPLGSTWLSDFPQAWAETGGMGLAFRQAPLIISLKATSTPVSIKQYPMSQEARLGIKPHIQRLLDQGILVPCQSPWNTPLLPVKKPGTNDYRPVQDLREVNKRVEDIHPTVPNPYNLLSGLPPSHQWYTVLDLKDAFFCLRLHPTSQSLFAFEWKDPEMGISGQLTWTRLPQGFKNSPTLFDEALHRDLADFRIQHPDLILLQYVDDLLLAATSELDCQQGTRALLQTLGDLGYRASAKKAQICQKQVKYLGYLLKEGQRWLTEARKETVMGQPTPKTPRQLREFLGTAGLCRLWIPGFAEMAAPLYPLTKTGTLFKWGPDQQKAYQEIKQALLTAPALGLPDLTKPFELFVDEKQGYAKGVLTQKLGPWRRPVAYLSKKLDPVAAGWPPCLRMVAAIAVLTKDVGKLTMGQPLVILAPHAVEALVKQPPDRWLSNARMTHYQALLLDTDRVQFGPIVALNPATLLPLPEEGLQHDCLDILAEAHGTRPDLTDQPLPDADHTWYTDGSSFLQEGQRRAGAAVTTETEVIWAKALPAGTSAQRAELIALTQALKMAAGKKLNVYTDSRYAFATAHIHGEIYRRRGLLTSEGKEIKNKDEILALLKALFLPKRLSIIHCPGHQKGNHAEARGNRMADQAAREVATRETPETSTLLAGKRTADGSEFEKRTADGSEFESPKKKAKVE

SEQ ID NO: 2418 - protein, 2096 aa, synthetic construct
MPAAKRVKLDGGDKKYSIGLDIGTNSVGWAVITDEYKVPSKKFKVLGNTDRHSIKKNLIGALLFDSGETAEATRLKRTARRRYTRRKNRICYLQEIFSNEMAKVDDSFFHRLEESFLVEEDKKHERHPIFGNIVDEVAYHEKYPTIYHLRKKLVDSTDKADLRLIYLALAHMIKFRGHFLIEGDLNPDNSDVDKLFIQLVQTYNQLFEENPINASGVDAKAILSARLSKSRRLENLIAQLPGEKKNGLFGNLIALSLGLTPNFKSNFDLAEDAKLQLSKDTYDDDLDNLLAQIGDQYADLFLAAKNLSDAILLSDILRVNTEITKAPLSASMIKRYDEHHQDLTLLKALVRQQLPEKYKEIFFDQSKNGYAGYIDGGASQEEFYKFIKPILEKMDGTEELLVKLNREDLLRKQRTFDNGSIPHQIHLGELHAILRRQEDFYPFLKDNREKIEKILTFRIPYYVGPLARGNSRFAWMTRKSEETITPWNFEEVVDKGASAQSFIERMTNFDKNLPNEKVLPKHSLLYEYFTVYNELTKVKYVTEGMRKPAFLSGEQKKAIVDLLFKTNRKVTVKQLKEDYFKKIECFDSVEISGVEDRFNASLGTYHDLLKIIKDKDFLDNEENEDILEDIVLTLTLFEDREMIEERLKTYAHLFDDKVMKQLKRRRYTGWGRLSRKLINGIRDKQSGKTILDFLKSDGFANRNFMQLIHDDSLTFKEDIQKAQVSGQGDSLHEHIANLAGSPAIKKGILQTVKVVDELVKVMGRHKPENIVIEMARENQTTQKGQKNSRERMKRIEEGIKELGSQILKEHPVENTQLQNEKLYLYYLQNGRDMYVDQELDINRLSDYDVDHIVPQSFLKDDSIDNKVLTRSDKARGKSDNVPSEEVVKKMKNYWRQLLNAKLITQRKFDNLTKAERGGLSELDKAGFIKRQLVETRQITKHVAQILDSRMNTKYDENDKLIREVKVITLKSKLVSDFRKDFQFYKVREINNYHHAHDAYLNAVVGTALIKKYPKLESEFVYGDYKVYDVRKMIAKSEQEIGKATAKYFFYSNIMNFFKTEITLANGEIRKRPLIETNGETGEIVWDKGRDFATVRKVLSMPQVNIVKKTEVQTGGFSKESILPKRNSDKLIARKKDWDPKKYGGFDSPTVAYSVLVVAKVEKGKSKKLKSVKELLGITIMERSSFEKNPIDFLEAKGYKEVKKDLIIKLPKYSLFELENGRKRMLASAGELQKGNELALPSKYVNFLYLASHYEKLKGSPEDNEQKQLFVEQHKHYLDEIIEQISEFSKRVILADANLDKVLSAYNKHRDKPIREQAENIIHLFTLTNLGAPAAFKYFDTTIDRKRYTSTKEVLDATLIHQSITGLYETRIDLSQLGGDGGEAAAKGGGPAPGGTLNIEDEYRLHETSKGPDVPLGSTWLSDFPQAWAETGGMGLAFRQAPLIISLKATSTPVSIKQYPMSQEARLGIKPHIQRLLDQGILVPCQSPWNTPLLPVKKPGTNDYRPVQDLREVNKRVEDIHPTVPNPYNLLSGLPPSHQWYTVLDLKDAFFCLRLHPTSQSLFAFEWKDPEMGISGQLTWTRLPQGFKNSPTLFDEALHRDLADFRIQHPDLILLQYVDDLLLAATSELDCQQGTRALLQTLGDLGYRASAKKAQICQKQVKYLGYLLKEGQRWLTEARKETVMGQPTPKTPRQLREFLGTAGLCRLWIPGFAEMAAPLYPLTKTGTLFKWGPDQQKAYQEIKQALLTAPALGLPDLTKPFELFVDEKQGYAKGVLTQKLGPWRRPVAYLSKKLDPVAAGWPPCLRMVAAIAVLTKDVGKLTMGQPLVILAPHAVEALVKQPPDRWLSNARMTHYQALLLDTDRVQFGPIVALNPATLLPLPEEGLQHDCLDILAEAHGTRPDLTDQPLPDADHTWYTDGSSFLQEGQRRAGAAVTTETEVIWAKALPAGTSAQRAELIALTQALKMAAGKKLNVYTDSRYAFATAHIHGEIYRRRGLLTSEGKEIKNKDEILALLKALFLPKRLSIIHCPGHQKGNHAEARGNRMADQAAREVATRETPETSTLLAGKRTADGSEFEKRTADGSEFESPKKKAKVE

SEQ ID NO: 2419 - protein, 2094 aa, synthetic construct
MPAAKRVKLDGGDKKYSIGLDIGTNSVGWAVITDEYKVPSKKFKVLGNTDRHSIKKNLIGALLFDSGETAEATRLKRTARRRYTRRKNRICYLQEIFSNEMAKVDDSFFHRLEESFLVEEDKKHERHPIFGNIVDEVAYHEKYPTIYHLRKKLVDSTDKADLRLIYLALAHMIKFRGHFLIEGDLNPDNSDVDKLFIQLVQTYNQLFEENPINASGVDAKAILSARLSKSRRLENLIAQLPGEKKNGLFGNLIALSLGLTPNFKSNFDLAEDAKLQLSKDTYDDDLDNLLAQIGDQYADLFLAAKNLSDAILLSDILRVNTEITKAPLSASMIKRYDEHHQDLTLLKALVRQQLPEKYKEIFFDQSKNGYAGYIDGGASQEEFYKFIKPILEKMDGTEELLVKLNREDLLRKQRTFDNGSIPHQIHLGELHAILRRQEDFYPFLKDNREKIEKILTFRIPYYVGPLARGNSRFAWMTRKSEETITPWNFEEVVDKGASAQSFIERMTNFDKNLPNEKVLPKHSLLYEYFTVYNELTKVKYVTEGMRKPAFLSGEQKKAIVDLLFKTNRKVTVKQLKEDYFKKIECFDSVEISGVEDRFNASLGTYHDLLKIIKDKDFLDNEENEDILEDIVLTLTLFEDREMIEERLKTYAHLFDDKVMKQLKRRRYTGWGRLSRKLINGIRDKQSGKTILDFLKSDGFANRNFMQLIHDDSLTFKEDIQKAQVSGQGDSLHEHIANLAGSPAIKKGILQTVKVVDELVKVMGRHKPENIVIEMARENQTTQKGQKNSRERMKRIEEGIKELGSQILKEHPVENTQLQNEKLYLYYLQNGRDMYVDQELDINRLSDYDVDHIVPQSFLKDDSIDNKVLTRSDKARGKSDNVPSEEVVKKMKNYWRQLLNAKLITQRKFDNLTKAERGGLSELDKAGFIKRQLVETRQITKHVAQILDSRMNTKYDENDKLIREVKVITLKSKLVSDFRKDFQFYKVREINNYHHAHDAYLNAVVGTALIKKYPKLESEFVYGDYKVYDVRKMIAKSEQEIGKATAKYFFYSNIMNFFKTEITLANGEIRKRPLIETNGETGEIVWDKGRDFATVRKVLSMPQVNIVKKTEVQTGGFSKESILPKRNSDKLIARKKDWDPKKYGGFDSPTVAYSVLVVAKVEKGKSKKLKSVKELLGITIMERSSFEKNPIDFLEAKGYKEVKKDLIIKLPKYSLFELENGRKRMLASAGELQKGNELALPSKYVNFLYLASHYEKLKGSPEDNEQKQLFVEQHKHYLDEIIEQISEFSKRVILADANLDKVLSAYNKHRDKPIREQAENIIHLFTLTNLGAPAAFKYFDTTIDRKRYTSTKEVLDATLIHQSITGLYETRIDLSQLGGDGGGSSGGSGGGGGTLNIEDEYRLHETSKGPDVPLGSTWLSDFPQAWAETGGMGLAFRQAPLIISLKATSTPVSIKQYPMSQEARLGIKPHIQRLLDQGILVPCQSPWNTPLLPVKKPGTNDYRPVQDLREVNKRVEDIHPTVPNPYNLLSGLPPSHQWYTVLDLKDAFFCLRLHPTSQSLFAFEWKDPEMGISGQLTWTRLPQGFKNSPTLFDEALHRDLADFRIQHPDLILLQYVDDLLLAATSELDCQQGTRALLQTLGDLGYRASAKKAQICQKQVKYLGYLLKEGQRWLTEARKETVMGQPTPKTPRQLREFLGTAGLCRLWIPGFAEMAAPLYPLTKTGTLFKWGPDQQKAYQEIKQALLTAPALGLPDLTKPFELFVDEKQGYAKGVLTQKLGPWRRPVAYLSKKLDPVAAGWPPCLRMVAAIAVLTKDVGKLTMGQPLVILAPHAVEALVKQPPDRWLSNARMTHYQALLLDTDRVQFGPIVALNPATLLPLPEEGLQHDCLDILAEAHGTRPDLTDQPLPDADHTWYTDGSSFLQEGQRRAGAAVTTETEVIWAKALPAGTSAQRAELIALTQALKMAAGKKLNVYTDSRYAFATAHIHGEIYRRRGLLTSEGKEIKNKDEILALLKALFLPKRLSIIHCPGHQKGNHAEARGNRMADQAAREVATRETPETSTLLAGKRTADGSEFEKRTADGSEFESPKKKAKVE

SEQ ID NO: 2420 - protein, 2096 aa, synthetic construct
MPAAKRVKLDGGDKKYSIGLDIGTNSVGWAVITDEYKVPSKKFKVLGNTDRHSIKKNLIGALLFDSGETAEATRLKRTARRRYTRRKNRICYLQEIFSNEMAKVDDSFFHRLEESFLVEEDKKHERHPIFGNIVDEVAYHEKYPTIYHLRKKLVDSTDKADLRLIYLALAHMIKFRGHFLIEGDLNPDNSDVDKLFIQLVQTYNQLFEENPINASGVDAKAILSARLSKSRRLENLIAQLPGEKKNGLFGNLIALSLGLTPNFKSNFDLAEDAKLQLSKDTYDDDLDNLLAQIGDQYADLFLAAKNLSDAILLSDILRVNTEITKAPLSASMIKRYDEHHQDLTLLKALVRQQLPEKYKEIFFDQSKNGYAGYIDGGASQEEFYKFIKPILEKMDGTEELLVKLNREDLLRKQRTFDNGSIPHQIHLGELHAILRRQEDFYPFLKDNREKIEKILTFRIPYYVGPLARGNSRFAWMTRKSEETITPWNFEEVVDKGASAQSFIERMTNFDKNLPNEKVLPKHSLLYEYFTVYNELTKVKYVTEGMRKPAFLSGEQKKAIVDLLFKTNRKVTVKQLKEDYFKKIECFDSVEISGVEDRFNASLGTYHDLLKIIKDKDFLDNEENEDILEDIVLTLTLFEDREMIEERLKTYAHLFDDKVMKQLKRRRYTGWGRLSRKLINGIRDKQSGKTILDFLKSDGFANRNFMQLIHDDSLTFKEDIQKAQVSGQGDSLHEHIANLAGSPAIKKGILQTVKVVDELVKVMGRHKPENIVIEMARENQTTQKGQKNSRERMKRIEEGIKELGSQILKEHPVENTQLQNEKLYLYYLQNGRDMYVDQELDINRLSDYDVDHIVPQSFLKDDSIDNKVLTRSDKARGKSDNVPSEEVVKKMKNYWRQLLNAKLITQRKFDNLTKAERGGLSELDKAGFIKRQLVETRQITKHVAQILDSRMNTKYDENDKLIREVKVITLKSKLVSDFRKDFQFYKVREINNYHHAHDAYLNAVVGTALIKKYPKLESEFVYGDYKVYDVRKMIAKSEQEIGKATAKYFFYSNIMNFFKTEITLANGEIRKRPLIETNGETGEIVWDKGRDFATVRKVLSMPQVNIVKKTEVQTGGFSKESILPKRNSDKLIARKKDWDPKKYGGFDSPTVAYSVLVVAKVEKGKSKKLKSVKELLGITIMERSSFEKNPIDFLEAKGYKEVKKDLIIKLPKYSLFELENGRKRMLASAGELQKGNELALPSKYVNFLYLASHYEKLKGSPEDNEQKQLFVEQHKHYLDEIIEQISEFSKRVILADANLDKVLSAYNKHRDKPIREQAENIIHLFTLTNLGAPAAFKYFDTTIDRKRYTSTKEVLDATLIHQSITGLYETRIDLSQLGGDGGPAPEAAAKGGGGGTLNIEDEYRLHETSKGPDVPLGSTWLSDFPQAWAETGGMGLAFRQAPLIISLKATSTPVSIKQYPMSQEARLGIKPHIQRLLDQGILVPCQSPWNTPLLPVKKPGTNDYRPVQDLREVNKRVEDIHPTVPNPYNLLSGLPPSHQWYTVLDLKDAFFCLRLHPTSQSLFAFEWKDPEMGISGQLTWTRLPQGFKNSPTLFDEALHRDLADFRIQHPDLILLQYVDDLLLAATSELDCQQGTRALLQTLGDLGYRASAKKAQICQKQVKYLGYLLKEGQRWLTEARKETVMGQPTPKTPRQLREFLGTAGLCRLWIPGFAEMAAPLYPLTKTGTLFKWGPDQQKAYQEIKQALLTAPALGLPDLTKPFELFVDEKQGYAKGVLTQKLGPWRRPVAYLSKKLDPVAAGWPPCLRMVAAIAVLTKDVGKLTMGQPLVILAPHAVEALVKQPPDRWLSNARMTHYQALLLDTDRVQFGPIVALNPATLLPLPEEGLQHDCLDILAEAHGTRPDLTDQPLPDADHTWYTDGSSFLQEGQRRAGAAVTTETEVIWAKALPAGTSAQRAELIALTQALKMAAGKKLNVYTDSRYAFATAHIHGEIYRRRGLLTSEGKEIKNKDEILALLKALFLPKRLSIIHCPGHQKGNHAEARGNRMADQAAREVATRETPETSTLLAGKRTADGSEFEKRTADGSEFESPKKKAKVE

SEQ ID NO: 2421 - protein, 2008 aa, synthetic construct
MPAAKRVKLDGGDKKYSIGLDIGTNSVGWAVITDEYKVPSKKFKVLGNTDRHSIKKNLIGALLFDSGETAEATRLKRTARRRYTRRKNRICYLQEIFSNEMAKVDDSFFHRLEESFLVEEDKKHERHPIFGNIVDEVAYHEKYPTIYHLRKKLVDSTDKADLRLIYLALAHMIKFRGHFLIEGDLNPDNSDVDKLFIQLVQTYNQLFEENPINASGVDAKAILSARLSKSRRLENLIAQLPGEKKNGLFGNLIALSLGLTPNFKSNFDLAEDAKLQLSKDTYDDDLDNLLAQIGDQYADLFLAAKNLSDAILLSDILRVNTEITKAPLSASMIKRYDEHHQDLTLLKALVRQQLPEKYKEIFFDQSKNGYAGYIDGGASQEEFYKFIKPILEKMDGTEELLVKLNREDLLRKQRTFDNGSIPHQIHLGELHAILRRQEDFYPFLKDNREKIEKILTFRIPYYVGPLARGNSRFAWMTRKSEETITPWNFEEVVDKGASAQSFIERMTNFDKNLPNEKVLPKHSLLYEYFTVYNELTKVKYVTEGMRKPAFLSGEQKKAIVDLLFKTNRKVTVKQLKEDYFKKIECFDSVEISGVEDRFNASLGTYHDLLKIIKDKDFLDNEENEDILEDIVLTLTLFEDREMIEERLKTYAHLFDDKVMKQLKRRRYTGWGRLSRKLINGIRDKQSGKTILDFLKSDGFANRNFMQLIHDDSLTFKEDIQKAQVSGQGDSLHEHIANLAGSPAIKKGILQTVKVVDELVKVMGRHKPENIVIEMARENQTTQKGQKNSRERMKRIEEGIKELGSQILKEHPVENTQLQNEKLYLYYLQNGRDMYVDQELDINRLSDYDVDHIVPQSFLKDDSIDNKVLTRSDKARGKSDNVPSEEVVKKMKNYWRQLLNAKLITQRKFDNLTKAERGGLSELDKAGFIKRQLVETRQITKHVAQILDSRMNTKYDENDKLIREVKVITLKSKLVSDFRKDFQFYKVREINNYHHAHDAYLNAVVGTALIKKYPKLESEFVYGDYKVYDVRKMIAKSEQEIGKATAKYFFYSNIMNFFKTEITLANGEIRKRPLIETNGETGEIVWDKGRDFATVRKVLSMPQVNIVKKTEVQTGGFSKESILPKRNSDKLIARKKDWDPKKYGGFDSPTVAYSVLVVAKVEKGKSKKLKSVKELLGITIMERSSFEKNPIDFLEAKGYKEVKKDLIIKLPKYSLFELENGRKRMLASAGELQKGNELALPSKYVNFLYLASHYEKLKGSPEDNEQKQLFVEQHKHYLDEIIEQISEFSKRVILADANLDKVLSAYNKHRDKPIREQAENIIHLFTLTNLGAPAAFKYFDTTIDRKRYTSTKEVLDATLIHQSITGLYETRIDLSQLGGDGGGGSGGSGGSGGSGGSGGSGGGVLDAPPSHIGLEHLPPPPEVPQFPLNLERLQALQDLVHRSLEAGYISPWDGPGNNPVFPVRKPNGAWRFVHDLRVTNALTKPIPALSPGPPDLTAIPTHLPHIICLDLKDAFFQIPVEDRFRSYFAFTLPTPGGLQPHRRFAWRVLPQGFINSPALFERALQEPLRQVSAAFSQSLLVSYMDDILYVSPTEEQRLQCYQTMAAHLRDLGFQVASEKTRQTPSPVPFLGQMVHERMVTYQSLPTLQISSPISLHQLQTVLGDLQWVSRGTPTTRRPLQLLYSSLKGIDDPRAIIHLSPEQQQGIAELRQALSHNARSRYNEQEPLLAYVHLTRAGSTLVLFQKGAQFPLAYFQTPLTDNQASPWGLLLLLGCQYLQAQALSSYAKTILKYYHNLPKTSLDNWIQSSEDPRVQELLQLWPQISSQGIQPPGPWKTLVTRAEVFLTPQFSPEPIPAALCLFSDGAARRGAYCLWKDHLLDFQAVPAPESAQKGELAGLLAGLAAAPPEPLNIWVDSKYLYSLLRTLVLGAWLQPDPVPSYALLYKSLLRHPAIFVGHVRSHSSASHPIASLNNYVDQLAGKRTADGSEFEKRTADGSEFESPKKKAKVE

SEQ ID NO: 2422 - protein, 2093 aa, synthetic construct
MPAAKRVKLDGGDKKYSIGLDIGTNSVGWAVITDEYKVPSKKFKVLGNTDRHSIKKNLIGALLFDSGETAEATRLKRTARRRYTRRKNRICYLQEIFSNEMAKVDDSFFHRLEESFLVEEDKKHERHPIFGNIVDEVAYHEKYPTIYHLRKKLVDSTDKADLRLIYLALAHMIKFRGHFLIEGDLNPDNSDVDKLFIQLVQTYNQLFEENPINASGVDAKAILSARLSKSRRLENLIAQLPGEKKNGLFGNLIALSLGLTPNFKSNFDLAEDAKLQLSKDTYDDDLDNLLAQIGDQYADLFLAAKNLSDAILLSDILRVNTEITKAPLSASMIKRYDEHHQDLTLLKALVRQQLPEKYKEIFFDQSKNGYAGYIDGGASQEEFYKFIKPILEKMDGTEELLVKLNREDLLRKQRTFDNGSIPHQIHLGELHAILRRQEDFYPFLKDNREKIEKILTFRIPYYVGPLARGNSRFAWMTRKSEETITPWNFEEVVDKGASAQSFIERMTNFDKNLPNEKVLPKHSLLYEYFTVYNELTKVKYVTEGMRKPAFLSGEQKKAIVDLLFKTNRKVTVKQLKEDYFKKIECFDSVEISGVEDRFNASLGTYHDLLKIIKDKDFLDNEENEDILEDIVLTLTLFEDREMIEERLKTYAHLFDDKVMKQLKRRRYTGWGRLSRKLINGIRDKQSGKTILDFLKSDGFANRNFMQLIHDDSLTFKEDIQKAQVSGQGDSLHEHIANLAGSPAIKKGILQTVKVVDELVKVMGRHKPENIVIEMARENQTTQKGQKNSRERMKRIEEGIKELGSQILKEHPVENTQLQNEKLYLYYLQNGRDMYVDQELDINRLSDYDVDHIVPQSFLKDDSIDNKVLTRSDKARGKSDNVPSEEVVKKMKNYWRQLLNAKLITQRKFDNLTKAERGGLSELDKAGFIKRQLVETRQITKHVAQILDSRMNTKYDENDKLIREVKVITLKSKLVSDFRKDFQFYKVREINNYHHAHDAYLNAVVGTALIKKYPKLESEFVYGDYKVYDVRKMIAKSEQEIGKATAKYFFYSNIMNFFKTEITLANGEIRKRPLIETNGETGEIVWDKGRDFATVRKVLSMPQVNIVKKTEVQTGGFSKESILPKRNSDKLIARKKDWDPKKYGGFDSPTVAYSVLVVAKVEKGKSKKLKSVKELLGITIMERSSFEKNPIDFLEAKGYKEVKKDLIIKLPKYSLFELENGRKRMLASAGELQKGNELALPSKYVNFLYLASHYEKLKGSPEDNEQKQLFVEQHKHYLDEIIEQISEFSKRVILADANLDKVLSAYNKHRDKPIREQAENIIHLFTLTNLGAPAAFKYFDTTIDRKRYTSTKEVLDATLIHQSITGLYETRIDLSQLGGDGGEAAAKPAPGGTLNIEDEYRLHETSKGPDVPLGSTWLSDFPQAWAETGGMGLAFRQAPLIISLKATSTPVSIKQYPMSQEARLGIKPHIQRLLDQGILVPCQSPWNTPLLPVKKPGTNDYRPVQDLREVNKRVEDIHPTVPNPYNLLSGLPPSHQWYTVLDLKDAFFCLRLHPTSQSLFAFEWKDPEMGISGQLTWTRLPQGFKNSPTLFNEALHRDLADFRIQHPDLILLQYVDDLLLAATSELDCQQGTRALLQTLGDLGYRASAKKAQICQKQVKYLGYLLKEGQRWLTEARKETVMGQPTPKTPRQLREFLGTAGLCRLWIPGFAEMAAPLYPLTKPGTLFKWGPDQQKAYQEIKQALLTAPALGLPDLTKPFELFVDEKQGYAKGVLTQKLGPWRRPVAYLSKKLDPVAAGWPPCLRMVAAIAVLTKDVGKLTMGQPLVILAPHAVEALVKQPPDRWLSNARMTHYQALLLDTDRVQFGPIVALNPATLLPLPEEGLQHDCLDILAEAHGTRPDLTDQPLPDADHTWYTDGSSFLQEGQRRAGAAVTTETEVIWAKALPAGTSAQRAELIALTQALKMAAGKKLNVYTDSRYAFATAHIHGEIYRRRGWLTSEGKEIKNKDEILALLKALFLPKRLSIIHCPGHQKGNHAEARGNRMADQAAREVATRETPETSTLLAGKRTADGSEFEKRTADGSEFESPKKKAKVE

SEQ ID NO: 2423 - protein, 2096 aa, synthetic construct
MPAAKRVKLDGGDKKYSIGLDIGTNSVGWAVITDEYKVPSKKFKVLGNTDRHSIKKNLIGALLFDSGETAEATRLKRTARRRYTRRKNRICYLQEIFSNEMAKVDDSFFHRLEESFLVEEDKKHERHPIFGNIVDEVAYHEKYPTIYHLRKKLVDSTDKADLRLIYLALAHMIKFRGHFLIEGDLNPDNSDVDKLFIQLVQTYNQLFEENPINASGVDAKAILSARLSKSRRLENLIAQLPGEKKNGLFGNLIALSLGLTPNFKSNFDLAEDAKLQLSKDTYDDDLDNLLAQIGDQYADLFLAAKNLSDAILLSDILRVNTEITKAPLSASMIKRYDEHHQDLTLLKALVRQQLPEKYKEIFFDQSKNGYAGYIDGGASQEEFYKFIKPILEKMDGTEELLVKLNREDLLRKQRTFDNGSIPHQIHLGELHAILRRQEDFYPFLKDNREKIEKILTFRIPYYVGPLARGNSRFAWMTRKSEETITPWNFEEVVDKGASAQSFIERMTNFDKNLPNEKVLPKHSLLYEYFTVYNELTKVKYVTEGMRKPAFLSGEQKKAIVDLLFKTNRKVTVKQLKEDYFKKIECFDSVEISGVEDRFNASLGTYHDLLKIIKDKDFLDNEENEDILEDIVLTLTLFEDREMIEERLKTYAHLFDDKVMKQLKRRRYTGWGRLSRKLINGIRDKQSGKTILDFLKSDGFANRNFMQLIHDDSLTFKEDIQKAQVSGQGDSLHEHIANLAGSPAIKKGILQTVKVVDELVKVMGRHKPENIVIEMARENQTTQKGQKNSRERMKRIEEGIKELGSQILKEHPVENTQLQNEKLYLYYLQNGRDMYVDQELDINRLSDYDVDHIVPQSFLKDDSIDNKVLTRSDKARGKSDNVPSEEVVKKMKNYWRQLLNAKLITQRKFDNLTKAERGGLSELDKAGFIKRQLVETRQITKHVAQILDSRMNTKYDENDKLIREVKVITLKSKLVSDFRKDFQFYKVREINNYHHAHDAYLNAVVGTALIKKYPKLESEFVYGDYKVYDVRKMIAKSEQEIGKATAKYFFYSNIMNFFKTEITLANGEIRKRPLIETNGETGEIVWDKGRDFATVRKVLSMPQVNIVKKTEVQTGGFSKESILPKRNSDKLIARKKDWDPKKYGGFDSPTVAYSVLVVAKVEKGKSKKLKSVKELLGITIMERSSFEKNPIDFLEAKGYKEVKKDLIIKLPKYSLFELENGRKRMLASAGELQKGNELALPSKYVNFLYLASHYEKLKGSPEDNEQKQLFVEQHKHYLDEIIEQISEFSKRVILADANLDKVLSAYNKHRDKPIREQAENIIHLFTLTNLGAPAAFKYFDTTIDRKRYTSTKEVLDATLIHQSITGLYETRIDLSQLGGDGGPAPAPAPAPAPGGTLNIEDEYRLHETSKGPDVPLGSTWLSDFPQAWAETGGMGLAFRQAPLIISLKATSTPVSIKQYPMSQEARLGIKPHIQRLLDQGILVPCQSPWNTPLLPVKKPGTNDYRPVQDLREVNKRVEDIHPTVPNPYNLLSGLPPSHQWYTVLDLKDAFFCLRLHPTSQSLFAFEWKDPEMGISGQLTWTRLPQGFKNSPTLFNEALHRDLADFRIQHPDLILLQYVDDLLLAATSELDCQQGTRALLQTLGDLGYRASAKKAQICQKQVKYLGYLLKEGQRWLTEARKETVMGQPTPKTPRQLREFLGTAGLCRLWIPGFAEMAAPLYPLTKPGTLFKWGPDQQKAYQEIKQALLTAPALGLPDLTKPFELFVDEKQGYAKGVLTQKLGPWRRPVAYLSKKLDPVAAGWPPCLRMVAAIAVLTKDVGKLTMGQPLVILAPHAVEALVKQPPDRWLSNARMTHYQALLLDTDRVQFGPIVALNPATLLPLPEEGLQHDCLDILAEAHGTRPDLTDQPLPDADHTWYTDGSSFLQEGQRRAGAAVTTETEVIWAKALPAGTSAQRAELIALTQALKMAAGKKLNVYTDSRYAFATAHIHGEIYRRRGWLTSEGKEIKNKDEILALLKALFLPKRLSIIHCPGHQKGNHAEARGNRMADQAAREVATRETPETSTLLAGKRTADGSEFEKRTADGSEFESPKKKAKVE

SEQ ID NO: 2424 - protein, 2089 aa, synthetic construct
MPAAKRVKLDGGDKKYSIGLDIGTNSVGWAVITDEYKVPSKKFKVLGNTDRHSIKKNLIGALLFDSGETAEATRLKRTARRRYTRRKNRICYLQEIFSNEMAKVDDSFFHRLEESFLVEEDKKHERHPIFGNIVDEVAYHEKYPTIYHLRKKLVDSTDKADLRLIYLALAHMIKFRGHFLIEGDLNPDNSDVDKLFIQLVQTYNQLFEENPINASGVDAKAILSARLSKSRRLENLIAQLPGEKKNGLFGNLIALSLGLTPNFKSNFDLAEDAKLQLSKDTYDDDLDNLLAQIGDQYADLFLAAKNLSDAILLSDILRVNTEITKAPLSASMIKRYDEHHQDLTLLKALVRQQLPEKYKEIFFDQSKNGYAGYIDGGASQEEFYKFIKPILEKMDGTEELLVKLNREDLLRKQRTFDNGSIPHQIHLGELHAILRRQEDFYPFLKDNREKIEKILTFRIPYYVGPLARGNSRFAWMTRKSEETITPWNFEEVVDKGASAQSFIERMTNFDKNLPNEKVLPKHSLLYEYFTVYNELTKVKYVTEGMRKPAFLSGEQKKAIVDLLFKTNRKVTVKQLKEDYFKKIECFDSVEISGVEDRFNASLGTYHDLLKIIKDKDFLDNEENEDILEDIVLTLTLFEDREMIEERLKTYAHLFDDKVMKQLKRRRYTGWGRLSRKLINGIRDKQSGKTILDFLKSDGFANRNFMQLIHDDSLTFKEDIQKAQVSGQGDSLHEHIANLAGSPAIKKGILQTVKVVDELVKVMGRHKPENIVIEMARENQTTQKGQKNSRERMKRIEEGIKELGSQILKEHPVENTQLQNEKLYLYYLQNGRDMYVDQELDINRLSDYDVDHIVPQSFLKDDSIDNKVLTRSDKARGKSDNVPSEEVVKKMKNYWRQLLNAKLITQRKFDNLTKAERGGLSELDKAGFIKRQLVETRQITKHVAQILDSRMNTKYDENDKLIREVKVITLKSKLVSDFRKDFQFYKVREINNYHHAHDAYLNAVVGTALIKKYPKLESEFVYGDYKVYDVRKMIAKSEQEIGKATAKYFFYSNIMNFFKTEITLANGEIRKRPLIETNGETGEIVWDKGRDFATVRKVLSMPQVNIVKKTEVQTGGFSKESILPKRNSDKLIARKKDWDPKKYGGFDSPTVAYSVLVVAKVEKGKSKKLKSVKELLGITIMERSSFEKNPIDFLEAKGYKEVKKDLIIKLPKYSLFELENGRKRMLASAGELQKGNELALPSKYVNFLYLASHYEKLKGSPEDNEQKQLFVEQHKHYLDEIIEQISEFSKRVILADANLDKVLSAYNKHRDKPIREQAENIIHLFTLTNLGAPAAFKYFDTTIDRKRYTSTKEVLDATLIHQSITGLYETRIDLSQLGGDGGGGGGGGTLNIEDEYRLHETSKGPDVPLGSTWLSDFPQAWAETGGMGLAFRQAPLIISLKATSTPVSIKQYPMSQEARLGIKPHIQRLLDQGILVPCQSPWNTPLLPVKKPGTNDYRPVQDLREVNKRVEDIHPTVPNPYNLLSGLPPSHQWYTVLDLKDAFFCLRLHPTSQSLFAFEWKDPEMGISGQLTWTRLPQGFKNSPTLFNEALHRDLADFRIQHPDLILLQYVDDLLLAATSELDCQQGTRALLQTLGDLGYRASAKKAQICQKQVKYLGYLLKEGQRWLTEARKETVMGQPTPKTPRQLREFLGTAGLCRLWIPGFAEMAAPLYPLTKPGTLFKWGPDQQKAYQEIKQALLTAPALGLPDLTKPFELFVDEKQGYAKGVLTQKLGPWRRPVAYLSKKLDPVAAGWPPCLRMVAAIAVLTKDVGKLTMGQPLVILAPHAVEALVKQPPDRWLSNARMTHYQALLLDTDRVQFGPIVALNPATLLPLPEEGLQHDCLDILAEAHGTRPDLTDQPLPDADHTWYTDGSSFLQEGQRRAGAAVTTETEVIWAKALPAGTSAQRAELIALTQALKMAAGKKLNVYTDSRYAFATAHIHGEIYRRRGWLTSEGKEIKNKDEILALLKALFLPKRLSIIHCPGHQKGNHAEARGNRMADQAAREVATRETPETSTLLAGKRTADGSEFEKRTADGSEFESPKKKAKVE

SEQ ID NO: 2425 - protein, 2094 aa, synthetic construct
MPAAKRVKLDGGDKKYSIGLDIGTNSVGWAVITDEYKVPSKKFKVLGNTDRHSIKKNLIGALLFDSGETAEATRLKRTARRRYTRRKNRICYLQEIFSNEMAKVDDSFFHRLEESFLVEEDKKHERHPIFGNIVDEVAYHEKYPTIYHLRKKLVDSTDKADLRLIYLALAHMIKFRGHFLIEGDLNPDNSDVDKLFIQLVQTYNQLFEENPINASGVDAKAILSARLSKSRRLENLIAQLPGEKKNGLFGNLIALSLGLTPNFKSNFDLAEDAKLQLSKDTYDDDLDNLLAQIGDQYADLFLAAKNLSDAILLSDILRVNTEITKAPLSASMIKRYDEHHQDLTLLKALVRQQLPEKYKEIFFDQSKNGYAGYIDGGASQEEFYKFIKPILEKMDGTEELLVKLNREDLLRKQRTFDNGSIPHQIHLGELHAILRRQEDFYPFLKDNREKIEKILTFRIPYYVGPLARGNSRFAWMTRKSEETITPWNFEEVVDKGASAQSFIERMTNFDKNLPNEKVLPKHSLLYEYFTVYNELTKVKYVTEGMRKPAFLSGEQKKAIVDLLFKTNRKVTVKQLKEDYFKKIECFDSVEISGVEDRFNASLGTYHDLLKIIKDKDFLDNEENEDILEDIVLTLTLFEDREMIEERLKTYAHLFDDKVMKQLKRRRYTGWGRLSRKLINGIRDKQSGKTILDFLKSDGFANRNFMQLIHDDSLTFKEDIQKAQVSGQGDSLHEHIANLAGSPAIKKGILQTVKVVDELVKVMGRHKPENIVIEMARENQTTQKGQKNSRERMKRIEEGIKELGSQILKEHPVENTQLQNEKLYLYYLQNGRDMYVDQELDINRLSDYDVDHIVPQSFLKDDSIDNKVLTRSDKARGKSDNVPSEEVVKKMKNYWRQLLNAKLITQRKFDNLTKAERGGLSELDKAGFIKRQLVETRQITKHVAQILDSRMNTKYDENDKLIREVKVITLKSKLVSDFRKDFQFYKVREINNYHHAHDAYLNAVVGTALIKKYPKLESEFVYGDYKVYDVRKMIAKSEQEIGKATAKYFFYSNIMNFFKTEITLANGEIRKRPLIETNGETGEIVWDKGRDFATVRKVLSMPQVNIVKKTEVQTGGFSKESILPKRNSDKLIARKKDWDPKKYGGFDSPTVAYSVLVVAKVEKGKSKKLKSVKELLGITIMERSSFEKNPIDFLEAKGYKEVKKDLIIKLPKYSLFELENGRKRMLASAGELQKGNELALPSKYVNFLYLASHYEKLKGSPEDNEQKQLFVEQHKHYLDEIIEQISEFSKRVILADANLDKVLSAYNKHRDKPIREQAENIIHLFTLTNLGAPAAFKYFDTTIDRKRYTSTKEVLDATLIHQSITGLYETRIDLSQLGGDGGGSSGGGGGSGGTLNIEDEYRLHETSKGPDVPLGSTWLSDFPQAWAETGGMGLAFRQAPLIISLKATSTPVSIKQYPMSQEARLGIKPHIQRLLDQGILVPCQSPWNTPLLPVKKPGTNDYRPVQDLREVNKRVEDIHPTVPNPYNLLSGLPPSHQWYTVLDLKDAFFCLRLHPTSQSLFAFEWKDPEMGISGQLTWTRLPQGFKNSPTLFNEALHRDLADFRIQHPDLILLQYVDDLLLAATSELDCQQGTRALLQTLGDLGYRASAKKAQICQKQVKYLGYLLKEGQRWLTEARKETVMGQPTPKTPRQLREFLGTAGLCRLWIPGFAEMAAPLYPLTKPGTLFKWGPDQQKAYQEIKQALLTAPALGLPDLTKPFELFVDEKQGYAKGVLTQKLGPWRRPVAYLSKKLDPVAAGWPPCLRMVAAIAVLTKDVGKLTMGQPLVILAPHAVEALVKQPPDRWLSNARMTHYQALLLDTDRVQFGPIVALNPATLLPLPEEGLQHDCLDILAEAHGTRPDLTDQPLPDADHTWYTDGSSFLQEGQRRAGAAVTTETEVIWAKALPAGTSAQRAELIALTQALKMAAGKKLNVYTDSRYAFATAHIHGEIYRRRGWLTSEGKEIKNKDEILALLKALFLPKRLSIIHCPGHQKGNHAEARGNRMADQAAREVATRETPETSTLLAGKRTADGSEFEKRTADGSEFESPKKKAKVE

SEQ ID NO: 2426 - protein, 2093 aa, synthetic construct
MPAAKRVKLDGGDKKYSIGLDIGTNSVGWAVITDEYKVPSKKFKVLGNTDRHSIKKNLIGALLFDSGETAEATRLKRTARRRYTRRKNRICYLQEIFSNEMAKVDDSFFHRLEESFLVEEDKKHERHPIFGNIVDEVAYHEKYPTIYHLRKKLVDSTDKADLRLIYLALAHMIKFRGHFLIEGDLNPDNSDVDKLFIQLVQTYNQLFEENPINASGVDAKAILSARLSKSRRLENLIAQLPGEKKNGLFGNLIALSLGLTPNFKSNFDLAEDAKLQLSKDTYDDDLDNLLAQIGDQYADLFLAAKNLSDAILLSDILRVNTEITKAPLSASMIKRYDEHHQDLTLLKALVRQQLPEKYKEIFFDQSKNGYAGYIDGGASQEEFYKFIKPILEKMDGTEELLVKLNREDLLRKQRTFDNGSIPHQIHLGELHAILRRQEDFYPFLKDNREKIEKILTFRIPYYVGPLARGNSRFAWMTRKSEETITPWNFEEVVDKGASAQSFIERMTNFDKNLPNEKVLPKHSLLYEYFTVYNELTKVKYVTEGMRKPAFLSGEQKKAIVDLLFKTNRKVTVKQLKEDYFKKIECFDSVEISGVEDRFNASLGTYHDLLKIIKDKDFLDNEENEDILEDIVLTLTLFEDREMIEERLKTYAHLFDDKVMKQLKRRRYTGWGRLSRKLINGIRDKQSGKTILDFLKSDGFANRNFMQLIHDDSLTFKEDIQKAQVSGQGDSLHEHIANLAGSPAIKKGILQTVKVVDELVKVMGRHKPENIVIEMARENQTTQKGQKNSRERMKRIEEGIKELGSQILKEHPVENTQLQNEKLYLYYLQNGRDMYVDQELDINRLSDYDVDHIVPQSFLKDDSIDNKVLTRSDKARGKSDNVPSEEVVKKMKNYWRQLLNAKLITQRKFDNLTKAERGGLSELDKAGFIKRQLVETRQITKHVAQILDSRMNTKYDENDKLIREVKVITLKSKLVSDFRKDFQFYKVREINNYHHAHDAYLNAVVGTALIKKYPKLESEFVYGDYKVYDVRKMIAKSEQEIGKATAKYFFYSNIMNFFKTEITLANGEIRKRPLIETNGETGEIVWDKGRDFATVRKVLSMPQVNIVKKTEVQTGGFSKESILPKRNSDKLIARKKDWDPKKYGGFDSPTVAYSVLVVAKVEKGKSKKLKSVKELLGITIMERSSFEKNPIDFLEAKGYKEVKKDLIIKLPKYSLFELENGRKRMLASAGELQKGNELALPSKYVNFLYLASHYEKLKGSPEDNEQKQLFVEQHKHYLDEIIEQISEFSKRVILADANLDKVLSAYNKHRDKPIREQAENIIHLFTLTNLGAPAAFKYFDTTIDRKRYTSTKEVLDATLIHQSITGLYETRIDLSQLGGDGGEAAAKGGSGGTLNIEDEYRLHETSKGPDVPLGSTWLSDFPQAWAETGGMGLAFRQAPLIISLKATSTPVSIKQYPMSQEARLGIKPHIQRLLDQGILVPCQSPWNTPLLPVKKPGTNDYRPVQDLREVNKRVEDIHPTVPNPYNLLSGLPPSHQWYTVLDLKDAFFCLRLHPTSQSLFAFEWKDPEMGISGQLTWTRLPQGFKNSPTLFNEALHRDLADFRIQHPDLILLQYVDDLLLAATSELDCQQGTRALLQTLGDLGYRASAKKAQICQKQVKYLGYLLKEGQRWLTEARKETVMGQPTPKTPRQLREFLGTAGLCRLWIPGFAEMAAPLYPLTKPGTLFKWGPDQQKAYQEIKQALLTAPALGLPDLTKPFELFVDEKQGYAKGVLTQKLGPWRRPVAYLSKKLDPVAAGWPPCLRMVAAIAVLTKDVGKLTMGQPLVILAPHAVEALVKQPPDRWLSNARMTHYQALLLDTDRVQFGPIVALNPATLLPLPEEGLQHDCLDILAEAHGTRPDLTDQPLPDADHTWYTDGSSFLQEGQRRAGAAVTTETEVIWAKALPAGTSAQRAELIALTQALKMAAGKKLNVYTDSRYAFATAHIHGEIYRRRGWLTSEGKEIKNKDEILALLKALFLPKRLSIIHCPGHQKGNHAEARGNRMADQAAREVATRETPETSTLLAGKRTADGSEFEKRTADGSEFESPKKKAKVE

SEQ ID NO: 2427 - protein, 2088 aa, synthetic construct
MPAAKRVKLDGGDKKYSIGLDIGTNSVGWAVITDEYKVPSKKFKVLGNTDRHSIKKNLIGALLFDSGETAEATRLKRTARRRYTRRKNRICYLQEIFSNEMAKVDDSFFHRLEESFLVEEDKKHERHPIFGNIVDEVAYHEKYPTIYHLRKKLVDSTDKADLRLIYLALAHMIKFRGHFLIEGDLNPDNSDVDKLFIQLVQTYNQLFEENPINASGVDAKAILSARLSKSRRLENLIAQLPGEKKNGLFGNLIALSLGLTPNFKSNFDLAEDAKLQLSKDTYDDDLDNLLAQIGDQYADLFLAAKNLSDAILLSDILRVNTEITKAPLSASMIKRYDEHHQDLTLLKALVRQQLPEKYKEIFFDQSKNGYAGYIDGGASQEEFYKFIKPILEKMDGTEELLVKLNREDLLRKQRTFDNGSIPHQIHLGELHAILRRQEDFYPFLKDNREKIEKILTFRIPYYVGPLARGNSRFAWMTRKSEETITPWNFEEVVDKGASAQSFIERMTNFDKNLPNEKVLPKHSLLYEYFTVYNELTKVKYVTEGMRKPAFLSGEQKKAIVDLLFKTNRKVTVKQLKEDYFKKIECFDSVEISGVEDRFNASLGTYHDLLKIIKDKDFLDNEENEDILEDIVLTLTLFEDREMIEERLKTYAHLFDDKVMKQLKRRRYTGWGRLSRKLINGIRDKQSGKTILDFLKSDGFANRNFMQLIHDDSLTFKEDIQKAQVSGQGDSLHEHIANLAGSPAIKKGILQTVKVVDELVKVMGRHKPENIVIEMARENQTTQKGQKNSRERMKRIEEGIKELGSQILKEHPVENTQLQNEKLYLYYLQNGRDMYVDQELDINRLSDYDVDHIVPQSFLKDDSIDNKVLTRSDKARGKSDNVPSEEVVKKMKNYWRQLLNAKLITQRKFDNLTKAERGGLSELDKAGFIKRQLVETRQITKHVAQILDSRMNTKYDENDKLIREVKVITLKSKLVSDFRKDFQFYKVREINNYHHAHDAYLNAVVGTALIKKYPKLESEFVYGDYKVYDVRKMIAKSEQEIGKATAKYFFYSNIMNFFKTEITLANGEIRKRPLIETNGETGEIVWDKGRDFATVRKVLSMPQVNIVKKTEVQTGGFSKESILPKRNSDKLIARKKDWDPKKYGGFDSPTVAYSVLVVAKVEKGKSKKLKSVKELLGITIMERSSFEKNPIDFLEAKGYKEVKKDLIIKLPKYSLFELENGRKRMLASAGELQKGNELALPSKYVNFLYLASHYEKLKGSPEDNEQKQLFVEQHKHYLDEIIEQISEFSKRVILADANLDKVLSAYNKHRDKPIREQAENIIHLFTLTNLGAPAAFKYFDTTIDRKRYTSTKEVLDATLIHQSITGLYETRIDLSQLGGDGGPAPGGTLNIEDEYRLHETSKGPDVPLGSTWLSDFPQAWAETGGMGLAFRQAPLIISLKATSTPVSIKQYPMSQEARLGIKPHIQRLLDQGILVPCQSPWNTPLLPVKKPGTNDYRPVQDLREVNKRVEDIHPTVPNPYNLLSGLPPSHQWYTVLDLKDAFFCLRLHPTSQSLFAFEWKDPEMGISGQLTWTRLPQGFKNSPTLFNEALHRDLADFRIQHPDLILLQYVDDLLLAATSELDCQQGTRALLQTLGDLGYRASAKKAQICQKQVKYLGYLLKEGQRWLTEARKETVMGQPTPKTPRQLREFLGTAGLCRLWIPGFAEMAAPLYPLTKPGTLFKWGPDQQKAYQEIKQALLTAPALGLPDLTKPFELFVDEKQGYAKGVLTQKLGPWRRPVAYLSKKLDPVAAGWPPCLRMVAAIAVLTKDVGKLTMGQPLVILAPHAVEALVKQPPDRWLSNARMTHYQALLLDTDRVQFGPIVALNPATLLPLPEEGLQHDCLDILAEAHGTRPDLTDQPLPDADHTWYTDGSSFLQEGQRRAGAAVTTETEVIWAKALPAGTSAQRAELIALTQALKMAAGKKLNVYTDSRYAFATAHIHGEIYRRRGWLTSEGKEIKNKDEILALLKALFLPKRLSIIHCPGHQKGNHAEARGNRMADQAAREVATRETPETSTLLAGKRTADGSEFEKRTADGSEFESPKKKAKVE

SEQ ID NO: 2428 - protein, 2096 aa, synthetic construct
MPAAKRVKLDGGDKKYSIGLDIGTNSVGWAVITDEYKVPSKKFKVLGNTDRHSIKKNLIGALLFDSGETAEATRLKRTARRRYTRRKNRICYLQEIFSNEMAKVDDSFFHRLEESFLVEEDKKHERHPIFGNIVDEVAYHEKYPTIYHLRKKLVDSTDKADLRLIYLALAHMIKFRGHFLIEGDLNPDNSDVDKLFIQLVQTYNQLFEENPINASGVDAKAILSARLSKSRRLENLIAQLPGEKKNGLFGNLIALSLGLTPNFKSNFDLAEDAKLQLSKDTYDDDLDNLLAQIGDQYADLFLAAKNLSDAILLSDILRVNTEITKAPLSASMIKRYDEHHQDLTLLKALVRQQLPEKYKEIFFDQSKNGYAGYIDGGASQEEFYKFIKPILEKMDGTEELLVKLNREDLLRKQRTFDNGSIPHQIHLGELHAILRRQEDFYPFLKDNREKIEKILTFRIPYYVGPLARGNSRFAWMTRKSEETITPWNFEEVVDKGASAQSFIERMTNFDKNLPNEKVLPKHSLLYEYFTVYNELTKVKYVTEGMRKPAFLSGEQKKAIVDLLFKTNRKVTVKQLKEDYFKKIECFDSVEISGVEDRFNASLGTYHDLLKIIKDKDFLDNEENEDILEDIVLTLTLFEDREMIEERLKTYAHLFDDKVMKQLKRRRYTGWGRLSRKLINGIRDKQSGKTILDFLKSDGFANRNFMQLIHDDSLTFKEDIQKAQVSGQGDSLHEHIANLAGSPAIKKGILQTVKVVDELVKVMGRHKPENIVIEMARENQTTQKGQKNSRERMKRIEEGIKELGSQILKEHPVENTQLQNEKLYLYYLQNGRDMYVDQELDINRLSDYDVDHIVPQSFLKDDSIDNKVLTRSDKARGKSDNVPSEEVVKKMKNYWRQLLNAKLITQRKFDNLTKAERGGLSELDKAGFIKRQLVETRQITKHVAQILDSRMNTKYDENDKLIREVKVITLKSKLVSDFRKDFQFYKVREINNYHHAHDAYLNAVVGTALIKKYPKLESEFVYGDYKVYDVRKMIAKSEQEIGKATAKYFFYSNIMNFFKTEITLANGEIRKRPLIETNGETGEIVWDKGRDFATVRKVLSMPQVNIVKKTEVQTGGFSKESILPKRNSDKLIARKKDWDPKKYGGFDSPTVAYSVLVVAKVEKGKSKKLKSVKELLGITIMERSSFEKNPIDFLEAKGYKEVKKDLIIKLPKYSLFELENGRKRMLASAGELQKGNELALPSKYVNFLYLASHYEKLKGSPEDNEQKQLFVEQHKHYLDEIIEQISEFSKRVILADANLDKVLSAYNKHRDKPIREQAENIIHLFTLTNLGAPAAFKYFDTTIDRKRYTSTKEVLDATLIHQSITGLYETRIDLSQLGGDGGPAPGSSEAAAKGGTLNIEDEYRLHETSKGPDVPLGSTWLSDFPQAWAETGGMGLAFRQAPLIISLKATSTPVSIKQYPMSQEARLGIKPHIQRLLDQGILVPCQSPWNTPLLPVKKPGTNDYRPVQDLREVNKRVEDIHPTVPNPYNLLSGLPPSHQWYTVLDLKDAFFCLRLHPTSQSLFAFEWKDPEMGISGQLTWTRLPQGFKNSPTLFNEALHRDLADFRIQHPDLILLQYVDDLLLAATSELDCQQGTRALLQTLGDLGYRASAKKAQICQKQVKYLGYLLKEGQRWLTEARKETVMGQPTPKTPRQLREFLGTAGLCRLWIPGFAEMAAPLYPLTKPGTLFKWGPDQQKAYQEIKQALLTAPALGLPDLTKPFELFVDEKQGYAKGVLTQKLGPWRRPVAYLSKKLDPVAAGWPPCLRMVAAIAVLTKDVGKLTMGQPLVILAPHAVEALVKQPPDRWLSNARMTHYQALLLDTDRVQFGPIVALNPATLLPLPEEGLQHDCLDILAEAHGTRPDLTDQPLPDADHTWYTDGSSFLQEGQRRAGAAVTTETEVIWAKALPAGTSAQRAELIALTQALKMAAGKKLNVYTDSRYAFATAHIHGEIYRRRGWLTSEGKEIKNKDEILALLKALFLPKRLSIIHCPGHQKGNHAEARGNRMADQAAREVATRETPETSTLLAGKRTADGSEFEKRTADGSEFESPKKKAKVE

SEQ ID NO: 2429 - protein, 2115 aa, synthetic construct
MPAAKRVKLDGGDKKYSIGLDIGTNSVGWAVITDEYKVPSKKFKVLGNTDRHSIKKNLIGALLFDSGETAEATRLKRTARRRYTRRKNRICYLQEIFSNEMAKVDDSFFHRLEESFLVEEDKKHERHPIFGNIVDEVAYHEKYPTIYHLRKKLVDSTDKADLRLIYLALAHMIKFRGHFLIEGDLNPDNSDVDKLFIQLVQTYNQLFEENPINASGVDAKAILSARLSKSRRLENLIAQLPGEKKNGLFGNLIALSLGLTPNFKSNFDLAEDAKLQLSKDTYDDDLDNLLAQIGDQYADLFLAAKNLSDAILLSDILRVNTEITKAPLSASMIKRYDEHHQDLTLLKALVRQQLPEKYKEIFFDQSKNGYAGYIDGGASQEEFYKFIKPILEKMDGTEELLVKLNREDLLRKQRTFDNGSIPHQIHLGELHAILRRQEDFYPFLKDNREKIEKILTFRIPYYVGPLARGNSRFAWMTRKSEETITPWNFEEVVDKGASAQSFIERMTNFDKNLPNEKVLPKHSLLYEYFTVYNELTKVKYVTEGMRKPAFLSGEQKKAIVDLLFKTNRKVTVKQLKEDYFKKIECFDSVEISGVEDRFNASLGTYHDLLKIIKDKDFLDNEENEDILEDIVLTLTLFEDREMIEERLKTYAHLFDDKVMKQLKRRRYTGWGRLSRKLINGIRDKQSGKTILDFLKSDGFANRNFMQLIHDDSLTFKEDIQKAQVSGQGDSLHEHIANLAGSPAIKKGILQTVKVVDELVKVMGRHKPENIVIEMARENQTTQKGQKNSRERMKRIEEGIKELGSQILKEHPVENTQLQNEKLYLYYLQNGRDMYVDQELDINRLSDYDVDHIVPQSFLKDDSIDNKVLTRSDKARGKSDNVPSEEVVKKMKNYWRQLLNAKLITQRKFDNLTKAERGGLSELDKAGFIKRQLVETRQITKHVAQILDSRMNTKYDENDKLIREVKVITLKSKLVSDFRKDFQFYKVREINNYHHAHDAYLNAVVGTALIKKYPKLESEFVYGDYKVYDVRKMIAKSEQEIGKATAKYFFYSNIMNFFKTEITLANGEIRKRPLIETNGETGEIVWDKGRDFATVRKVLSMPQVNIVKKTEVQTGGFSKESILPKRNSDKLIARKKDWDPKKYGGFDSPTVAYSVLVVAKVEKGKSKKLKSVKELLGITIMERSSFEKNPIDFLEAKGYKEVKKDLIIKLPKYSLFELENGRKRMLASAGELQKGNELALPSKYVNFLYLASHYEKLKGSPEDNEQKQLFVEQHKHYLDEIIEQISEFSKRVILADANLDKVLSAYNKHRDKPIREQAENIIHLFTLTNLGAPAAFKYFDTTIDRKRYTSTKEVLDATLIHQSITGLYETRIDLSQLGGDGGGGGGSGGGGSGGGGSGGGGSGGGGSGGGGSGGTLNIEDEYRLHETSKGPDVPLGSTWLSDFPQAWAETGGMGLAFRQAPLIISLKATSTPVSIKQYPMSQEARLGIKPHIQRLLDQGILVPCQSPWNTPLLPVKKPGTNDYRPVQDLREVNKRVEDIHPTVPNPYNLLSGLPPSHQWYTVLDLKDAFFCLRLHPTSQSLFAFEWKDPEMGISGQLTWTRLPQGFKNSPTLFNEALHRDLADFRIQHPDLILLQYVDDLLLAATSELDCQQGTRALLQTLGDLGYRASAKKAQICQKQVKYLGYLLKEGQRWLTEARKETVMGQPTPKTPRQLREFLGTAGLCRLWIPGFAEMAAPLYPLTKPGTLFKWGPDQQKAYQEIKQALLTAPALGLPDLTKPFELFVDEKQGYAKGVLTQKLGPWRRPVAYLSKKLDPVAAGWPPCLRMVAAIAVLTKDVGKLTMGQPLVILAPHAVEALVKQPPDRWLSNARMTHYQALLLDTDRVQFGPIVALNPATLLPLPEEGLQHDCLDILAEAHGTRPDLTDQPLPDADHTWYTDGSSFLQEGQRRAGAAVTTETEVIWAKALPAGTSAQRAELIALTQALKMAAGKKLNVYTDSRYAFATAHIHGEIYRRRGWLTSEGKEIKNKDEILALLKALFLPKRLSIIHCPGHQKGNHAEARGNRMADQAAREVATRETPETSTLLAGKRTADGSEFEKRTADGSEFESPKKKAKVE

SEQ ID NO: 2430 - protein, 2098 aa, synthetic construct
MPAAKRVKLDGGDKKYSIGLDIGTNSVGWAVITDEYKVPSKKFKVLGNTDRHSIKKNLIGALLFDSGETAEATRLKRTARRRYTRRKNRICYLQEIFSNEMAKVDDSFFHRLEESFLVEEDKKHERHPIFGNIVDEVAYHEKYPTIYHLRKKLVDSTDKADLRLIYLALAHMIKFRGHFLIEGDLNPDNSDVDKLFIQLVQTYNQLFEENPINASGVDAKAILSARLSKSRRLENLIAQLPGEKKNGLFGNLIALSLGLTPNFKSNFDLAEDAKLQLSKDTYDDDLDNLLAQIGDQYADLFLAAKNLSDAILLSDILRVNTEITKAPLSASMIKRYDEHHQDLTLLKALVRQQLPEKYKEIFFDQSKNGYAGYIDGGASQEEFYKFIKPILEKMDGTEELLVKLNREDLLRKQRTFDNGSIPHQIHLGELHAILRRQEDFYPFLKDNREKIEKILTFRIPYYVGPLARGNSRFAWMTRKSEETITPWNFEEVVDKGASAQSFIERMTNFDKNLPNEKVLPKHSLLYEYFTVYNELTKVKYVTEGMRKPAFLSGEQKKAIVDLLFKTNRKVTVKQLKEDYFKKIECFDSVEISGVEDRFNASLGTYHDLLKIIKDKDFLDNEENEDILEDIVLTLTLFEDREMIEERLKTYAHLFDDKVMKQLKRRRYTGWGRLSRKLINGIRDKQSGKTILDFLKSDGFANRNFMQLIHDDSLTFKEDIQKAQVSGQGDSLHEHIANLAGSPAIKKGILQTVKVVDELVKVMGRHKPENIVIEMARENQTTQKGQKNSRERMKRIEEGIKELGSQILKEHPVENTQLQNEKLYLYYLQNGRDMYVDQELDINRLSDYDVDHIVPQSFLKDDSIDNKVLTRSDKARGKSDNVPSEEVVKKMKNYWRQLLNAKLITQRKFDNLTKAERGGLSELDKAGFIKRQLVETRQITKHVAQILDSRMNTKYDENDKLIREVKVITLKSKLVSDFRKDFQFYKVREINNYHHAHDAYLNAVVGTALIKKYPKLESEFVYGDYKVYDVRKMIAKSEQEIGKATAKYFFYSNIMNFFKTEITLANGEIRKRPLIETNGETGEIVWDKGRDFATVRKVLSMPQVNIVKKTEVQTGGFSKESILPKRNSDKLIARKKDWDPKKYGGFDSPTVAYSVLVVAKVEKGKSKKLKSVKELLGITIMERSSFEKNPIDFLEAKGYKEVKKDLIIKLPKYSLFELENGRKRMLASAGELQKGNELALPSKYVNFLYLASHYEKLKGSPEDNEQKQLFVEQHKHYLDEIIEQISEFSKRVILADANLDKVLSAYNKHRDKPIREQAENIIHLFTLTNLGAPAAFKYFDTTIDRKRYTSTKEVLDATLIHQSITGLYETRIDLSQLGGDGGPAPAPAPAPAPAPGGTLNIEDEYRLHETSKGPDVPLGSTWLSDFPQAWAETGGMGLAFRQAPLIISLKATSTPVSIKQYPMSQEARLGIKPHIQRLLDQGILVPCQSPWNTPLLPVKKPGTNDYRPVQDLREVNKRVEDIHPTVPNPYNLLSGLPPSHQWYTVLDLKDAFFCLRLHPTSQSLFAFEWKDPEMGISGQLTWTRLPQGFKNSPTLFNEALHRDLADFRIQHPDLILLQYVDDLLLAATSELDCQQGTRALLQTLGDLGYRASAKKAQICQKQVKYLGYLLKEGQRWLTEARKETVMGQPTPKTPRQLREFLGKAGLCRLFIPGFAEMAAPLYPLTKPGTLFKWGPDQQKAYQEIKQALLTAPALGLPDLTKPFELFVDEKQGYAKGVLTQKLGPWRRPVAYLSKKLDPVAAGWPPCLRMVAAIAVLTKDVGKLTMGQPLVILAPHAVEALVKQPPDRWLSNARMTHYQALLLDTDRVQFGPIVALNPATLLPLPEEGLQHDCLDILAEAHGTRPDLTDQPLPDADHTWYTDGSSFLQEGQRRAGAAVTTETEVIWAKALPAGTSAQRAELIALTQALKMAAGKKLNVYTDSRYAFATAHIHGEIYRRRGWLTSEGKEIKNKDEILALLKALFLPKRLSIIHCPGHQKGNHAEARGNRMADQAAREVATRETPETSTLLAGKRTADGSEFEKRTADGSEFESPKKKAKVE

SEQ ID NO: 2431 - protein, 2096 aa, synthetic construct
MPAAKRVKLDGGDKKYSIGLDIGTNSVGWAVITDEYKVPSKKFKVLGNTDRHSIKKNLIGALLFDSGETAEATRLKRTARRRYTRRKNRICYLQEIFSNEMAKVDDSFFHRLEESFLVEEDKKHERHPIFGNIVDEVAYHEKYPTIYHLRKKLVDSTDKADLRLIYLALAHMIKFRGHFLIEGDLNPDNSDVDKLFIQLVQTYNQLFEENPINASGVDAKAILSARLSKSRRLENLIAQLPGEKKNGLFGNLIALSLGLTPNFKSNFDLAEDAKLQLSKDTYDDDLDNLLAQIGDQYADLFLAAKNLSDAILLSDILRVNTEITKAPLSASMIKRYDEHHQDLTLLKALVRQQLPEKYKEIFFDQSKNGYAGYIDGGASQEEFYKFIKPILEKMDGTEELLVKLNREDLLRKQRTFDNGSIPHQIHLGELHAILRRQEDFYPFLKDNREKIEKILTFRIPYYVGPLARGNSRFAWMTRKSEETITPWNFEEVVDKGASAQSFIERMTNFDKNLPNEKVLPKHSLLYEYFTVYNELTKVKYVTEGMRKPAFLSGEQKKAIVDLLFKTNRKVTVKQLKEDYFKKIECFDSVEISGVEDRFNASLGTYHDLLKIIKDKDFLDNEENEDILEDIVLTLTLFEDREMIEERLKTYAHLFDDKVMKQLKRRRYTGWGRLSRKLINGIRDKQSGKTILDFLKSDGFANRNFMQLIHDDSLTFKEDIQKAQVSGQGDSLHEHIANLAGSPAIKKGILQTVKVVDELVKVMGRHKPENIVIEMARENQTTQKGQKNSRERMKRIEEGIKELGSQILKEHPVENTQLQNEKLYLYYLQNGRDMYVDQELDINRLSDYDVDHIVPQSFLKDDSIDNKVLTRSDKARGKSDNVPSEEVVKKMKNYWRQLLNAKLITQRKFDNLTKAERGGLSELDKAGFIKRQLVETRQITKHVAQILDSRMNTKYDENDKLIREVKVITLKSKLVSDFRKDFQFYKVREINNYHHAHDAYLNAVVGTALIKKYPKLESEFVYGDYKVYDVRKMIAKSEQEIGKATAKYFFYSNIMNFFKTEITLANGEIRKRPLIETNGETGEIVWDKGRDFATVRKVLSMPQVNIVKKTEVQTGGFSKESILPKRNSDKLIARKKDWDPKKYGGFDSPTVAYSVLVVAKVEKGKSKKLKSVKELLGITIMERSSFEKNPIDFLEAKGYKEVKKDLIIKLPKYSLFELENGRKRMLASAGELQKGNELALPSKYVNFLYLASHYEKLKGSPEDNEQKQLFVEQHKHYLDEIIEQISEFSKRVILADANLDKVLSAYNKHRDKPIREQAENIIHLFTLTNLGAPAAFKYFDTTIDRKRYTSTKEVLDATLIHQSITGLYETRIDLSQLGGDGGEAAAKPAPGGSGGTLNIEDEYRLHETSKGPDVPLGSTWLSDFPQAWAETGGMGLAFRQAPLIISLKATSTPVSIKQYPMSQEARLGIKPHIQRLLDQGILVPCQSPWNTPLLPVKKPGTNDYRPVQDLREVNKRVEDIHPTVPNPYNLLSGLPPSHQWYTVLDLKDAFFCLRLHPTSQSLFAFEWKDPEMGISGQLTWTRLPQGFKNSPTLFNEALHRDLADFRIQHPDLILLQYVDDLLLAATSELDCQQGTRALLQTLGDLGYRASAKKAQICQKQVKYLGYLLKEGQRWLTEARKETVMGQPTPKTPRQLREFLGKAGLCRLFIPGFAEMAAPLYPLTKPGTLFKWGPDQQKAYQEIKQALLTAPALGLPDLTKPFELFVDEKQGYAKGVLTQKLGPWRRPVAYLSKKLDPVAAGWPPCLRMVAAIAVLTKDVGKLTMGQPLVILAPHAVEALVKQPPDRWLSNARMTHYQALLLDTDRVQFGPIVALNPATLLPLPEEGLQHDCLDILAEAHGTRPDLTDQPLPDADHTWYTDGSSFLQEGQRRAGAAVTTETEVIWAKALPAGTSAQRAELIALTQALKMAAGKKLNVYTDSRYAFATAHIHGEIYRRRGWLTSEGKEIKNKDEILALLKALFLPKRLSIIHCPGHQKGNHAEARGNRMADQAAREVATRETPETSTLLAGKRTADGSEFEKRTADGSEFESPKKKAKVE

SEQ ID NO: 2432 - protein, 2094 aa, synthetic construct
MPAAKRVKLDGGDKKYSIGLDIGTNSVGWAVITDEYKVPSKKFKVLGNTDRHSIKKNLIGALLFDSGETAEATRLKRTARRRYTRRKNRICYLQEIFSNEMAKVDDSFFHRLEESFLVEEDKKHERHPIFGNIVDEVAYHEKYPTIYHLRKKLVDSTDKADLRLIYLALAHMIKFRGHFLIEGDLNPDNSDVDKLFIQLVQTYNQLFEENPINASGVDAKAILSARLSKSRRLENLIAQLPGEKKNGLFGNLIALSLGLTPNFKSNFDLAEDAKLQLSKDTYDDDLDNLLAQIGDQYADLFLAAKNLSDAILLSDILRVNTEITKAPLSASMIKRYDEHHQDLTLLKALVRQQLPEKYKEIFFDQSKNGYAGYIDGGASQEEFYKFIKPILEKMDGTEELLVKLNREDLLRKQRTFDNGSIPHQIHLGELHAILRRQEDFYPFLKDNREKIEKILTFRIPYYVGPLARGNSRFAWMTRKSEETITPWNFEEVVDKGASAQSFIERMTNFDKNLPNEKVLPKHSLLYEYFTVYNELTKVKYVTEGMRKPAFLSGEQKKAIVDLLFKTNRKVTVKQLKEDYFKKIECFDSVEISGVEDRFNASLGTYHDLLKIIKDKDFLDNEENEDILEDIVLTLTLFEDREMIEERLKTYAHLFDDKVMKQLKRRRYTGWGRLSRKLINGIRDKQSGKTILDFLKSDGFANRNFMQLIHDDSLTFKEDIQKAQVSGQGDSLHEHIANLAGSPAIKKGILQTVKVVDELVKVMGRHKPENIVIEMARENQTTQKGQKNSRERMKRIEEGIKELGSQILKEHPVENTQLQNEKLYLYYLQNGRDMYVDQELDINRLSDYDVDHIVPQSFLKDDSIDNKVLTRSDKARGKSDNVPSEEVVKKMKNYWRQLLNAKLITQRKFDNLTKAERGGLSELDKAGFIKRQLVETRQITKHVAQILDSRMNTKYDENDKLIREVKVITLKSKLVSDFRKDFQFYKVREINNYHHAHDAYLNAVVGTALIKKYPKLESEFVYGDYKVYDVRKMIAKSEQEIGKATAKYFFYSNIMNFFKTEITLANGEIRKRPLIETNGETGEIVWDKGRDFATVRKVLSMPQVNIVKKTEVQTGGFSKESILPKRNSDKLIARKKDWDPKKYGGFDSPTVAYSVLVVAKVEKGKSKKLKSVKELLGITIMERSSFEKNPIDFLEAKGYKEVKKDLIIKLPKYSLFELENGRKRMLASAGELQKGNELALPSKYVNFLYLASHYEKLKGSPEDNEQKQLFVEQHKHYLDEIIEQISEFSKRVILADANLDKVLSAYNKHRDKPIREQAENIIHLFTLTNLGAPAAFKYFDTTIDRKRYTSTKEVLDATLIHQSITGLYETRIDLSQLGGDGGPAPGGSGGGGGTLNIEDEYRLHETSKGPDVPLGSTWLSDFPQAWAETGGMGLAFRQAPLIISLKATSTPVSIKQYPMSQEARLGIKPHIQRLLDQGILVPCQSPWNTPLLPVKKPGTNDYRPVQDLREVNKRVEDIHPTVPNPYNLLSGLPPSHQWYTVLDLKDAFFCLRLHPTSQSLFAFEWKDPEMGISGQLTWTRLPQGFKNSPTLFNEALHRDLADFRIQHPDLILLQYVDDLLLAATSELDCQQGTRALLQTLGDLGYRASAKKAQICQKQVKYLGYLLKEGQRWLTEARKETVMGQPTPKTPRQLREFLGKAGLCRLFIPGFAEMAAPLYPLTKPGTLFKWGPDQQKAYQEIKQALLTAPALGLPDLTKPFELFVDEKQGYAKGVLTQKLGPWRRPVAYLSKKLDPVAAGWPPCLRMVAAIAVLTKDVGKLTMGQPLVILAPHAVEALVKQPPDRWLSNARMTHYQALLLDTDRVQFGPIVALNPATLLPLPEEGLQHDCLDILAEAHGTRPDLTDQPLPDADHTWYTDGSSFLQEGQRRAGAAVTTETEVIWAKALPAGTSAQRAELIALTQALKMAAGKKLNVYTDSRYAFATAHIHGEIYRRRGWLTSEGKEIKNKDEILALLKALFLPKRLSIIHCPGHQKGNHAEARGNRMADQAAREVATRETPETSTLLAGKRTADGSEFEKRTADGSEFESPKKKAKVE

SEQ ID NO: 2433 - protein, 2100 aa, synthetic construct
MPAAKRVKLDGGDKKYSIGLDIGTNSVGWAVITDEYKVPSKKFKVLGNTDRHSIKKNLIGALLFDSGETAEATRLKRTARRRYTRRKNRICYLQEIFSNEMAKVDDSFFHRLEESFLVEEDKKHERHPIFGNIVDEVAYHEKYPTIYHLRKKLVDSTDKADLRLIYLALAHMIKFRGHFLIEGDLNPDNSDVDKLFIQLVQTYNQLFEENPINASGVDAKAILSARLSKSRRLENLIAQLPGEKKNGLFGNLIALSLGLTPNFKSNFDLAEDAKLQLSKDTYDDDLDNLLAQIGDQYADLFLAAKNLSDAILLSDILRVNTEITKAPLSASMIKRYDEHHQDLTLLKALVRQQLPEKYKEIFFDQSKNGYAGYIDGGASQEEFYKFIKPILEKMDGTEELLVKLNREDLLRKQRTFDNGSIPHQIHLGELHAILRRQEDFYPFLKDNREKIEKILTFRIPYYVGPLARGNSRFAWMTRKSEETITPWNFEEVVDKGASAQSFIERMTNFDKNLPNEKVLPKHSLLYEYFTVYNELTKVKYVTEGMRKPAFLSGEQKKAIVDLLFKTNRKVTVKQLKEDYFKKIECFDSVEISGVEDRFNASLGTYHDLLKIIKDKDFLDNEENEDILEDIVLTLTLFEDREMIEERLKTYAHLFDDKVMKQLKRRRYTGWGRLSRKLINGIRDKQSGKTILDFLKSDGFANRNFMQLIHDDSLTFKEDIQKAQVSGQGDSLHEHIANLAGSPAIKKGILQTVKVVDELVKVMGRHKPENIVIEMARENQTTQKGQKNSRERMKRIEEGIKELGSQILKEHPVENTQLQNEKLYLYYLQNGRDMYVDQELDINRLSDYDVDHIVPQSFLKDDSIDNKVLTRSDKARGKSDNVPSEEVVKKMKNYWRQLLNAKLITQRKFDNLTKAERGGLSELDKAGFIKRQLVETRQITKHVAQILDSRMNTKYDENDKLIREVKVITLKSKLVSDFRKDFQFYKVREINNYHHAHDAYLNAVVGTALIKKYPKLESEFVYGDYKVYDVRKMIAKSEQEIGKATAKYFFYSNIMNFFKTEITLANGEIRKRPLIETNGETGEIVWDKGRDFATVRKVLSMPQVNIVKKTEVQTGGFSKESILPKRNSDKLIARKKDWDPKKYGGFDSPTVAYSVLVVAKVEKGKSKKLKSVKELLGITIMERSSFEKNPIDFLEAKGYKEVKKDLIIKLPKYSLFELENGRKRMLASAGELQKGNELALPSKYVNFLYLASHYEKLKGSPEDNEQKQLFVEQHKHYLDEIIEQISEFSKRVILADANLDKVLSAYNKHRDKPIREQAENIIHLFTLTNLGAPAAFKYFDTTIDRKRYTSTKEVLDATLIHQSITGLYETRIDLSQLGGDGGEAAAKGGGGSEAAAKGGTLNIEDEYRLHETSKGPDVPLGSTWLSDFPQAWAETGGMGLAFRQAPLIISLKATSTPVSIKQYPMSQEARLGIKPHIQRLLDQGILVPCQSPWNTPLLPVKKPGTNDYRPVQDLREVNKRVEDIHPTVPNPYNLLSGLPPSHQWYTVLDLKDAFFCLRLHPTSQSLFAFEWKDPEMGISGQLTWTRLPQGFKNSPTLFNEALHRDLADFRIQHPDLILLQYVDDLLLAATSELDCQQGTRALLQTLGDLGYRASAKKAQICQKQVKYLGYLLKEGQRWLTEARKETVMGQPTPKTPRQLREFLGKAGLCRLFIPGFAEMAAPLYPLTKPGTLFKWGPDQQKAYQEIKQALLTAPALGLPDLTKPFELFVDEKQGYAKGVLTQKLGPWRRPVAYLSKKLDPVAAGWPPCLRMVAAIAVLTKDVGKLTMGQPLVILAPHAVEALVKQPPDRWLSNARMTHYQALLLDTDRVQFGPIVALNPATLLPLPEEGLQHDCLDILAEAHGTRPDLTDQPLPDADHTWYTDGSSFLQEGQRRAGAAVTTETEVIWAKALPAGTSAQRAELIALTQALKMAAGKKLNVYTDSRYAFATAHIHGEIYRRRGWLTSEGKEIKNKDEILALLKALFLPKRLSIIHCPGHQKGNHAEARGNRMADQAAREVATRETPETSTLLAGKRTADGSEFEKRTADGSEFESPKKKAKVE

SEQ ID NO: 2434 - protein, 2096 aa, synthetic construct
MPAAKRVKLDGGDKKYSIGLDIGTNSVGWAVITDEYKVPSKKFKVLGNTDRHSIKKNLIGALLFDSGETAEATRLKRTARRRYTRRKNRICYLQEIFSNEMAKVDDSFFHRLEESFLVEEDKKHERHPIFGNIVDEVAYHEKYPTIYHLRKKLVDSTDKADLRLIYLALAHMIKFRGHFLIEGDLNPDNSDVDKLFIQLVQTYNQLFEENPINASGVDAKAILSARLSKSRRLENLIAQLPGEKKNGLFGNLIALSLGLTPNFKSNFDLAEDAKLQLSKDTYDDDLDNLLAQIGDQYADLFLAAKNLSDAILLSDILRVNTEITKAPLSASMIKRYDEHHQDLTLLKALVRQQLPEKYKEIFFDQSKNGYAGYIDGGASQEEFYKFIKPILEKMDGTEELLVKLNREDLLRKQRTFDNGSIPHQIHLGELHAILRRQEDFYPFLKDNREKIEKILTFRIPYYVGPLARGNSRFAWMTRKSEETITPWNFEEVVDKGASAQSFIERMTNFDKNLPNEKVLPKHSLLYEYFTVYNELTKVKYVTEGMRKPAFLSGEQKKAIVDLLFKTNRKVTVKQLKEDYFKKIECFDSVEISGVEDRFNASLGTYHDLLKIIKDKDFLDNEENEDILEDIVLTLTLFEDREMIEERLKTYAHLFDDKVMKQLKRRRYTGWGRLSRKLINGIRDKQSGKTILDFLKSDGFANRNFMQLIHDDSLTFKEDIQKAQVSGQGDSLHEHIANLAGSPAIKKGILQTVKVVDELVKVMGRHKPENIVIEMARENQTTQKGQKNSRERMKRIEEGIKELGSQILKEHPVENTQLQNEKLYLYYLQNGRDMYVDQELDINRLSDYDVDHIVPQSFLKDDSIDNKVLTRSDKARGKSDNVPSEEVVKKMKNYWRQLLNAKLITQRKFDNLTKAERGGLSELDKAGFIKRQLVETRQITKHVAQILDSRMNTKYDENDKLIREVKVITLKSKLVSDFRKDFQFYKVREINNYHHAHDAYLNAVVGTALIKKYPKLESEFVYGDYKVYDVRKMIAKSEQEIGKATAKYFFYSNIMNFFKTEITLANGEIRKRPLIETNGETGEIVWDKGRDFATVRKVLSMPQVNIVKKTEVQTGGFSKESILPKRNSDKLIARKKDWDPKKYGGFDSPTVAYSVLVVAKVEKGKSKKLKSVKELLGITIMERSSFEKNPIDFLEAKGYKEVKKDLIIKLPKYSLFELENGRKRMLASAGELQKGNELALPSKYVNFLYLASHYEKLKGSPEDNEQKQLFVEQHKHYLDEIIEQISEFSKRVILADANLDKVLSAYNKHRDKPIREQAENIIHLFTLTNLGAPAAFKYFDTTIDRKRYTSTKEVLDATLIHQSITGLYETRIDLSQLGGDGGGGGGSSEAAAKGGTLNIEDEYRLHETSKGPDVPLGSTWLSDFPQAWAETGGMGLAFRQAPLIISLKATSTPVSIKQYPMSQEARLGIKPHIQRLLDQGILVPCQSPWNTPLLPVKKPGTNDYRPVQDLREVNKRVEDIHPTVPNPYNLLSGLPPSHQWYTVLDLKDAFFCLRLHPTSQSLFAFEWKDPEMGISGQLTWTRLPQGFKNSPTLFNEALHRDLADFRIQHPDLILLQYVDDLLLAATSELDCQQGTRALLQTLGDLGYRASAKKAQICQKQVKYLGYLLKEGQRWLTEARKETVMGQPTPKTPRQLREFLGKAGLCRLFIPGFAEMAAPLYPLTKPGTLFKWGPDQQKAYQEIKQALLTAPALGLPDLTKPFELFVDEKQGYAKGVLTQKLGPWRRPVAYLSKKLDPVAAGWPPCLRMVAAIAVLTKDVGKLTMGQPLVILAPHAVEALVKQPPDRWLSNARMTHYQALLLDTDRVQFGPIVALNPATLLPLPEEGLQHDCLDILAEAHGTRPDLTDQPLPDADHTWYTDGSSFLQEGQRRAGAAVTTETEVIWAKALPAGTSAQRAELIALTQALKMAAGKKLNVYTDSRYAFATAHIHGEIYRRRGWLTSEGKEIKNKDEILALLKALFLPKRLSIIHCPGHQKGNHAEARGNRMADQAAREVATRETPETSTLLAGKRTADGSEFEKRTADGSEFESPKKKAKVE

SEQ ID NO: 2435 - protein, 2093 aa, synthetic construct
MPAAKRVKLDGGDKKYSIGLDIGTNSVGWAVITDEYKVPSKKFKVLGNTDRHSIKKNLIGALLFDSGETAEATRLKRTARRRYTRRKNRICYLQEIFSNEMAKVDDSFFHRLEESFLVEEDKKHERHPIFGNIVDEVAYHEKYPTIYHLRKKLVDSTDKADLRLIYLALAHMIKFRGHFLIEGDLNPDNSDVDKLFIQLVQTYNQLFEENPINASGVDAKAILSARLSKSRRLENLIAQLPGEKKNGLFGNLIALSLGLTPNFKSNFDLAEDAKLQLSKDTYDDDLDNLLAQIGDQYADLFLAAKNLSDAILLSDILRVNTEITKAPLSASMIKRYDEHHQDLTLLKALVRQQLPEKYKEIFFDQSKNGYAGYIDGGASQEEFYKFIKPILEKMDGTEELLVKLNREDLLRKQRTFDNGSIPHQIHLGELHAILRRQEDFYPFLKDNREKIEKILTFRIPYYVGPLARGNSRFAWMTRKSEETITPWNFEEVVDKGASAQSFIERMTNFDKNLPNEKVLPKHSLLYEYFTVYNELTKVKYVTEGMRKPAFLSGEQKKAIVDLLFKTNRKVTVKQLKEDYFKKIECFDSVEISGVEDRFNASLGTYHDLLKIIKDKDFLDNEENEDILEDIVLTLTLFEDREMIEERLKTYAHLFDDKVMKQLKRRRYTGWGRLSRKLINGIRDKQSGKTILDFLKSDGFANRNFMQLIHDDSLTFKEDIQKAQVSGQGDSLHEHIANLAGSPAIKKGILQTVKVVDELVKVMGRHKPENIVIEMARENQTTQKGQKNSRERMKRIEEGIKELGSQILKEHPVENTQLQNEKLYLYYLQNGRDMYVDQELDINRLSDYDVDHIVPQSFLKDDSIDNKVLTRSDKARGKSDNVPSEEVVKKMKNYWRQLLNAKLITQRKFDNLTKAERGGLSELDKAGFIKRQLVETRQITKHVAQILDSRMNTKYDENDKLIREVKVITLKSKLVSDFRKDFQFYKVREINNYHHAHDAYLNAVVGTALIKKYPKLESEFVYGDYKVYDVRKMIAKSEQEIGKATAKYFFYSNIMNFFKTEITLANGEIRKRPLIETNGETGEIVWDKGRDFATVRKVLSMPQVNIVKKTEVQTGGFSKESILPKRNSDKLIARKKDWDPKKYGGFDSPTVAYSVLVVAKVEKGKSKKLKSVKELLGITIMERSSFEKNPIDFLEAKGYKEVKKDLIIKLPKYSLFELENGRKRMLASAGELQKGNELALPSKYVNFLYLASHYEKLKGSPEDNEQKQLFVEQHKHYLDEIIEQISEFSKRVILADANLDKVLSAYNKHRDKPIREQAENIIHLFTLTNLGAPAAFKYFDTTIDRKRYTSTKEVLDATLIHQSITGLYETRIDLSQLGGDGGEAAAKGGSGGTLNIEDEYRLHETSKGPDVPLGSTWLSDFPQAWAETGGMGLAFRQAPLIISLKATSTPVSIKQYPMSQEARLGIKPHIQRLLDQGILVPCQSPWNTPLLPVKKPGTNDYRPVQDLREVNKRVEDIHPTVPNPYNLLSGLPPSHQWYTVLDLKDAFFCLRLHPTSQSLFAFEWKDPEMGISGQLTWTRLPQGFKNSPTLFNEALHRDLADFRIQHPDLILLQYVDDLLLAATSELDCQQGTRALLQTLGDLGYRASAKKAQICQKQVKYLGYLLKEGQRWLTEARKETVMGQPTPKTPRQLREFLGKAGLCRLFIPGFAEMAAPLYPLTKPGTLFKWGPDQQKAYQEIKQALLTAPALGLPDLTKPFELFVDEKQGYAKGVLTQKLGPWRRPVAYLSKKLDPVAAGWPPCLRMVAAIAVLTKDVGKLTMGQPLVILAPHAVEALVKQPPDRWLSNARMTHYQALLLDTDRVQFGPIVALNPATLLPLPEEGLQHDCLDILAEAHGTRPDLTDQPLPDADHTWYTDGSSFLQEGQRRAGAAVTTETEVIWAKALPAGTSAQRAELIALTQALKMAAGKKLNVYTDSRYAFATAHIHGEIYRRRGWLTSEGKEIKNKDEILALLKALFLPKRLSIIHCPGHQKGNHAEARGNRMADQAAREVATRETPETSTLLAGKRTADGSEFEKRTADGSEFESPKKKAKVE

SEQ ID NO: 2436 - protein, 2091 aa, synthetic construct
MPAAKRVKLDGGDKKYSIGLDIGTNSVGWAVITDEYKVPSKKFKVLGNTDRHSIKKNLIGALLFDSGETAEATRLKRTARRRYTRRKNRICYLQEIFSNEMAKVDDSFFHRLEESFLVEEDKKHERHPIFGNIVDEVAYHEKYPTIYHLRKKLVDSTDKADLRLIYLALAHMIKFRGHFLIEGDLNPDNSDVDKLFIQLVQTYNQLFEENPINASGVDAKAILSARLSKSRRLENLIAQLPGEKKNGLFGNLIALSLGLTPNFKSNFDLAEDAKLQLSKDTYDDDLDNLLAQIGDQYADLFLAAKNLSDAILLSDILRVNTEITKAPLSASMIKRYDEHHQDLTLLKALVRQQLPEKYKEIFFDQSKNGYAGYIDGGASQEEFYKFIKPILEKMDGTEELLVKLNREDLLRKQRTFDNGSIPHQIHLGELHAILRRQEDFYPFLKDNREKIEKILTFRIPYYVGPLARGNSRFAWMTRKSEETITPWNFEEVVDKGASAQSFIERMTNFDKNLPNEKVLPKHSLLYEYFTVYNELTKVKYVTEGMRKPAFLSGEQKKAIVDLLFKTNRKVTVKQLKEDYFKKIECFDSVEISGVEDRFNASLGTYHDLLKIIKDKDFLDNEENEDILEDIVLTLTLFEDREMIEERLKTYAHLFDDKVMKQLKRRRYTGWGRLSRKLINGIRDKQSGKTILDFLKSDGFANRNFMQLIHDDSLTFKEDIQKAQVSGQGDSLHEHIANLAGSPAIKKGILQTVKVVDELVKVMGRHKPENIVIEMARENQTTQKGQKNSRERMKRIEEGIKELGSQILKEHPVENTQLQNEKLYLYYLQNGRDMYVDQELDINRLSDYDVDHIVPQSFLKDDSIDNKVLTRSDKARGKSDNVPSEEVVKKMKNYWRQLLNAKLITQRKFDNLTKAERGGLSELDKAGFIKRQLVETRQITKHVAQILDSRMNTKYDENDKLIREVKVITLKSKLVSDFRKDFQFYKVREINNYHHAHDAYLNAVVGTALIKKYPKLESEFVYGDYKVYDVRKMIAKSEQEIGKATAKYFFYSNIMNFFKTEITLANGEIRKRPLIETNGETGEIVWDKGRDFATVRKVLSMPQVNIVKKTEVQTGGFSKESILPKRNSDKLIARKKDWDPKKYGGFDSPTVAYSVLVVAKVEKGKSKKLKSVKELLGITIMERSSFEKNPIDFLEAKGYKEVKKDLIIKLPKYSLFELENGRKRMLASAGELQKGNELALPSKYVNFLYLASHYEKLKGSPEDNEQKQLFVEQHKHYLDEIIEQISEFSKRVILADANLDKVLSAYNKHRDKPIREQAENIIHLFTLTNLGAPAAFKYFDTTIDRKRYTSTKEVLDATLIHQSITGLYETRIDLSQLGGDGGGGGGGSGGTLNIEDEYRLHETSKGPDVPLGSTWLSDFPQAWAETGGMGLAFRQAPLIISLKATSTPVSIKQYPMSQEARLGIKPHIQRLLDQGILVPCQSPWNTPLLPVKKPGTNDYRPVQDLREVNKRVEDIHPTVPNPYNLLSGLPPSHQWYTVLDLKDAFFCLRLHPTSQSLFAFEWKDPEMGISGQLTWTRLPQGFKNSPTLFNEALHRDLADFRIQHPDLILLQYVDDLLLAATSELDCQQGTRALLQTLGDLGYRASAKKAQICQKQVKYLGYLLKEGQRWLTEARKETVMGQPTPKTPRQLREFLGKAGLCRLFIPGFAEMAAPLYPLTKPGTLFKWGPDQQKAYQEIKQALLTAPALGLPDLTKPFELFVDEKQGYAKGVLTQKLGPWRRPVAYLSKKLDPVAAGWPPCLRMVAAIAVLTKDVGKLTMGQPLVILAPHAVEALVKQPPDRWLSNARMTHYQALLLDTDRVQFGPIVALNPATLLPLPEEGLQHDCLDILAEAHGTRPDLTDQPLPDADHTWYTDGSSFLQEGQRRAGAAVTTETEVIWAKALPAGTSAQRAELIALTQALKMAAGKKLNVYTDSRYAFATAHIHGEIYRRRGWLTSEGKEIKNKDEILALLKALFLPKRLSIIHCPGHQKGNHAEARGNRMADQAAREVATRETPETSTLLAGKRTADGSEFEKRTADGSEFESPKKKAKVE

SEQ ID NO: 2437 - protein, 2096 aa, synthetic construct
MPAAKRVKLDGGDKKYSIGLDIGTNSVGWAVITDEYKVPSKKFKVLGNTDRHSIKKNLIGALLFDSGETAEATRLKRTARRRYTRRKNRICYLQEIFSNEMAKVDDSFFHRLEESFLVEEDKKHERHPIFGNIVDEVAYHEKYPTIYHLRKKLVDSTDKADLRLIYLALAHMIKFRGHFLIEGDLNPDNSDVDKLFIQLVQTYNQLFEENPINASGVDAKAILSARLSKSRRLENLIAQLPGEKKNGLFGNLIALSLGLTPNFKSNFDLAEDAKLQLSKDTYDDDLDNLLAQIGDQYADLFLAAKNLSDAILLSDILRVNTEITKAPLSASMIKRYDEHHQDLTLLKALVRQQLPEKYKEIFFDQSKNGYAGYIDGGASQEEFYKFIKPILEKMDGTEELLVKLNREDLLRKQRTFDNGSIPHQIHLGELHAILRRQEDFYPFLKDNREKIEKILTFRIPYYVGPLARGNSRFAWMTRKSEETITPWNFEEVVDKGASAQSFIERMTNFDKNLPNEKVLPKHSLLYEYFTVYNELTKVKYVTEGMRKPAFLSGEQKKAIVDLLFKTNRKVTVKQLKEDYFKKIECFDSVEISGVEDRFNASLGTYHDLLKIIKDKDFLDNEENEDILEDIVLTLTLFEDREMIEERLKTYAHLFDDKVMKQLKRRRYTGWGRLSRKLINGIRDKQSGKTILDFLKSDGFANRNFMQLIHDDSLTFKEDIQKAQVSGQGDSLHEHIANLAGSPAIKKGILQTVKVVDELVKVMGRHKPENIVIEMARENQTTQKGQKNSRERMKRIEEGIKELGSQILKEHPVENTQLQNEKLYLYYLQNGRDMYVDQELDINRLSDYDVDHIVPQSFLKDDSIDNKVLTRSDKARGKSDNVPSEEVVKKMKNYWRQLLNAKLITQRKFDNLTKAERGGLSELDKAGFIKRQLVETRQITKHVAQILDSRMNTKYDENDKLIREVKVITLKSKLVSDFRKDFQFYKVREINNYHHAHDAYLNAVVGTALIKKYPKLESEFVYGDYKVYDVRKMIAKSEQEIGKATAKYFFYSNIMNFFKTEITLANGEIRKRPLIETNGETGEIVWDKGRDFATVRKVLSMPQVNIVKKTEVQTGGFSKESILPKRNSDKLIARKKDWDPKKYGGFDSPTVAYSVLVVAKVEKGKSKKLKSVKELLGITIMERSSFEKNPIDFLEAKGYKEVKKDLIIKLPKYSLFELENGRKRMLASAGELQKGNELALPSKYVNFLYLASHYEKLKGSPEDNEQKQLFVEQHKHYLDEIIEQISEFSKRVILADANLDKVLSAYNKHRDKPIREQAENIIHLFTLTNLGAPAAFKYFDTTIDRKRYTSTKEVLDATLIHQSITGLYETRIDLSQLGGDGGGSSGGSEAAAKGGTLNIEDEYRLHETSKGPDVPLGSTWLSDFPQAWAETGGMGLAFRQAPLIISLKATSTPVSIKQYPMSQEARLGIKPHIQRLLDQGILVPCQSPWNTPLLPVKKPGTNDYRPVQDLREVNKRVEDIHPTVPNPYNLLSGLPPSHQWYTVLDLKDAFFCLRLHPTSQSLFAFEWKDPEMGISGQLTWTRLPQGFKNSPTLFNEALHRDLADFRIQHPDLILLQYVDDLLLAATSELDCQQGTRALLQTLGDLGYRASAKKAQICQKQVKYLGYLLKEGQRWLTEARKETVMGQPTPKTPRQLREFLGKAGLCRLFIPGFAEMAAPLYPLTKPGTLFKWGPDQQKAYQEIKQALLTAPALGLPDLTKPFELFVDEKQGYAKGVLTQKLGPWRRPVAYLSKKLDPVAAGWPPCLRMVAAIAVLTKDVGKLTMGQPLVILAPHAVEALVKQPPDRWLSNARMTHYQALLLDTDRVQFGPIVALNPATLLPLPEEGLQHDCLDILAEAHGTRPDLTDQPLPDADHTWYTDGSSFLQEGQRRAGAAVTTETEVIWAKALPAGTSAQRAELIALTQALKMAAGKKLNVYTDSRYAFATAHIHGEIYRRRGWLTSEGKEIKNKDEILALLKALFLPKRLSIIHCPGHQKGNHAEARGNRMADQAAREVATRETPETSTLLAGKRTADGSEFEKRTADGSEFESPKKKAKVE

SEQ ID NO: 2438 - protein, 2094 aa, synthetic construct
MPAAKRVKLDGGDKKYSIGLDIGTNSVGWAVITDEYKVPSKKFKVLGNTDRHSIKKNLIGALLFDSGETAEATRLKRTARRRYTRRKNRICYLQEIFSNEMAKVDDSFFHRLEESFLVEEDKKHERHPIFGNIVDEVAYHEKYPTIYHLRKKLVDSTDKADLRLIYLALAHMIKFRGHFLIEGDLNPDNSDVDKLFIQLVQTYNQLFEENPINASGVDAKAILSARLSKSRRLENLIAQLPGEKKNGLFGNLIALSLGLTPNFKSNFDLAEDAKLQLSKDTYDDDLDNLLAQIGDQYADLFLAAKNLSDAILLSDILRVNTEITKAPLSASMIKRYDEHHQDLTLLKALVRQQLPEKYKEIFFDQSKNGYAGYIDGGASQEEFYKFIKPILEKMDGTEELLVKLNREDLLRKQRTFDNGSIPHQIHLGELHAILRRQEDFYPFLKDNREKIEKILTFRIPYYVGPLARGNSRFAWMTRKSEETITPWNFEEVVDKGASAQSFIERMTNFDKNLPNEKVLPKHSLLYEYFTVYNELTKVKYVTEGMRKPAFLSGEQKKAIVDLLFKTNRKVTVKQLKEDYFKKIECFDSVEISGVEDRFNASLGTYHDLLKIIKDKDFLDNEENEDILEDIVLTLTLFEDREMIEERLKTYAHLFDDKVMKQLKRRRYTGWGRLSRKLINGIRDKQSGKTILDFLKSDGFANRNFMQLIHDDSLTFKEDIQKAQVSGQGDSLHEHIANLAGSPAIKKGILQTVKVVDELVKVMGRHKPENIVIEMARENQTTQKGQKNSRERMKRIEEGIKELGSQILKEHPVENTQLQNEKLYLYYLQNGRDMYVDQELDINRLSDYDVDHIVPQSFLKDDSIDNKVLTRSDKARGKSDNVPSEEVVKKMKNYWRQLLNAKLITQRKFDNLTKAERGGLSELDKAGFIKRQLVETRQITKHVAQILDSRMNTKYDENDKLIREVKVITLKSKLVSDFRKDFQFYKVREINNYHHAHDAYLNAVVGTALIKKYPKLESEFVYGDYKVYDVRKMIAKSEQEIGKATAKYFFYSNIMNFFKTEITLANGEIRKRPLIETNGETGEIVWDKGRDFATVRKVLSMPQVNIVKKTEVQTGGFSKESILPKRNSDKLIARKKDWDPKKYGGFDSPTVAYSVLVVAKVEKGKSKKLKSVKELLGITIMERSSFEKNPIDFLEAKGYKEVKKDLIIKLPKYSLFELENGRKRMLASAGELQKGNELALPSKYVNFLYLASHYEKLKGSPEDNEQKQLFVEQHKHYLDEIIEQISEFSKRVILADANLDKVLSAYNKHRDKPIREQAENIIHLFTLTNLGAPAAFKYFDTTIDRKRYTSTKEVLDATLIHQSITGLYETRIDLSQLGGDGGGSSGGGGGSGGTLNIEDEYRLHETSKGPDVPLGSTWLSDFPQAWAETGGMGLAFRQAPLIISLKATSTPVSIKQYPMSQEARLGIKPHIQRLLDQGILVPCQSPWNTPLLPVKKPGTNDYRPVQDLREVNKRVEDIHPTVPNPYNLLSGLPPSHQWYTVLDLKDAFFCLRLHPTSQSLFAFEWKDPEMGISGQLTWTRLPQGFKNSPTLFNEALHRDLADFRIQHPDLILLQYVDDLLLAATSELDCQQGTRALLQTLGDLGYRASAKKAQICQKQVKYLGYLLKEGQRWLTEARKETVMGQPTPKTPRQLREFLGKAGLCRLFIPGFAEMAAPLYPLTKPGTLFKWGPDQQKAYQEIKQALLTAPALGLPDLTKPFELFVDEKQGYAKGVLTQKLGPWRRPVAYLSKKLDPVAAGWPPCLRMVAAIAVLTKDVGKLTMGQPLVILAPHAVEALVKQPPDRWLSNARMTHYQALLLDTDRVQFGPIVALNPATLLPLPEEGLQHDCLDILAEAHGTRPDLTDQPLPDADHTWYTDGSSFLQEGQRRAGAAVTTETEVIWAKALPAGTSAQRAELIALTQALKMAAGKKLNVYTDSRYAFATAHIHGEIYRRRGWLTSEGKEIKNKDEILALLKALFLPKRLSIIHCPGHQKGNHAEARGNRMADQAAREVATRETPETSTLLAGKRTADGSEFEKRTADGSEFESPKKKAKVE

SEQ ID NO: 2439 - protein, 2091 aa, synthetic construct
MPAAKRVKLDGGDKKYSIGLDIGTNSVGWAVITDEYKVPSKKFKVLGNTDRHSIKKNLIGALLFDSGETAEATRLKRTARRRYTRRKNRICYLQEIFSNEMAKVDDSFFHRLEESFLVEEDKKHERHPIFGNIVDEVAYHEKYPTIYHLRKKLVDSTDKADLRLIYLALAHMIKFRGHFLIEGDLNPDNSDVDKLFIQLVQTYNQLFEENPINASGVDAKAILSARLSKSRRLENLIAQLPGEKKNGLFGNLIALSLGLTPNFKSNFDLAEDAKLQLSKDTYDDDLDNLLAQIGDQYADLFLAAKNLSDAILLSDILRVNTEITKAPLSASMIKRYDEHHQDLTLLKALVRQQLPEKYKEIFFDQSKNGYAGYIDGGASQEEFYKFIKPILEKMDGTEELLVKLNREDLLRKQRTFDNGSIPHQIHLGELHAILRRQEDFYPFLKDNREKIEKILTFRIPYYVGPLARGNSRFAWMTRKSEETITPWNFEEVVDKGASAQSFIERMTNFDKNLPNEKVLPKHSLLYEYFTVYNELTKVKYVTEGMRKPAFLSGEQKKAIVDLLFKTNRKVTVKQLKEDYFKKIECFDSVEISGVEDRFNASLGTYHDLLKIIKDKDFLDNEENEDILEDIVLTLTLFEDREMIEERLKTYAHLFDDKVMKQLKRRRYTGWGRLSRKLINGIRDKQSGKTILDFLKSDGFANRNFMQLIHDDSLTFKEDIQKAQVSGQGDSLHEHIANLAGSPAIKKGILQTVKVVDELVKVMGRHKPENIVIEMARENQTTQKGQKNSRERMKRIEEGIKELGSQILKEHPVENTQLQNEKLYLYYLQNGRDMYVDQELDINRLSDYDVDHIVPQSFLKDDSIDNKVLTRSDKARGKSDNVPSEEVVKKMKNYWRQLLNAKLITQRKFDNLTKAERGGLSELDKAGFIKRQLVETRQITKHVAQILDSRMNTKYDENDKLIREVKVITLKSKLVSDFRKDFQFYKVREINNYHHAHDAYLNAVVGTALIKKYPKLESEFVYGDYKVYDVRKMIAKSEQEIGKATAKYFFYSNIMNFFKTEITLANGEIRKRPLIETNGETGEIVWDKGRDFATVRKVLSMPQVNIVKKTEVQTGGFSKESILPKRNSDKLIARKKDWDPKKYGGFDSPTVAYSVLVVAKVEKGKSKKLKSVKELLGITIMERSSFEKNPIDFLEAKGYKEVKKDLIIKLPKYSLFELENGRKRMLASAGELQKGNELALPSKYVNFLYLASHYEKLKGSPEDNEQKQLFVEQHKHYLDEIIEQISEFSKRVILADANLDKVLSAYNKHRDKPIREQAENIIHLFTLTNLGAPAAFKYFDTTIDRKRYTSTKEVLDATLIHQSITGLYETRIDLSQLGGDGGGGSGSSGGTLNIEDEYRLHETSKGPDVPLGSTWLSDFPQAWAETGGMGLAFRQAPLIISLKATSTPVSIKQYPMSQEARLGIKPHIQRLLDQGILVPCQSPWNTPLLPVKKPGTNDYRPVQDLREVNKRVEDIHPTVPNPYNLLSGLPPSHQWYTVLDLKDAFFCLRLHPTSQSLFAFEWKDPEMGISGQLTWTRLPQGFKNSPTLFNEALHRDLADFRIQHPDLILLQYVDDLLLAATSELDCQQGTRALLQTLGDLGYRASAKKAQICQKQVKYLGYLLKEGQRWLTEARKETVMGQPTPKTPRQLREFLGKAGLCRLFIPGFAEMAAPLYPLTKPGTLFKWGPDQQKAYQEIKQALLTAPALGLPDLTKPFELFVDEKQGYAKGVLTQKLGPWRRPVAYLSKKLDPVAAGWPPCLRMVAAIAVLTKDVGKLTMGQPLVILAPHAVEALVKQPPDRWLSNARMTHYQALLLDTDRVQFGPIVALNPATLLPLPEEGLQHDCLDILAEAHGTRPDLTDQPLPDADHTWYTDGSSFLQEGQRRAGAAVTTETEVIWAKALPAGTSAQRAELIALTQALKMAAGKKLNVYTDSRYAFATAHIHGEIYRRRGWLTSEGKEIKNKDEILALLKALFLPKRLSIIHCPGHQKGNHAEARGNRMADQAAREVATRETPETSTLLAGKRTADGSEFEKRTADGSEFESPKKKAKVE

SEQ ID NO: 2440 - protein, 2096 aa, synthetic construct
MPAAKRVKLDGGDKKYSIGLDIGTNSVGWAVITDEYKVPSKKFKVLGNTDRHSIKKNLIGALLFDSGETAEATRLKRTARRRYTRRKNRICYLQEIFSNEMAKVDDSFFHRLEESFLVEEDKKHERHPIFGNIVDEVAYHEKYPTIYHLRKKLVDSTDKADLRLIYLALAHMIKFRGHFLIEGDLNPDNSDVDKLFIQLVQTYNQLFEENPINASGVDAKAILSARLSKSRRLENLIAQLPGEKKNGLFGNLIALSLGLTPNFKSNFDLAEDAKLQLSKDTYDDDLDNLLAQIGDQYADLFLAAKNLSDAILLSDILRVNTEITKAPLSASMIKRYDEHHQDLTLLKALVRQQLPEKYKEIFFDQSKNGYAGYIDGGASQEEFYKFIKPILEKMDGTEELLVKLNREDLLRKQRTFDNGSIPHQIHLGELHAILRRQEDFYPFLKDNREKIEKILTFRIPYYVGPLARGNSRFAWMTRKSEETITPWNFEEVVDKGASAQSFIERMTNFDKNLPNEKVLPKHSLLYEYFTVYNELTKVKYVTEGMRKPAFLSGEQKKAIVDLLFKTNRKVTVKQLKEDYFKKIECFDSVEISGVEDRFNASLGTYHDLLKIIKDKDFLDNEENEDILEDIVLTLTLFEDREMIEERLKTYAHLFDDKVMKQLKRRRYTGWGRLSRKLINGIRDKQSGKTILDFLKSDGFANRNFMQLIHDDSLTFKEDIQKAQVSGQGDSLHEHIANLAGSPAIKKGILQTVKVVDELVKVMGRHKPENIVIEMARENQTTQKGQKNSRERMKRIEEGIKELGSQILKEHPVENTQLQNEKLYLYYLQNGRDMYVDQELDINRLSDYDVDHIVPQSFLKDDSIDNKVLTRSDKARGKSDNVPSEEVVKKMKNYWRQLLNAKLITQRKFDNLTKAERGGLSELDKAGFIKRQLVETRQITKHVAQILDSRMNTKYDENDKLIREVKVITLKSKLVSDFRKDFQFYKVREINNYHHAHDAYLNAVVGTALIKKYPKLESEFVYGDYKVYDVRKMIAKSEQEIGKATAKYFFYSNIMNFFKTEITLANGEIRKRPLIETNGETGEIVWDKGRDFATVRKVLSMPQVNIVKKTEVQTGGFSKESILPKRNSDKLIARKKDWDPKKYGGFDSPTVAYSVLVVAKVEKGKSKKLKSVKELLGITIMERSSFEKNPIDFLEAKGYKEVKKDLIIKLPKYSLFELENGRKRMLASAGELQKGNELALPSKYVNFLYLASHYEKLKGSPEDNEQKQLFVEQHKHYLDEIIEQISEFSKRVILADANLDKVLSAYNKHRDKPIREQAENIIHLFTLTNLGAPAAFKYFDTTIDRKRYTSTKEVLDATLIHQSITGLYETRIDLSQLGGDGGPAPGGGEAAAKGGTLNIEDEYRLHETSKGPDVPLGSTWLSDFPQAWAETGGMGLAVRQAPLIIPLKATSTPVSIKQYPMSQEARLGIKPHIQRLLDQGILVPCQSPWNTPLLPVKKPGTNDYRPVQDLREVNKRVEDIHPTVPNPYNLLSGLPPSHQWYTVLDLKDAFFCLRLHPTSQSLFAFEWRDPEMGISGQLTWTRLPQGFKNSPTLFNEALHRDLADFRIQHPDLILLQYVDDLLLAATSELDCQQGTRALLQTLGDLGYRASAKKAQICQKQVKYLGYLLKEGQRWLTEARKETVMGQPTPKTPRQLREFLGTAGFCRLWIPGFAEMAAPLYPLTKPGTLFEWGPDQQKAYQEIKQALLTAPALGLPDLTKPFELFVDEKQGYAKGVLTQKLGPWRRPVAYLSKKLDPVAAGWPPCLRMVAAIAVLTKDAGKLTMGQPLVILAPHAVEALVKQPPDRWLSNARMTHYQALLLDTDRVQFGPIVALNPATLLPLPEEGLQHDCLDILAEAHGTRPDLTDQPLPDADHTWYTDGSSFLQEGQRKAGAAVTTETEVVWAKALPAGTSAQRAELIALTQALKMAEGKKLNVYTDSRYAFATAHIHGEIYRRRGWLTSEGKEIKNKDEILALLKALFLPKRLSIIHCPGHQKGNRAEARGNRMADQAAREVATRETPETSTLLAGKRTADGSEFEKRTADGSEFESPKKKAKVE

SEQ ID NO: 2441 - protein, 2110 aa, synthetic construct
MPAAKRVKLDGGDKKYSIGLDIGTNSVGWAVITDEYKVPSKKFKVLGNTDRHSIKKNLIGALLFDSGETAEATRLKRTARRRYTRRKNRICYLQEIFSNEMAKVDDSFFHRLEESFLVEEDKKHERHPIFGNIVDEVAYHEKYPTIYHLRKKLVDSTDKADLRLIYLALAHMIKFRGHFLIEGDLNPDNSDVDKLFIQLVQTYNQLFEENPINASGVDAKAILSARLSKSRRLENLIAQLPGEKKNGLFGNLIALSLGLTPNFKSNFDLAEDAKLQLSKDTYDDDLDNLLAQIGDQYADLFLAAKNLSDAILLSDILRVNTEITKAPLSASMIKRYDEHHQDLTLLKALVRQQLPEKYKEIFFDQSKNGYAGYIDGGASQEEFYKFIKPILEKMDGTEELLVKLNREDLLRKQRTFDNGSIPHQIHLGELHAILRRQEDFYPFLKDNREKIEKILTFRIPYYVGPLARGNSRFAWMTRKSEETITPWNFEEVVDKGASAQSFIERMTNFDKNLPNEKVLPKHSLLYEYFTVYNELTKVKYVTEGMRKPAFLSGEQKKAIVDLLFKTNRKVTVKQLKEDYFKKIECFDSVEISGVEDRFNASLGTYHDLLKIIKDKDFLDNEENEDILEDIVLTLTLFEDREMIEERLKTYAHLFDDKVMKQLKRRRYTGWGRLSRKLINGIRDKQSGKTILDFLKSDGFANRNFMQLIHDDSLTFKEDIQKAQVSGQGDSLHEHIANLAGSPAIKKGILQTVKVVDELVKVMGRHKPENIVIEMARENQTTQKGQKNSRERMKRIEEGIKELGSQILKEHPVENTQLQNEKLYLYYLQNGRDMYVDQELDINRLSDYDVDHIVPQSFLKDDSIDNKVLTRSDKARGKSDNVPSEEVVKKMKNYWRQLLNAKLITQRKFDNLTKAERGGLSELDKAGFIKRQLVETRQITKHVAQILDSRMNTKYDENDKLIREVKVITLKSKLVSDFRKDFQFYKVREINNYHHAHDAYLNAVVGTALIKKYPKLESEFVYGDYKVYDVRKMIAKSEQEIGKATAKYFFYSNIMNFFKTEITLANGEIRKRPLIETNGETGEIVWDKGRDFATVRKVLSMPQVNIVKKTEVQTGGFSKESILPKRNSDKLIARKKDWDPKKYGGFDSPTVAYSVLVVAKVEKGKSKKLKSVKELLGITIMERSSFEKNPIDFLEAKGYKEVKKDLIIKLPKYSLFELENGRKRMLASAGELQKGNELALPSKYVNFLYLASHYEKLKGSPEDNEQKQLFVEQHKHYLDEIIEQISEFSKRVILADANLDKVLSAYNKHRDKPIREQAENIIHLFTLTNLGAPAAFKYFDTTIDRKRYTSTKEVLDATLIHQSITGLYETRIDLSQLGGDGGGGGGSGGGGSGGGGSGGGGSGGGGSGGTLNIEDEYRLHETSKGPDVPLGSTWLSDFPQAWAETGGMGLAVRQAPLIIPLKATSTPVSIKQYPMSQEARLGIKPHIQRLLDQGILVPCQSPWNTPLLPVKKPGTNDYRPVQDLREVNKRVEDIHPTVPNPYNLLSGLPPSHQWYTVLDLKDAFFCLRLHPTSQSLFAFEWRDPEMGISGQLTWTRLPQGFKNSPTLFNEALHRDLADFRIQHPDLILLQYVDDLLLAATSELDCQQGTRALLQTLGDLGYRASAKKAQICQKQVKYLGYLLKEGQRWLTEARKETVMGQPTPKTPRQLREFLGTAGFCRLWIPGFAEMAAPLYPLTKPGTLFEWGPDQQKAYQEIKQALLTAPALGLPDLTKPFELFVDEKQGYAKGVLTQKLGPWRRPVAYLSKKLDPVAAGWPPCLRMVAAIAVLTKDAGKLTMGQPLVILAPHAVEALVKQPPDRWLSNARMTHYQALLLDTDRVQFGPIVALNPATLLPLPEEGLQHDCLDILAEAHGTRPDLTDQPLPDADHTWYTDGSSFLQEGQRKAGAAVTTETEVVWAKALPAGTSAQRAELIALTQALKMAEGKKLNVYTDSRYAFATAHIHGEIYRRRGWLTSEGKEIKNKDEILALLKALFLPKRLSIIHCPGHQKGNRAEARGNRMADQAAREVATRETPETSTLLAGKRTADGSEFEKRTADGSEFESPKKKAKVE

SEQ ID NO: 2442 - protein, 2088 aa, synthetic construct
MPAAKRVKLDGGDKKYSIGLDIGTNSVGWAVITDEYKVPSKKFKVLGNTDRHSIKKNLIGALLFDSGETAEATRLKRTARRRYTRRKNRICYLQEIFSNEMAKVDDSFFHRLEESFLVEEDKKHERHPIFGNIVDEVAYHEKYPTIYHLRKKLVDSTDKADLRLIYLALAHMIKFRGHFLIEGDLNPDNSDVDKLFIQLVQTYNQLFEENPINASGVDAKAILSARLSKSRRLENLIAQLPGEKKNGLFGNLIALSLGLTPNFKSNFDLAEDAKLQLSKDTYDDDLDNLLAQIGDQYADLFLAAKNLSDAILLSDILRVNTEITKAPLSASMIKRYDEHHQDLTLLKALVRQQLPEKYKEIFFDQSKNGYAGYIDGGASQEEFYKFIKPILEKMDGTEELLVKLNREDLLRKQRTFDNGSIPHQIHLGELHAILRRQEDFYPFLKDNREKIEKILTFRIPYYVGPLARGNSRFAWMTRKSEETITPWNFEEVVDKGASAQSFIERMTNFDKNLPNEKVLPKHSLLYEYFTVYNELTKVKYVTEGMRKPAFLSGEQKKAIVDLLFKTNRKVTVKQLKEDYFKKIECFDSVEISGVEDRFNASLGTYHDLLKIIKDKDFLDNEENEDILEDIVLTLTLFEDREMIEERLKTYAHLFDDKVMKQLKRRRYTGWGRLSRKLINGIRDKQSGKTILDFLKSDGFANRNFMQLIHDDSLTFKEDIQKAQVSGQGDSLHEHIANLAGSPAIKKGILQTVKVVDELVKVMGRHKPENIVIEMARENQTTQKGQKNSRERMKRIEEGIKELGSQILKEHPVENTQLQNEKLYLYYLQNGRDMYVDQELDINRLSDYDVDHIVPQSFLKDDSIDNKVLTRSDKARGKSDNVPSEEVVKKMKNYWRQLLNAKLITQRKFDNLTKAERGGLSELDKAGFIKRQLVETRQITKHVAQILDSRMNTKYDENDKLIREVKVITLKSKLVSDFRKDFQFYKVREINNYHHAHDAYLNAVVGTALIKKYPKLESEFVYGDYKVYDVRKMIAKSEQEIGKATAKYFFYSNIMNFFKTEITLANGEIRKRPLIETNGETGEIVWDKGRDFATVRKVLSMPQVNIVKKTEVQTGGFSKESILPKRNSDKLIARKKDWDPKKYGGFDSPTVAYSVLVVAKVEKGKSKKLKSVKELLGITIMERSSFEKNPIDFLEAKGYKEVKKDLIIKLPKYSLFELENGRKRMLASAGELQKGNELALPSKYVNFLYLASHYEKLKGSPEDNEQKQLFVEQHKHYLDEIIEQISEFSKRVILADANLDKVLSAYNKHRDKPIREQAENIIHLFTLTNLGAPAAFKYFDTTIDRKRYTSTKEVLDATLIHQSITGLYETRIDLSQLGGDGGPAPGGTLNIEDEYRLHETSKGPDVPLGSTWLSDFPQAWAETGGMGLAVRQAPLIIPLKATSTPVSIKQYPMSQEARLGIKPHIQRLLDQGILVPCQSPWNTPLLPVKKPGTNDYRPVQDLREVNKRVEDIHPTVPNPYNLLSGLPPSHQWYTVLDLKDAFFCLRLHPTSQSLFAFEWRDPEMGISGQLTWTRLPQGFKNSPTLFNEALHRDLADFRIQHPDLILLQYVDDLLLAATSELDCQQGTRALLQTLGDLGYRASAKKAQICQKQVKYLGYLLKEGQRWLTEARKETVMGQPTPKTPRQLREFLGTAGFCRLWIPGFAEMAAPLYPLTKPGTLFEWGPDQQKAYQEIKQALLTAPALGLPDLTKPFELFVDEKQGYAKGVLTQKLGPWRRPVAYLSKKLDPVAAGWPPCLRMVAAIAVLTKDAGKLTMGQPLVILAPHAVEALVKQPPDRWLSNARMTHYQALLLDTDRVQFGPIVALNPATLLPLPEEGLQHDCLDILAEAHGTRPDLTDQPLPDADHTWYTDGSSFLQEGQRKAGAAVTTETEVVWAKALPAGTSAQRAELIALTQALKMAEGKKLNVYTDSRYAFATAHIHGEIYRRRGWLTSEGKEIKNKDEILALLKALFLPKRLSIIHCPGHQKGNRAEARGNRMADQAAREVATRETPETSTLLAGKRTADGSEFEKRTADGSEFESPKKKAKVE

SEQ ID NO: 2443 - protein, 2100 aa, synthetic construct
MPAAKRVKLDGGDKKYSIGLDIGTNSVGWAVITDEYKVPSKKFKVLGNTDRHSIKKNLIGALLFDSGETAEATRLKRTARRRYTRRKNRICYLQEIFSNEMAKVDDSFFHRLEESFLVEEDKKHERHPIFGNIVDEVAYHEKYPTIYHLRKKLVDSTDKADLRLIYLALAHMIKFRGHFLIEGDLNPDNSDVDKLFIQLVQTYNQLFEENPINASGVDAKAILSARLSKSRRLENLIAQLPGEKKNGLFGNLIALSLGLTPNFKSNFDLAEDAKLQLSKDTYDDDLDNLLAQIGDQYADLFLAAKNLSDAILLSDILRVNTEITKAPLSASMIKRYDEHHQDLTLLKALVRQQLPEKYKEIFFDQSKNGYAGYIDGGASQEEFYKFIKPILEKMDGTEELLVKLNREDLLRKQRTFDNGSIPHQIHLGELHAILRRQEDFYPFLKDNREKIEKILTFRIPYYVGPLARGNSRFAWMTRKSEETITPWNFEEVVDKGASAQSFIERMTNFDKNLPNEKVLPKHSLLYEYFTVYNELTKVKYVTEGMRKPAFLSGEQKKAIVDLLFKTNRKVTVKQLKEDYFKKIECFDSVEISGVEDRFNASLGTYHDLLKIIKDKDFLDNEENEDILEDIVLTLTLFEDREMIEERLKTYAHLFDDKVMKQLKRRRYTGWGRLSRKLINGIRDKQSGKTILDFLKSDGFANRNFMQLIHDDSLTFKEDIQKAQVSGQGDSLHEHIANLAGSPAIKKGILQTVKVVDELVKVMGRHKPENIVIEMARENQTTQKGQKNSRERMKRIEEGIKELGSQILKEHPVENTQLQNEKLYLYYLQNGRDMYVDQELDINRLSDYDVDHIVPQSFLKDDSIDNKVLTRSDKARGKSDNVPSEEVVKKMKNYWRQLLNAKLITQRKFDNLTKAERGGLSELDKAGFIKRQLVETRQITKHVAQILDSRMNTKYDENDKLIREVKVITLKSKLVSDFRKDFQFYKVREINNYHHAHDAYLNAVVGTALIKKYPKLESEFVYGDYKVYDVRKMIAKSEQEIGKATAKYFFYSNIMNFFKTEITLANGEIRKRPLIETNGETGEIVWDKGRDFATVRKVLSMPQVNIVKKTEVQTGGFSKESILPKRNSDKLIARKKDWDPKKYGGFDSPTVAYSVLVVAKVEKGKSKKLKSVKELLGITIMERSSFEKNPIDFLEAKGYKEVKKDLIIKLPKYSLFELENGRKRMLASAGELQKGNELALPSKYVNFLYLASHYEKLKGSPEDNEQKQLFVEQHKHYLDEIIEQISEFSKRVILADANLDKVLSAYNKHRDKPIREQAENIIHLFTLTNLGAPAAFKYFDTTIDRKRYTSTKEVLDATLIHQSITGLYETRIDLSQLGGDGGGSSGSSGSSGSSGSSGGTLNIEDEYRLHETSKGPDVPLGSTWLSDFPQAWAETGGMGLAVRQAPLIIPLKATSTPVSIKQYPMSQEARLGIKPHIQRLLDQGILVPCQSPWNTPLLPVKKPGTNDYRPVQDLREVNKRVEDIHPTVPNPYNLLSGLPPSHQWYTVLDLKDAFFCLRLHPTSQSLFAFEWRDPEMGISGQLTWTRLPQGFKNSPTLFNEALHRDLADFRIQHPDLILLQYVDDLLLAATSELDCQQGTRALLQTLGDLGYRASAKKAQICQKQVKYLGYLLKEGQRWLTEARKETVMGQPTPKTPRQLREFLGTAGFCRLWIPGFAEMAAPLYPLTKPGTLFEWGPDQQKAYQEIKQALLTAPALGLPDLTKPFELFVDEKQGYAKGVLTQKLGPWRRPVAYLSKKLDPVAAGWPPCLRMVAAIAVLTKDAGKLTMGQPLVILAPHAVEALVKQPPDRWLSNARMTHYQALLLDTDRVQFGPIVALNPATLLPLPEEGLQHDCLDILAEAHGTRPDLTDQPLPDADHTWYTDGSSFLQEGQRKAGAAVTTETEVVWAKALPAGTSAQRAELIALTQALKMAEGKKLNVYTDSRYAFATAHIHGEIYRRRGWLTSEGKEIKNKDEILALLKALFLPKRLSIIHCPGHQKGNRAEARGNRMADQAAREVATRETPETSTLLAGKRTADGSEFEKRTADGSEFESPKKKAKVE

SEQ ID NO: 2444 - protein, 2096 aa, synthetic construct
MPAAKRVKLDGGDKKYSIGLDIGTNSVGWAVITDEYKVPSKKFKVLGNTDRHSIKKNLIGALLFDSGETAEATRLKRTARRRYTRRKNRICYLQEIFSNEMAKVDDSFFHRLEESFLVEEDKKHERHPIFGNIVDEVAYHEKYPTIYHLRKKLVDSTDKADLRLIYLALAHMIKFRGHFLIEGDLNPDNSDVDKLFIQLVQTYNQLFEENPINASGVDAKAILSARLSKSRRLENLIAQLPGEKKNGLFGNLIALSLGLTPNFKSNFDLAEDAKLQLSKDTYDDDLDNLLAQIGDQYADLFLAAKNLSDAILLSDILRVNTEITKAPLSASMIKRYDEHHQDLTLLKALVRQQLPEKYKEIFFDQSKNGYAGYIDGGASQEEFYKFIKPILEKMDGTEELLVKLNREDLLRKQRTFDNGSIPHQIHLGELHAILRRQEDFYPFLKDNREKIEKILTFRIPYYVGPLARGNSRFAWMTRKSEETITPWNFEEVVDKGASAQSFIERMTNFDKNLPNEKVLPKHSLLYEYFTVYNELTKVKYVTEGMRKPAFLSGEQKKAIVDLLFKTNRKVTVKQLKEDYFKKIECFDSVEISGVEDRFNASLGTYHDLLKIIKDKDFLDNEENEDILEDIVLTLTLFEDREMIEERLKTYAHLFDDKVMKQLKRRRYTGWGRLSRKLINGIRDKQSGKTILDFLKSDGFANRNFMQLIHDDSLTFKEDIQKAQVSGQGDSLHEHIANLAGSPAIKKGILQTVKVVDELVKVMGRHKPENIVIEMARENQTTQKGQKNSRERMKRIEEGIKELGSQILKEHPVENTQLQNEKLYLYYLQNGRDMYVDQELDINRLSDYDVDHIVPQSFLKDDSIDNKVLTRSDKARGKSDNVPSEEVVKKMKNYWRQLLNAKLITQRKFDNLTKAERGGLSELDKAGFIKRQLVETRQITKHVAQILDSRMNTKYDENDKLIREVKVITLKSKLVSDFRKDFQFYKVREINNYHHAHDAYLNAVVGTALIKKYPKLESEFVYGDYKVYDVRKMIAKSEQEIGKATAKYFFYSNIMNFFKTEITLANGEIRKRPLIETNGETGEIVWDKGRDFATVRKVLSMPQVNIVKKTEVQTGGFSKESILPKRNSDKLIARKKDWDPKKYGGFDSPTVAYSVLVVAKVEKGKSKKLKSVKELLGITIMERSSFEKNPIDFLEAKGYKEVKKDLIIKLPKYSLFELENGRKRMLASAGELQKGNELALPSKYVNFLYLASHYEKLKGSPEDNEQKQLFVEQHKHYLDEIIEQISEFSKRVILADANLDKVLSAYNKHRDKPIREQAENIIHLFTLTNLGAPAAFKYFDTTIDRKRYTSTKEVLDATLIHQSITGLYETRIDLSQLGGDGGEAAAKGSSGGSGGTLNIEDEYRLHETSKGPDVPLGSTWLSDFPQAWAETGGMGLAVRQAPLIIPLKATSTPVSIKQYPMSQEARLGIKPHIQRLLDQGILVPCQSPWNTPLLPVKKPGTNDYRPVQDLREVNKRVEDIHPTVPNPYNLLSGLPPSHQWYTVLDLKDAFFCLRLHPTSQSLFAFEWRDPEMGISGQLTWTRLPQGFKNSPTLFNEALHRDLADFRIQHPDLILLQYVDDLLLAATSELDCQQGTRALLQTLGDLGYRASAKKAQICQKQVKYLGYLLKEGQRWLTEARKETVMGQPTPKTPRQLREFLGTAGFCRLWIPGFAEMAAPLYPLTKPGTLFEWGPDQQKAYQEIKQALLTAPALGLPDLTKPFELFVDEKQGYAKGVLTQKLGPWRRPVAYLSKKLDPVAAGWPPCLRMVAAIAVLTKDAGKLTMGQPLVILAPHAVEALVKQPPDRWLSNARMTHYQALLLDTDRVQFGPIVALNPATLLPLPEEGLQHDCLDILAEAHGTRPDLTDQPLPDADHTWYTDGSSFLQEGQRKAGAAVTTETEVVWAKALPAGTSAQRAELIALTQALKMAEGKKLNVYTDSRYAFATAHIHGEIYRRRGWLTSEGKEIKNKDEILALLKALFLPKRLSIIHCPGHQKGNRAEARGNRMADQAAREVATRETPETSTLLAGKRTADGSEFEKRTADGSEFESPKKKAKVE

SEQ ID NO: 2445 - protein, 2091 aa, synthetic construct
MPAAKRVKLDGGDKKYSIGLDIGTNSVGWAVITDEYKVPSKKFKVLGNTDRHSIKKNLIGALLFDSGETAEATRLKRTARRRYTRRKNRICYLQEIFSNEMAKVDDSFFHRLEESFLVEEDKKHERHPIFGNIVDEVAYHEKYPTIYHLRKKLVDSTDKADLRLIYLALAHMIKFRGHFLIEGDLNPDNSDVDKLFIQLVQTYNQLFEENPINASGVDAKAILSARLSKSRRLENLIAQLPGEKKNGLFGNLIALSLGLTPNFKSNFDLAEDAKLQLSKDTYDDDLDNLLAQIGDQYADLFLAAKNLSDAILLSDILRVNTEITKAPLSASMIKRYDEHHQDLTLLKALVRQQLPEKYKEIFFDQSKNGYAGYIDGGASQEEFYKFIKPILEKMDGTEELLVKLNREDLLRKQRTFDNGSIPHQIHLGELHAILRRQEDFYPFLKDNREKIEKILTFRIPYYVGPLARGNSRFAWMTRKSEETITPWNFEEVVDKGASAQSFIERMTNFDKNLPNEKVLPKHSLLYEYFTVYNELTKVKYVTEGMRKPAFLSGEQKKAIVDLLFKTNRKVTVKQLKEDYFKKIECFDSVEISGVEDRFNASLGTYHDLLKIIKDKDFLDNEENEDILEDIVLTLTLFEDREMIEERLKTYAHLFDDKVMKQLKRRRYTGWGRLSRKLINGIRDKQSGKTILDFLKSDGFANRNFMQLIHDDSLTFKEDIQKAQVSGQGDSLHEHIANLAGSPAIKKGILQTVKVVDELVKVMGRHKPENIVIEMARENQTTQKGQKNSRERMKRIEEGIKELGSQILKEHPVENTQLQNEKLYLYYLQNGRDMYVDQELDINRLSDYDVDHIVPQSFLKDDSIDNKVLTRSDKARGKSDNVPSEEVVKKMKNYWRQLLNAKLITQRKFDNLTKAERGGLSELDKAGFIKRQLVETRQITKHVAQILDSRMNTKYDENDKLIREVKVITLKSKLVSDFRKDFQFYKVREINNYHHAHDAYLNAVVGTALIKKYPKLESEFVYGDYKVYDVRKMIAKSEQEIGKATAKYFFYSNIMNFFKTEITLANGEIRKRPLIETNGETGEIVWDKGRDFATVRKVLSMPQVNIVKKTEVQTGGFSKESILPKRNSDKLIARKKDWDPKKYGGFDSPTVAYSVLVVAKVEKGKSKKLKSVKELLGITIMERSSFEKNPIDFLEAKGYKEVKKDLIIKLPKYSLFELENGRKRMLASAGELQKGNELALPSKYVNFLYLASHYEKLKGSPEDNEQKQLFVEQHKHYLDEIIEQISEFSKRVILADANLDKVLSAYNKHRDKPIREQAENIIHLFTLTNLGAPAAFKYFDTTIDRKRYTSTKEVLDATLIHQSITGLYETRIDLSQLGGDGGGGGPAPGGTLNIEDEYRLHETSKGPDVPLGSTWLSDFPQAWAETGGMGLAVRQAPLIIPLKATSTPVSIKQYPMSQEARLGIKPHIQRLLDQGILVPCQSPWNTPLLPVKKPGTNDYRPVQDLREVNKRVEDIHPTVPNPYNLLSGLPPSHQWYTVLDLKDAFFCLRLHPTSQSLFAFEWRDPEMGISGQLTWTRLPQGFKNSPTLFNEALHRDLADFRIQHPDLILLQYVDDLLLAATSELDCQQGTRALLQTLGDLGYRASAKKAQICQKQVKYLGYLLKEGQRWLTEARKETVMGQPTPKTPRQLREFLGTAGFCRLWIPGFAEMAAPLYPLTKPGTLFEWGPDQQKAYQEIKQALLTAPALGLPDLTKPFELFVDEKQGYAKGVLTQKLGPWRRPVAYLSKKLDPVAAGWPPCLRMVAAIAVLTKDAGKLTMGQPLVILAPHAVEALVKQPPDRWLSNARMTHYQALLLDTDRVQFGPIVALNPATLLPLPEEGLQHDCLDILAEAHGTRPDLTDQPLPDADHTWYTDGSSFLQEGQRKAGAAVTTETEVVWAKALPAGTSAQRAELIALTQALKMAEGKKLNVYTDSRYAFATAHIHGEIYRRRGWLTSEGKEIKNKDEILALLKALFLPKRLSIIHCPGHQKGNRAEARGNRMADQAAREVATRETPETSTLLAGKRTADGSEFEKRTADGSEFESPKKKAKVE

SEQ ID NO: 2446 - protein, 2105 aa, synthetic construct
MPAAKRVKLDGGDKKYSIGLDIGTNSVGWAVITDEYKVPSKKFKVLGNTDRHSIKKNLIGALLFDSGETAEATRLKRTARRRYTRRKNRICYLQEIFSNEMAKVDDSFFHRLEESFLVEEDKKHERHPIFGNIVDEVAYHEKYPTIYHLRKKLVDSTDKADLRLIYLALAHMIKFRGHFLIEGDLNPDNSDVDKLFIQLVQTYNQLFEENPINASGVDAKAILSARLSKSRRLENLIAQLPGEKKNGLFGNLIALSLGLTPNFKSNFDLAEDAKLQLSKDTYDDDLDNLLAQIGDQYADLFLAAKNLSDAILLSDILRVNTEITKAPLSASMIKRYDEHHQDLTLLKALVRQQLPEKYKEIFFDQSKNGYAGYIDGGASQEEFYKFIKPILEKMDGTEELLVKLNREDLLRKQRTFDNGSIPHQIHLGELHAILRRQEDFYPFLKDNREKIEKILTFRIPYYVGPLARGNSRFAWMTRKSEETITPWNFEEVVDKGASAQSFIERMTNFDKNLPNEKVLPKHSLLYEYFTVYNELTKVKYVTEGMRKPAFLSGEQKKAIVDLLFKTNRKVTVKQLKEDYFKKIECFDSVEISGVEDRFNASLGTYHDLLKIIKDKDFLDNEENEDILEDIVLTLTLFEDREMIEERLKTYAHLFDDKVMKQLKRRRYTGWGRLSRKLINGIRDKQSGKTILDFLKSDGFANRNFMQLIHDDSLTFKEDIQKAQVSGQGDSLHEHIANLAGSPAIKKGILQTVKVVDELVKVMGRHKPENIVIEMARENQTTQKGQKNSRERMKRIEEGIKELGSQILKEHPVENTQLQNEKLYLYYLQNGRDMYVDQELDINRLSDYDVDHIVPQSFLKDDSIDNKVLTRSDKARGKSDNVPSEEVVKKMKNYWRQLLNAKLITQRKFDNLTKAERGGLSELDKAGFIKRQLVETRQITKHVAQILDSRMNTKYDENDKLIREVKVITLKSKLVSDFRKDFQFYKVREINNYHHAHDAYLNAVVGTALIKKYPKLESEFVYGDYKVYDVRKMIAKSEQEIGKATAKYFFYSNIMNFFKTEITLANGEIRKRPLIETNGETGEIVWDKGRDFATVRKVLSMPQVNIVKKTEVQTGGFSKESILPKRNSDKLIARKKDWDPKKYGGFDSPTVAYSVLVVAKVEKGKSKKLKSVKELLGITIMERSSFEKNPIDFLEAKGYKEVKKDLIIKLPKYSLFELENGRKRMLASAGELQKGNELALPSKYVNFLYLASHYEKLKGSPEDNEQKQLFVEQHKHYLDEIIEQISEFSKRVILADANLDKVLSAYNKHRDKPIREQAENIIHLFTLTNLGAPAAFKYFDTTIDRKRYTSTKEVLDATLIHQSITGLYETRIDLSQLGGDGGEAAAKEAAAKEAAAKEAAAKGGTLNIEDEYRLHETSKGPDVPLGSTWLSDFPQAWAETGGMGLAVRQAPLIIPLKATSTPVSIKQYPMSQEARLGIKPHIQRLLDQGILVPCQSPWNTPLLPVKKPGTNDYRPVQDLREVNKRVEDIHPTVPNPYNLLSGLPPSHQWYTVLDLKDAFFCLRLHPTSQSLFAFEWRDPEMGISGQLTWTRLPQGFKNSPTLFNEALHRDLADFRIQHPDLILLQYVDDLLLAATSELDCQQGTRALLQTLGDLGYRASAKKAQICQKQVKYLGYLLKEGQRWLTEARKETVMGQPTPKTPRQLREFLGTAGFCRLWIPGFAEMAAPLYPLTKPGTLFEWGPDQQKAYQEIKQALLTAPALGLPDLTKPFELFVDEKQGYAKGVLTQKLGPWRRPVAYLSKKLDPVAAGWPPCLRMVAAIAVLTKDAGKLTMGQPLVILAPHAVEALVKQPPDRWLSNARMTHYQALLLDTDRVQFGPIVALNPATLLPLPEEGLQHDCLDILAEAHGTRPDLTDQPLPDADHTWYTDGSSFLQEGQRKAGAAVTTETEVVWAKALPAGTSAQRAELIALTQALKMAEGKKLNVYTDSRYAFATAHIHGEIYRRRGWLTSEGKEIKNKDEILALLKALFLPKRLSIIHCPGHQKGNRAEARGNRMADQAAREVATRETPETSTLLAGKRTADGSEFEKRTADGSEFESPKKKAKVE

SEQ ID NO: 2447 - protein, 2096 aa, synthetic construct
MPAAKRVKLDGGDKKYSIGLDIGTNSVGWAVITDEYKVPSKKFKVLGNTDRHSIKKNLIGALLFDSGETAEATRLKRTARRRYTRRKNRICYLQEIFSNEMAKVDDSFFHRLEESFLVEEDKKHERHPIFGNIVDEVAYHEKYPTIYHLRKKLVDSTDKADLRLIYLALAHMIKFRGHFLIEGDLNPDNSDVDKLFIQLVQTYNQLFEENPINASGVDAKAILSARLSKSRRLENLIAQLPGEKKNGLFGNLIALSLGLTPNFKSNFDLAEDAKLQLSKDTYDDDLDNLLAQIGDQYADLFLAAKNLSDAILLSDILRVNTEITKAPLSASMIKRYDEHHQDLTLLKALVRQQLPEKYKEIFFDQSKNGYAGYIDGGASQEEFYKFIKPILEKMDGTEELLVKLNREDLLRKQRTFDNGSIPHQIHLGELHAILRRQEDFYPFLKDNREKIEKILTFRIPYYVGPLARGNSRFAWMTRKSEETITPWNFEEVVDKGASAQSFIERMTNFDKNLPNEKVLPKHSLLYEYFTVYNELTKVKYVTEGMRKPAFLSGEQKKAIVDLLFKTNRKVTVKQLKEDYFKKIECFDSVEISGVEDRFNASLGTYHDLLKIIKDKDFLDNEENEDILEDIVLTLTLFEDREMIEERLKTYAHLFDDKVMKQLKRRRYTGWGRLSRKLINGIRDKQSGKTILDFLKSDGFANRNFMQLIHDDSLTFKEDIQKAQVSGQGDSLHEHIANLAGSPAIKKGILQTVKVVDELVKVMGRHKPENIVIEMARENQTTQKGQKNSRERMKRIEEGIKELGSQILKEHPVENTQLQNEKLYLYYLQNGRDMYVDQELDINRLSDYDVDHIVPQSFLKDDSIDNKVLTRSDKARGKSDNVPSEEVVKKMKNYWRQLLNAKLITQRKFDNLTKAERGGLSELDKAGFIKRQLVETRQITKHVAQILDSRMNTKYDENDKLIREVKVITLKSKLVSDFRKDFQFYKVREINNYHHAHDAYLNAVVGTALIKKYPKLESEFVYGDYKVYDVRKMIAKSEQEIGKATAKYFFYSNIMNFFKTEITLANGEIRKRPLIETNGETGEIVWDKGRDFATVRKVLSMPQVNIVKKTEVQTGGFSKESILPKRNSDKLIARKKDWDPKKYGGFDSPTVAYSVLVVAKVEKGKSKKLKSVKELLGITIMERSSFEKNPIDFLEAKGYKEVKKDLIIKLPKYSLFELENGRKRMLASAGELQKGNELALPSKYVNFLYLASHYEKLKGSPEDNEQKQLFVEQHKHYLDEIIEQISEFSKRVILADANLDKVLSAYNKHRDKPIREQAENIIHLFTLTNLGAPAAFKYFDTTIDRKRYTSTKEVLDATLIHQSITGLYETRIDLSQLGGDGGGGSPAPEAAAKGGTLNIEDEYRLHETSKGPDVPLGSTWLSDFPQAWAETGGMGLAVRQAPLIIPLKATSTPVSIKQYPMSQEARLGIKPHIQRLLDQGILVPCQSPWNTPLLPVKKPGTNDYRPVQDLREVNKRVEDIHPTVPNPYNLLSGLPPSHQWYTVLDLKDAFFCLRLHPTSQSLFAFEWRDPEMGISGQLTWTRLPQGFKNSPTLFNEALHRDLADFRIQHPDLILLQYVDDLLLAATSELDCQQGTRALLQTLGDLGYRASAKKAQICQKQVKYLGYLLKEGQRWLTEARKETVMGQPTPKTPRQLREFLGTAGFCRLWIPGFAEMAAPLYPLTKPGTLFEWGPDQQKAYQEIKQALLTAPALGLPDLTKPFELFVDEKQGYAKGVLTQKLGPWRRPVAYLSKKLDPVAAGWPPCLRMVAAIAVLTKDAGKLTMGQPLVILAPHAVEALVKQPPDRWLSNARMTHYQALLLDTDRVQFGPIVALNPATLLPLPEEGLQHDCLDILAEAHGTRPDLTDQPLPDADHTWYTDGSSFLQEGQRKAGAAVTTETEVVWAKALPAGTSAQRAELIALTQALKMAEGKKLNVYTDSRYAFATAHIHGEIYRRRGWLTSEGKEIKNKDEILALLKALFLPKRLSIIHCPGHQKGNRAEARGNRMADQAAREVATRETPETSTLLAGKRTADGSEFEKRTADGSEFESPKKKAKVE

SEQ ID NO: 2448 - protein, 2090 aa, synthetic construct
MPAAKRVKLDGGDKKYSIGLDIGTNSVGWAVITDEYKVPSKKFKVLGNTDRHSIKKNLIGALLFDSGETAEATRLKRTARRRYTRRKNRICYLQEIFSNEMAKVDDSFFHRLEESFLVEEDKKHERHPIFGNIVDEVAYHEKYPTIYHLRKKLVDSTDKADLRLIYLALAHMIKFRGHFLIEGDLNPDNSDVDKLFIQLVQTYNQLFEENPINASGVDAKAILSARLSKSRRLENLIAQLPGEKKNGLFGNLIALSLGLTPNFKSNFDLAEDAKLQLSKDTYDDDLDNLLAQIGDQYADLFLAAKNLSDAILLSDILRVNTEITKAPLSASMIKRYDEHHQDLTLLKALVRQQLPEKYKEIFFDQSKNGYAGYIDGGASQEEFYKFIKPILEKMDGTEELLVKLNREDLLRKQRTFDNGSIPHQIHLGELHAILRRQEDFYPFLKDNREKIEKILTFRIPYYVGPLARGNSRFAWMTRKSEETITPWNFEEVVDKGASAQSFIERMTNFDKNLPNEKVLPKHSLLYEYFTVYNELTKVKYVTEGMRKPAFLSGEQKKAIVDLLFKTNRKVTVKQLKEDYFKKIECFDSVEISGVEDRFNASLGTYHDLLKIIKDKDFLDNEENEDILEDIVLTLTLFEDREMIEERLKTYAHLFDDKVMKQLKRRRYTGWGRLSRKLINGIRDKQSGKTILDFLKSDGFANRNFMQLIHDDSLTFKEDIQKAQVSGQGDSLHEHIANLAGSPAIKKGILQTVKVVDELVKVMGRHKPENIVIEMARENQTTQKGQKNSRERMKRIEEGIKELGSQILKEHPVENTQLQNEKLYLYYLQNGRDMYVDQELDINRLSDYDVDHIVPQSFLKDDSIDNKVLTRSDKARGKSDNVPSEEVVKKMKNYWRQLLNAKLITQRKFDNLTKAERGGLSELDKAGFIKRQLVETRQITKHVAQILDSRMNTKYDENDKLIREVKVITLKSKLVSDFRKDFQFYKVREINNYHHAHDAYLNAVVGTALIKKYPKLESEFVYGDYKVYDVRKMIAKSEQEIGKATAKYFFYSNIMNFFKTEITLANGEIRKRPLIETNGETGEIVWDKGRDFATVRKVLSMPQVNIVKKTEVQTGGFSKESILPKRNSDKLIARKKDWDPKKYGGFDSPTVAYSVLVVAKVEKGKSKKLKSVKELLGITIMERSSFEKNPIDFLEAKGYKEVKKDLIIKLPKYSLFELENGRKRMLASAGELQKGNELALPSKYVNFLYLASHYEKLKGSPEDNEQKQLFVEQHKHYLDEIIEQISEFSKRVILADANLDKVLSAYNKHRDKPIREQAENIIHLFTLTNLGAPAAFKYFDTTIDRKRYTSTKEVLDATLIHQSITGLYETRIDLSQLGGDGGPAPAPGGTLNIEDEYRLHETSKGPDVPLGSTWLSDFPQAWAETGGMGLAVRQAPLIIPLKATSTPVSIKQYPMSQEARLGIKPHIQRLLDQGILVPCQSPWNTPLLPVKKPGTNDYRPVQDLREVNKRVEDIHPTVPNPYNLLSGLPPSHQWYTVLDLKDAFFCLRLHPTSQSLFAFEWRDPEMGISGQLTWTRLPQGFKNSPTLFNEALHRDLADFRIQHPDLILLQYVDDLLLAATSELDCQQGTRALLQTLGDLGYRASAKKAQICQKQVKYLGYLLKEGQRWLTEARKETVMGQPTPKTPRQLREFLGTAGFCRLWIPGFAEMAAPLYPLTKPGTLFEWGPDQQKAYQEIKQALLTAPALGLPDLTKPFELFVDEKQGYAKGVLTQKLGPWRRPVAYLSKKLDPVAAGWPPCLRMVAAIAVLTKDAGKLTMGQPLVILAPHAVEALVKQPPDRWLSNARMTHYQALLLDTDRVQFGPIVALNPATLLPLPEEGLQHDCLDILAEAHGTRPDLTDQPLPDADHTWYTDGSSFLQEGQRKAGAAVTTETEVVWAKALPAGTSAQRAELIALTQALKMAEGKKLNVYTDSRYAFATAHIHGEIYRRRGWLTSEGKEIKNKDEILALLKALFLPKRLSIIHCPGHQKGNRAEARGNRMADQAAREVATRETPETSTLLAGKRTADGSEFEKRTADGSEFESPKKKAKVE

SEQ ID NO: 2449 - protein, 2098 aa, synthetic construct
MPAAKRVKLDGGDKKYSIGLDIGTNSVGWAVITDEYKVPSKKFKVLGNTDRHSIKKNLIGALLFDSGETAEATRLKRTARRRYTRRKNRICYLQEIFSNEMAKVDDSFFHRLEESFLVEEDKKHERHPIFGNIVDEVAYHEKYPTIYHLRKKLVDSTDKADLRLIYLALAHMIKFRGHFLIEGDLNPDNSDVDKLFIQLVQTYNQLFEENPINASGVDAKAILSARLSKSRRLENLIAQLPGEKKNGLFGNLIALSLGLTPNFKSNFDLAEDAKLQLSKDTYDDDLDNLLAQIGDQYADLFLAAKNLSDAILLSDILRVNTEITKAPLSASMIKRYDEHHQDLTLLKALVRQQLPEKYKEIFFDQSKNGYAGYIDGGASQEEFYKFIKPILEKMDGTEELLVKLNREDLLRKQRTFDNGSIPHQIHLGELHAILRRQEDFYPFLKDNREKIEKILTFRIPYYVGPLARGNSRFAWMTRKSEETITPWNFEEVVDKGASAQSFIERMTNFDKNLPNEKVLPKHSLLYEYFTVYNELTKVKYVTEGMRKPAFLSGEQKKAIVDLLFKTNRKVTVKQLKEDYFKKIECFDSVEISGVEDRFNASLGTYHDLLKIIKDKDFLDNEENEDILEDIVLTLTLFEDREMIEERLKTYAHLFDDKVMKQLKRRRYTGWGRLSRKLINGIRDKQSGKTILDFLKSDGFANRNFMQLIHDDSLTFKEDIQKAQVSGQGDSLHEHIANLAGSPAIKKGILQTVKVVDELVKVMGRHKPENIVIEMARENQTTQKGQKNSRERMKRIEEGIKELGSQILKEHPVENTQLQNEKLYLYYLQNGRDMYVDQELDINRLSDYDVDHIVPQSFLKDDSIDNKVLTRSDKARGKSDNVPSEEVVKKMKNYWRQLLNAKLITQRKFDNLTKAERGGLSELDKAGFIKRQLVETRQITKHVAQILDSRMNTKYDENDKLIREVKVITLKSKLVSDFRKDFQFYKVREINNYHHAHDAYLNAVVGTALIKKYPKLESEFVYGDYKVYDVRKMIAKSEQEIGKATAKYFFYSNIMNFFKTEITLANGEIRKRPLIETNGETGEIVWDKGRDFATVRKVLSMPQVNIVKKTEVQTGGFSKESILPKRNSDKLIARKKDWDPKKYGGFDSPTVAYSVLVVAKVEKGKSKKLKSVKELLGITIMERSSFEKNPIDFLEAKGYKEVKKDLIIKLPKYSLFELENGRKRMLASAGELQKGNELALPSKYVNFLYLASHYEKLKGSPEDNEQKQLFVEQHKHYLDEIIEQISEFSKRVILADANLDKVLSAYNKHRDKPIREQAENIIHLFTLTNLGAPAAFKYFDTTIDRKRYTSTKEVLDATLIHQSITGLYETRIDLSQLGGDGGPAPAPAPAPAPAPGGTLNIEDEYRLHETSKGPDVPLGSTWLSDFPQAWAETGGMGLAVRQAPLIIPLKATSTPVSIKQYPMSQEARLGIKPHIQRLLDQGILVPCQSPWNTPLLPVKKPGTNDYRPVQDLREVNKRVEDIHPTVPNPYNLLSGLPPSHQWYTVLDLKDAFFCLRLHPTSQSLFAFEWRDPEMGISGQLTWTRLPQGFKNSPTLFNEALHRDLADFRIQHPDLILLQYVDDLLLAATSELDCQQGTRALLQTLGDLGYRASAKKAQICQKQVKYLGYLLKEGQRWLTEARKETVMGQPTPKTPRQLREFLGTAGFCRLWIPGFAEMAAPLYPLTKPGTLFEWGPDQQKAYQEIKQALLTAPALGLPDLTKPFELFVDEKQGYAKGVLTQKLGPWRRPVAYLSKKLDPVAAGWPPCLRMVAAIAVLTKDAGKLTMGQPLVILAPHAVEALVKQPPDRWLSNARMTHYQALLLDTDRVQFGPIVALNPATLLPLPEEGLQHDCLDILAEAHGTRPDLTDQPLPDADHTWYTDGSSFLQEGQRKAGAAVTTETEVVWAKALPAGTSAQRAELIALTQALKMAEGKKLNVYTDSRYAFATAHIHGEIYRRRGWLTSEGKEIKNKDEILALLKALFLPKRLSIIHCPGHQKGNRAEARGNRMADQAAREVATRETPETSTLLAGKRTADGSEFEKRTADGSEFESPKKKAKVE

SEQ ID NO: 2450 - protein, 2092 aa, synthetic construct
MPAAKRVKLDGGDKKYSIGLDIGTNSVGWAVITDEYKVPSKKFKVLGNTDRHSIKKNLIGALLFDSGETAEATRLKRTARRRYTRRKNRICYLQEIFSNEMAKVDDSFFHRLEESFLVEEDKKHERHPIFGNIVDEVAYHEKYPTIYHLRKKLVDSTDKADLRLIYLALAHMIKFRGHFLIEGDLNPDNSDVDKLFIQLVQTYNQLFEENPINASGVDAKAILSARLSKSRRLENLIAQLPGEKKNGLFGNLIALSLGLTPNFKSNFDLAEDAKLQLSKDTYDDDLDNLLAQIGDQYADLFLAAKNLSDAILLSDILRVNTEITKAPLSASMIKRYDEHHQDLTLLKALVRQQLPEKYKEIFFDQSKNGYAGYIDGGASQEEFYKFIKPILEKMDGTEELLVKLNREDLLRKQRTFDNGSIPHQIHLGELHAILRRQEDFYPFLKDNREKIEKILTFRIPYYVGPLARGNSRFAWMTRKSEETITPWNFEEVVDKGASAQSFIERMTNFDKNLPNEKVLPKHSLLYEYFTVYNELTKVKYVTEGMRKPAFLSGEQKKAIVDLLFKTNRKVTVKQLKEDYFKKIECFDSVEISGVEDRFNASLGTYHDLLKIIKDKDFLDNEENEDILEDIVLTLTLFEDREMIEERLKTYAHLFDDKVMKQLKRRRYTGWGRLSRKLINGIRDKQSGKTILDFLKSDGFANRNFMQLIHDDSLTFKEDIQKAQVSGQGDSLHEHIANLAGSPAIKKGILQTVKVVDELVKVMGRHKPENIVIEMARENQTTQKGQKNSRERMKRIEEGIKELGSQILKEHPVENTQLQNEKLYLYYLQNGRDMYVDQELDINRLSDYDVDHIVPQSFLKDDSIDNKVLTRSDKARGKSDNVPSEEVVKKMKNYWRQLLNAKLITQRKFDNLTKAERGGLSELDKAGFIKRQLVETRQITKHVAQILDSRMNTKYDENDKLIREVKVITLKSKLVSDFRKDFQFYKVREINNYHHAHDAYLNAVVGTALIKKYPKLESEFVYGDYKVYDVRKMIAKSEQEIGKATAKYFFYSNIMNFFKTEITLANGEIRKRPLIETNGETGEIVWDKGRDFATVRKVLSMPQVNIVKKTEVQTGGFSKESILPKRNSDKLIARKKDWDPKKYGGFDSPTVAYSVLVVAKVEKGKSKKLKSVKELLGITIMERSSFEKNPIDFLEAKGYKEVKKDLIIKLPKYSLFELENGRKRMLASAGELQKGNELALPSKYVNFLYLASHYEKLKGSPEDNEQKQLFVEQHKHYLDEIIEQISEFSKRVILADANLDKVLSAYNKHRDKPIREQAENIIHLFTLTNLGAPAAFKYFDTTIDRKRYTSTKEVLDATLIHQSITGLYETRIDLSQLGGDGGGGGGGGGGGTLNIEDEYRLHETSKGPDVPLGSTWLSDFPQAWAETGGMGLAVRQAPLIIPLKATSTPVSIKQYPMSQEARLGIKPHIQRLLDQGILVPCQSPWNTPLLPVKKPGTNDYRPVQDLREVNKRVEDIHPTVPNPYNLLSGLPPSHQWYTVLDLKDAFFCLRLHPTSQSLFAFEWRDPEMGISGQLTWTRLPQGFKNSPTLFNEALHRDLADFRIQHPDLILLQYVDDLLLAATSELDCQQGTRALLQTLGDLGYRASAKKAQICQKQVKYLGYLLKEGQRWLTEARKETVMGQPTPKTPRQLREFLGTAGFCRLWIPGFAEMAAPLYPLTKPGTLFEWGPDQQKAYQEIKQALLTAPALGLPDLTKPFELFVDEKQGYAKGVLTQKLGPWRRPVAYLSKKLDPVAAGWPPCLRMVAAIAVLTKDAGKLTMGQPLVILAPHAVEALVKQPPDRWLSNARMTHYQALLLDTDRVQFGPIVALNPATLLPLPEEGLQHDCLDILAEAHGTRPDLTDQPLPDADHTWYTDGSSFLQEGQRKAGAAVTTETEVVWAKALPAGTSAQRAELIALTQALKMAEGKKLNVYTDSRYAFATAHIHGEIYRRRGWLTSEGKEIKNKDEILALLKALFLPKRLSIIHCPGHQKGNRAEARGNRMADQAAREVATRETPETSTLLAGKRTADGSEFEKRTADGSEFESPKKKAKVE

SEQ ID NO: 2451 - protein, 2093 aa, synthetic construct
MPAAKRVKLDGGDKKYSIGLDIGTNSVGWAVITDEYKVPSKKFKVLGNTDRHSIKKNLIGALLFDSGETAEATRLKRTARRRYTRRKNRICYLQEIFSNEMAKVDDSFFHRLEESFLVEEDKKHERHPIFGNIVDEVAYHEKYPTIYHLRKKLVDSTDKADLRLIYLALAHMIKFRGHFLIEGDLNPDNSDVDKLFIQLVQTYNQLFEENPINASGVDAKAILSARLSKSRRLENLIAQLPGEKKNGLFGNLIALSLGLTPNFKSNFDLAEDAKLQLSKDTYDDDLDNLLAQIGDQYADLFLAAKNLSDAILLSDILRVNTEITKAPLSASMIKRYDEHHQDLTLLKALVRQQLPEKYKEIFFDQSKNGYAGYIDGGASQEEFYKFIKPILEKMDGTEELLVKLNREDLLRKQRTFDNGSIPHQIHLGELHAILRRQEDFYPFLKDNREKIEKILTFRIPYYVGPLARGNSRFAWMTRKSEETITPWNFEEVVDKGASAQSFIERMTNFDKNLPNEKVLPKHSLLYEYFTVYNELTKVKYVTEGMRKPAFLSGEQKKAIVDLLFKTNRKVTVKQLKEDYFKKIECFDSVEISGVEDRFNASLGTYHDLLKIIKDKDFLDNEENEDILEDIVLTLTLFEDREMIEERLKTYAHLFDDKVMKQLKRRRYTGWGRLSRKLINGIRDKQSGKTILDFLKSDGFANRNFMQLIHDDSLTFKEDIQKAQVSGQGDSLHEHIANLAGSPAIKKGILQTVKVVDELVKVMGRHKPENIVIEMARENQTTQKGQKNSRERMKRIEEGIKELGSQILKEHPVENTQLQNEKLYLYYLQNGRDMYVDQELDINRLSDYDVDHIVPQSFLKDDSIDNKVLTRSDKARGKSDNVPSEEVVKKMKNYWRQLLNAKLITQRKFDNLTKAERGGLSELDKAGFIKRQLVETRQITKHVAQILDSRMNTKYDENDKLIREVKVITLKSKLVSDFRKDFQFYKVREINNYHHAHDAYLNAVVGTALIKKYPKLESEFVYGDYKVYDVRKMIAKSEQEIGKATAKYFFYSNIMNFFKTEITLANGEIRKRPLIETNGETGEIVWDKGRDFATVRKVLSMPQVNIVKKTEVQTGGFSKESILPKRNSDKLIARKKDWDPKKYGGFDSPTVAYSVLVVAKVEKGKSKKLKSVKELLGITIMERSSFEKNPIDFLEAKGYKEVKKDLIIKLPKYSLFELENGRKRMLASAGELQKGNELALPSKYVNFLYLASHYEKLKGSPEDNEQKQLFVEQHKHYLDEIIEQISEFSKRVILADANLDKVLSAYNKHRDKPIREQAENIIHLFTLTNLGAPAAFKYFDTTIDRKRYTSTKEVLDATLIHQSITGLYETRIDLSQLGGDGGEAAAKGSSGGTLNIEDEYRLHETSKGPDVPLGSTWLSDFPQAWAETGGMGLAVRQAPLIIPLKATSTPVSIKQYPMSQEARLGIKPHIQRLLDQGILVPCQSPWNTPLLPVKKPGTNDYRPVQDLREVNKRVEDIHPTVPNPYNLLSGLPPSHQWYTVLDLKDAFFCLRLHPTSQSLFAFEWRDPEMGISGQLTWTRLPQGFKNSPTLFNEALHRDLADFRIQHPDLILLQYVDDLLLAATSELDCQQGTRALLQTLGDLGYRASAKKAQICQKQVKYLGYLLKEGQRWLTEARKETVMGQPTPKTPRQLREFLGTAGFCRLWIPGFAEMAAPLYPLTKPGTLFEWGPDQQKAYQEIKQALLTAPALGLPDLTKPFELFVDEKQGYAKGVLTQKLGPWRRPVAYLSKKLDPVAAGWPPCLRMVAAIAVLTKDAGKLTMGQPLVILAPHAVEALVKQPPDRWLSNARMTHYQALLLDTDRVQFGPIVALNPATLLPLPEEGLQHDCLDILAEAHGTRPDLTDQPLPDADHTWYTDGSSFLQEGQRKAGAAVTTETEVVWAKALPAGTSAQRAELIALTQALKMAEGKKLNVYTDSRYAFATAHIHGEIYRRRGWLTSEGKEIKNKDEILALLKALFLPKRLSIIHCPGHQKGNRAEARGNRMADQAAREVATRETPETSTLLAGKRTADGSEFEKRTADGSEFESPKKKAKVE

SEQ ID NO: 2452 - protein, 2096 aa, synthetic construct
MPAAKRVKLDGGDKKYSIGLDIGTNSVGWAVITDEYKVPSKKFKVLGNTDRHSIKKNLIGALLFDSGETAEATRLKRTARRRYTRRKNRICYLQEIFSNEMAKVDDSFFHRLEESFLVEEDKKHERHPIFGNIVDEVAYHEKYPTIYHLRKKLVDSTDKADLRLIYLALAHMIKFRGHFLIEGDLNPDNSDVDKLFIQLVQTYNQLFEENPINASGVDAKAILSARLSKSRRLENLIAQLPGEKKNGLFGNLIALSLGLTPNFKSNFDLAEDAKLQLSKDTYDDDLDNLLAQIGDQYADLFLAAKNLSDAILLSDILRVNTEITKAPLSASMIKRYDEHHQDLTLLKALVRQQLPEKYKEIFFDQSKNGYAGYIDGGASQEEFYKFIKPILEKMDGTEELLVKLNREDLLRKQRTFDNGSIPHQIHLGELHAILRRQEDFYPFLKDNREKIEKILTFRIPYYVGPLARGNSRFAWMTRKSEETITPWNFEEVVDKGASAQSFIERMTNFDKNLPNEKVLPKHSLLYEYFTVYNELTKVKYVTEGMRKPAFLSGEQKKAIVDLLFKTNRKVTVKQLKEDYFKKIECFDSVEISGVEDRFNASLGTYHDLLKIIKDKDFLDNEENEDILEDIVLTLTLFEDREMIEERLKTYAHLFDDKVMKQLKRRRYTGWGRLSRKLINGIRDKQSGKTILDFLKSDGFANRNFMQLIHDDSLTFKEDIQKAQVSGQGDSLHEHIANLAGSPAIKKGILQTVKVVDELVKVMGRHKPENIVIEMARENQTTQKGQKNSRERMKRIEEGIKELGSQILKEHPVENTQLQNEKLYLYYLQNGRDMYVDQELDINRLSDYDVDHIVPQSFLKDDSIDNKVLTRSDKARGKSDNVPSEEVVKKMKNYWRQLLNAKLITQRKFDNLTKAERGGLSELDKAGFIKRQLVETRQITKHVAQILDSRMNTKYDENDKLIREVKVITLKSKLVSDFRKDFQFYKVREINNYHHAHDAYLNAVVGTALIKKYPKLESEFVYGDYKVYDVRKMIAKSEQEIGKATAKYFFYSNIMNFFKTEITLANGEIRKRPLIETNGETGEIVWDKGRDFATVRKVLSMPQVNIVKKTEVQTGGFSKESILPKRNSDKLIARKKDWDPKKYGGFDSPTVAYSVLVVAKVEKGKSKKLKSVKELLGITIMERSSFEKNPIDFLEAKGYKEVKKDLIIKLPKYSLFELENGRKRMLASAGELQKGNELALPSKYVNFLYLASHYEKLKGSPEDNEQKQLFVEQHKHYLDEIIEQISEFSKRVILADANLDKVLSAYNKHRDKPIREQAENIIHLFTLTNLGAPAAFKYFDTTIDRKRYTSTKEVLDATLIHQSITGLYETRIDLSQLGGDGGEAAAKGSSGGGGGTLNIEDEYRLHETSKGPDVPLGSTWLSDFPQAWAETGGMGLAVRQAPLIIPLKATSTPVSIKQYPMSQEARLGIKPHIQRLLDQGILVPCQSPWNTPLLPVKKPGTNDYRPVQDLREVNKRVEDIHPTVPNPYNLLSGLPPSHQWYTVLDLKDAFFCLRLHPTSQSLFAFEWRDPEMGISGQLTWTRLPQGFKNSPTLFNEALHRDLADFRIQHPDLILLQYVDDLLLAATSELDCQQGTRALLQTLGDLGYRASAKKAQICQKQVKYLGYLLKEGQRWLTEARKETVMGQPTPKTPRQLREFLGTAGFCRLWIPGFAEMAAPLYPLTKPGTLFEWGPDQQKAYQEIKQALLTAPALGLPDLTKPFELFVDEKQGYAKGVLTQKLGPWRRPVAYLSKKLDPVAAGWPPCLRMVAAIAVLTKDAGKLTMGQPLVILAPHAVEALVKQPPDRWLSNARMTHYQALLLDTDRVQFGPIVALNPATLLPLPEEGLQHDCLDILAEAHGTRPDLTDQPLPDADHTWYTDGSSFLQEGQRKAGAAVTTETEVVWAKALPAGTSAQRAELIALTQALKMAEGKKLNVYTDSRYAFATAHIHGEIYRRRGWLTSEGKEIKNKDEILALLKALFLPKRLSIIHCPGHQKGNRAEARGNRMADQAAREVATRETPETSTLLAGKRTADGSEFEKRTADGSEFESPKKKAKVE

SEQ ID NO: 2453 - protein, 2096 aa, synthetic construct
MPAAKRVKLDGGDKKYSIGLDIGTNSVGWAVITDEYKVPSKKFKVLGNTDRHSIKKNLIGALLFDSGETAEATRLKRTARRRYTRRKNRICYLQEIFSNEMAKVDDSFFHRLEESFLVEEDKKHERHPIFGNIVDEVAYHEKYPTIYHLRKKLVDSTDKADLRLIYLALAHMIKFRGHFLIEGDLNPDNSDVDKLFIQLVQTYNQLFEENPINASGVDAKAILSARLSKSRRLENLIAQLPGEKKNGLFGNLIALSLGLTPNFKSNFDLAEDAKLQLSKDTYDDDLDNLLAQIGDQYADLFLAAKNLSDAILLSDILRVNTEITKAPLSASMIKRYDEHHQDLTLLKALVRQQLPEKYKEIFFDQSKNGYAGYIDGGASQEEFYKFIKPILEKMDGTEELLVKLNREDLLRKQRTFDNGSIPHQIHLGELHAILRRQEDFYPFLKDNREKIEKILTFRIPYYVGPLARGNSRFAWMTRKSEETITPWNFEEVVDKGASAQSFIERMTNFDKNLPNEKVLPKHSLLYEYFTVYNELTKVKYVTEGMRKPAFLSGEQKKAIVDLLFKTNRKVTVKQLKEDYFKKIECFDSVEISGVEDRFNASLGTYHDLLKIIKDKDFLDNEENEDILEDIVLTLTLFEDREMIEERLKTYAHLFDDKVMKQLKRRRYTGWGRLSRKLINGIRDKQSGKTILDFLKSDGFANRNFMQLIHDDSLTFKEDIQKAQVSGQGDSLHEHIANLAGSPAIKKGILQTVKVVDELVKVMGRHKPENIVIEMARENQTTQKGQKNSRERMKRIEEGIKELGSQILKEHPVENTQLQNEKLYLYYLQNGRDMYVDQELDINRLSDYDVDHIVPQSFLKDDSIDNKVLTRSDKARGKSDNVPSEEVVKKMKNYWRQLLNAKLITQRKFDNLTKAERGGLSELDKAGFIKRQLVETRQITKHVAQILDSRMNTKYDENDKLIREVKVITLKSKLVSDFRKDFQFYKVREINNYHHAHDAYLNAVVGTALIKKYPKLESEFVYGDYKVYDVRKMIAKSEQEIGKATAKYFFYSNIMNFFKTEITLANGEIRKRPLIETNGETGEIVWDKGRDFATVRKVLSMPQVNIVKKTEVQTGGFSKESILPKRNSDKLIARKKDWDPKKYGGFDSPTVAYSVLVVAKVEKGKSKKLKSVKELLGITIMERSSFEKNPIDFLEAKGYKEVKKDLIIKLPKYSLFELENGRKRMLASAGELQKGNELALPSKYVNFLYLASHYEKLKGSPEDNEQKQLFVEQHKHYLDEIIEQISEFSKRVILADANLDKVLSAYNKHRDKPIREQAENIIHLFTLTNLGAPAAFKYFDTTIDRKRYTSTKEVLDATLIHQSITGLYETRIDLSQLGGDGGPAPGSSEAAAKGGTLNIEDEYRLHETSKGPDVPLGSTWLSDFPQAWAETGGMGLAVRQAPLIIPLKATSTPVSIKQYPMSQEARLGIKPHIQRLLDQGILVPCQSPWNTPLLPVKKPGTNDYRPVQDLREVNKRVEDIHPTVPNPYNLLSGLPPSHQWYTVLDLKDAFFCLRLHPTSQSLFAFEWRDPEMGISGQLTWTRLPQGFKNSPTLFNEALHRDLADFRIQHPDLILLQYVDDLLLAATSELDCQQGTRALLQTLGDLGYRASAKKAQICQKQVKYLGYLLKEGQRWLTEARKETVMGQPTPKTPRQLREFLGTAGFCRLWIPGFAEMAAPLYPLTKPGTLFEWGPDQQKAYQEIKQALLTAPALGLPDLTKPFELFVDEKQGYAKGVLTQKLGPWRRPVAYLSKKLDPVAAGWPPCLRMVAAIAVLTKDAGKLTMGQPLVILAPHAVEALVKQPPDRWLSNARMTHYQALLLDTDRVQFGPIVALNPATLLPLPEEGLQHDCLDILAEAHGTRPDLTDQPLPDADHTWYTDGSSFLQEGQRKAGAAVTTETEVVWAKALPAGTSAQRAELIALTQALKMAEGKKLNVYTDSRYAFATAHIHGEIYRRRGWLTSEGKEIKNKDEILALLKALFLPKRLSIIHCPGHQKGNRAEARGNRMADQAAREVATRETPETSTLLAGKRTADGSEFEKRTADGSEFESPKKKAKVE

SEQ ID NO: 2454 - protein, 2110 aa, synthetic construct
MPAAKRVKLDGGDKKYSIGLDIGTNSVGWAVITDEYKVPSKKFKVLGNTDRHSIKKNLIGALLFDSGETAEATRLKRTARRRYTRRKNRICYLQEIFSNEMAKVDDSFFHRLEESFLVEEDKKHERHPIFGNIVDEVAYHEKYPTIYHLRKKLVDSTDKADLRLIYLALAHMIKFRGHFLIEGDLNPDNSDVDKLFIQLVQTYNQLFEENPINASGVDAKAILSARLSKSRRLENLIAQLPGEKKNGLFGNLIALSLGLTPNFKSNFDLAEDAKLQLSKDTYDDDLDNLLAQIGDQYADLFLAAKNLSDAILLSDILRVNTEITKAPLSASMIKRYDEHHQDLTLLKALVRQQLPEKYKEIFFDQSKNGYAGYIDGGASQEEFYKFIKPILEKMDGTEELLVKLNREDLLRKQRTFDNGSIPHQIHLGELHAILRRQEDFYPFLKDNREKIEKILTFRIPYYVGPLARGNSRFAWMTRKSEETITPWNFEEVVDKGASAQSFIERMTNFDKNLPNEKVLPKHSLLYEYFTVYNELTKVKYVTEGMRKPAFLSGEQKKAIVDLLFKTNRKVTVKQLKEDYFKKIECFDSVEISGVEDRFNASLGTYHDLLKIIKDKDFLDNEENEDILEDIVLTLTLFEDREMIEERLKTYAHLFDDKVMKQLKRRRYTGWGRLSRKLINGIRDKQSGKTILDFLKSDGFANRNFMQLIHDDSLTFKEDIQKAQVSGQGDSLHEHIANLAGSPAIKKGILQTVKVVDELVKVMGRHKPENIVIEMARENQTTQKGQKNSRERMKRIEEGIKELGSQILKEHPVENTQLQNEKLYLYYLQNGRDMYVDQELDINRLSDYDVDHIVPQSFLKDDSIDNKVLTRSDKARGKSDNVPSEEVVKKMKNYWRQLLNAKLITQRKFDNLTKAERGGLSELDKAGFIKRQLVETRQITKHVAQILDSRMNTKYDENDKLIREVKVITLKSKLVSDFRKDFQFYKVREINNYHHAHDAYLNAVVGTALIKKYPKLESEFVYGDYKVYDVRKMIAKSEQEIGKATAKYFFYSNIMNFFKTEITLANGEIRKRPLIETNGETGEIVWDKGRDFATVRKVLSMPQVNIVKKTEVQTGGFSKESILPKRNSDKLIARKKDWDPKKYGGFDSPTVAYSVLVVAKVEKGKSKKLKSVKELLGITIMERSSFEKNPIDFLEAKGYKEVKKDLIIKLPKYSLFELENGRKRMLASAGELQKGNELALPSKYVNFLYLASHYEKLKGSPEDNEQKQLFVEQHKHYLDEIIEQISEFSKRVILADANLDKVLSAYNKHRDKPIREQAENIIHLFTLTNLGAPAAFKYFDTTIDRKRYTSTKEVLDATLIHQSITGLYETRIDLSQLGGDGGEAAAKEAAAKEAAAKEAAAKEAAAKGGTLNIEDEYRLHETSKGPDVPLGSTWLSDFPQAWAETGGMGLAVRQAPLIIPLKATSTPVSIKQYPMSQEARLGIKPHIQRLLDQGILVPCQSPWNTPLLPVKKPGTNDYRPVQDLREVNKRVEDIHPTVPNPYNLLSGLPPSHQWYTVLDLKDAFFCLRLHPTSQSLFAFEWRDPEMGISGQLTWTRLPQGFKNSPTLFNEALHRDLADFRIQHPDLILLQYVDDLLLAATSELDCQQGTRALLQTLGDLGYRASAKKAQICQKQVKYLGYLLKEGQRWLTEARKETVMGQPTPKTPRQLREFLGTAGFCRLWIPGFAEMAAPLYPLTKPGTLFEWGPDQQKAYQEIKQALLTAPALGLPDLTKPFELFVDEKQGYAKGVLTQKLGPWRRPVAYLSKKLDPVAAGWPPCLRMVAAIAVLTKDAGKLTMGQPLVILAPHAVEALVKQPPDRWLSNARMTHYQALLLDTDRVQFGPIVALNPATLLPLPEEGLQHDCLDILAEAHGTRPDLTDQPLPDADHTWYTDGSSFLQEGQRKAGAAVTTETEVVWAKALPAGTSAQRAELIALTQALKMAEGKKLNVYTDSRYAFATAHIHGEIYRRRGWLTSEGKEIKNKDEILALLKALFLPKRLSIIHCPGHQKGNRAEARGNRMADQAAREVATRETPETSTLLAGKRTADGSEFEKRTADGSEFESPKKKAKVE

SEQ ID NO: 2455 - protein, 2115 aa, synthetic construct
MPAAKRVKLDGGDKKYSIGLDIGTNSVGWAVITDEYKVPSKKFKVLGNTDRHSIKKNLIGALLFDSGETAEATRLKRTARRRYTRRKNRICYLQEIFSNEMAKVDDSFFHRLEESFLVEEDKKHERHPIFGNIVDEVAYHEKYPTIYHLRKKLVDSTDKADLRLIYLALAHMIKFRGHFLIEGDLNPDNSDVDKLFIQLVQTYNQLFEENPINASGVDAKAILSARLSKSRRLENLIAQLPGEKKNGLFGNLIALSLGLTPNFKSNFDLAEDAKLQLSKDTYDDDLDNLLAQIGDQYADLFLAAKNLSDAILLSDILRVNTEITKAPLSASMIKRYDEHHQDLTLLKALVRQQLPEKYKEIFFDQSKNGYAGYIDGGASQEEFYKFIKPILEKMDGTEELLVKLNREDLLRKQRTFDNGSIPHQIHLGELHAILRRQEDFYPFLKDNREKIEKILTFRIPYYVGPLARGNSRFAWMTRKSEETITPWNFEEVVDKGASAQSFIERMTNFDKNLPNEKVLPKHSLLYEYFTVYNELTKVKYVTEGMRKPAFLSGEQKKAIVDLLFKTNRKVTVKQLKEDYFKKIECFDSVEISGVEDRFNASLGTYHDLLKIIKDKDFLDNEENEDILEDIVLTLTLFEDREMIEERLKTYAHLFDDKVMKQLKRRRYTGWGRLSRKLINGIRDKQSGKTILDFLKSDGFANRNFMQLIHDDSLTFKEDIQKAQVSGQGDSLHEHIANLAGSPAIKKGILQTVKVVDELVKVMGRHKPENIVIEMARENQTTQKGQKNSRERMKRIEEGIKELGSQILKEHPVENTQLQNEKLYLYYLQNGRDMYVDQELDINRLSDYDVDHIVPQSFLKDDSIDNKVLTRSDKARGKSDNVPSEEVVKKMKNYWRQLLNAKLITQRKFDNLTKAERGGLSELDKAGFIKRQLVETRQITKHVAQILDSRMNTKYDENDKLIREVKVITLKSKLVSDFRKDFQFYKVREINNYHHAHDAYLNAVVGTALIKKYPKLESEFVYGDYKVYDVRKMIAKSEQEIGKATAKYFFYSNIMNFFKTEITLANGEIRKRPLIETNGETGEIVWDKGRDFATVRKVLSMPQVNIVKKTEVQTGGFSKESILPKRNSDKLIARKKDWDPKKYGGFDSPTVAYSVLVVAKVEKGKSKKLKSVKELLGITIMERSSFEKNPIDFLEAKGYKEVKKDLIIKLPKYSLFELENGRKRMLASAGELQKGNELALPSKYVNFLYLASHYEKLKGSPEDNEQKQLFVEQHKHYLDEIIEQISEFSKRVILADANLDKVLSAYNKHRDKPIREQAENIIHLFTLTNLGAPAAFKYFDTTIDRKRYTSTKEVLDATLIHQSITGLYETRIDLSQLGGDGGEAAAKEAAAKEAAAKEAAAKEAAAKEAAAKGGTLNIEDEYRLHETSKGPDVPLGSTWLSDFPQAWAETGGMGLAVRQAPLIIPLKATSTPVSIKQYPMSQEARLGIKPHIQRLLDQGILVPCQSPWNTPLLPVKKPGTNDYRPVQDLREVNKRVEDIHPTVPNPYNLLSGLPPSHQWYTVLDLKDAFFCLRLHPTSQSLFAFEWRDPEMGISGQLTWTRLPQGFKNSPTLFNEALHRDLADFRIQHPDLILLQYVDDLLLAATSELDCQQGTRALLQTLGDLGYRASAKKAQICQKQVKYLGYLLKEGQRWLTEARKETVMGQPTPKTPRQLREFLGTAGFCRLWIPGFAEMAAPLYPLTKPGTLFEWGPDQQKAYQEIKQALLTAPALGLPDLTKPFELFVDEKQGYAKGVLTQKLGPWRRPVAYLSKKLDPVAAGWPPCLRMVAAIAVLTKDAGKLTMGQPLVILAPHAVEALVKQPPDRWLSNARMTHYQALLLDTDRVQFGPIVALNPATLLPLPEEGLQHDCLDILAEAHGTRPDLTDQPLPDADHTWYTDGSSFLQEGQRKAGAAVTTETEVVWAKALPAGTSAQRAELIALTQALKMAEGKKLNVYTDSRYAFATAHIHGEIYRRRGWLTSEGKEIKNKDEILALLKALFLPKRLSIIHCPGHQKGNRAEARGNRMADQAAREVATRETPETSTLLAGKRTADGSEFEKRTADGSEFESPKKKAKVE

SEQ ID NO: 2456 - protein, 2093 aa, synthetic construct
MPAAKRVKLDGGDKKYSIGLDIGTNSVGWAVITDEYKVPSKKFKVLGNTDRHSIKKNLIGALLFDSGETAEATRLKRTARRRYTRRKNRICYLQEIFSNEMAKVDDSFFHRLEESFLVEEDKKHERHPIFGNIVDEVAYHEKYPTIYHLRKKLVDSTDKADLRLIYLALAHMIKFRGHFLIEGDLNPDNSDVDKLFIQLVQTYNQLFEENPINASGVDAKAILSARLSKSRRLENLIAQLPGEKKNGLFGNLIALSLGLTPNFKSNFDLAEDAKLQLSKDTYDDDLDNLLAQIGDQYADLFLAAKNLSDAILLSDILRVNTEITKAPLSASMIKRYDEHHQDLTLLKALVRQQLPEKYKEIFFDQSKNGYAGYIDGGASQEEFYKFIKPILEKMDGTEELLVKLNREDLLRKQRTFDNGSIPHQIHLGELHAILRRQEDFYPFLKDNREKIEKILTFRIPYYVGPLARGNSRFAWMTRKSEETITPWNFEEVVDKGASAQSFIERMTNFDKNLPNEKVLPKHSLLYEYFTVYNELTKVKYVTEGMRKPAFLSGEQKKAIVDLLFKTNRKVTVKQLKEDYFKKIECFDSVEISGVEDRFNASLGTYHDLLKIIKDKDFLDNEENEDILEDIVLTLTLFEDREMIEERLKTYAHLFDDKVMKQLKRRRYTGWGRLSRKLINGIRDKQSGKTILDFLKSDGFANRNFMQLIHDDSLTFKEDIQKAQVSGQGDSLHEHIANLAGSPAIKKGILQTVKVVDELVKVMGRHKPENIVIEMARENQTTQKGQKNSRERMKRIEEGIKELGSQILKEHPVENTQLQNEKLYLYYLQNGRDMYVDQELDINRLSDYDVDHIVPQSFLKDDSIDNKVLTRSDKARGKSDNVPSEEVVKKMKNYWRQLLNAKLITQRKFDNLTKAERGGLSELDKAGFIKRQLVETRQITKHVAQILDSRMNTKYDENDKLIREVKVITLKSKLVSDFRKDFQFYKVREINNYHHAHDAYLNAVVGTALIKKYPKLESEFVYGDYKVYDVRKMIAKSEQEIGKATAKYFFYSNIMNFFKTEITLANGEIRKRPLIETNGETGEIVWDKGRDFATVRKVLSMPQVNIVKKTEVQTGGFSKESILPKRNSDKLIARKKDWDPKKYGGFDSPTVAYSVLVVAKVEKGKSKKLKSVKELLGITIMERSSFEKNPIDFLEAKGYKEVKKDLIIKLPKYSLFELENGRKRMLASAGELQKGNELALPSKYVNFLYLASHYEKLKGSPEDNEQKQLFVEQHKHYLDEIIEQISEFSKRVILADANLDKVLSAYNKHRDKPIREQAENIIHLFTLTNLGAPAAFKYFDTTIDRKRYTSTKEVLDATLIHQSITGLYETRIDLSQLGGDGGEAAAKGGSGGTLNIEDEYRLHETSKGPDVPLGSTWLSDFPQAWAETGGMGLAVRQAPLIIPLKATSTPVSIKQYPMSQEARLGIKPHIQRLLDQGILVPCQSPWNTPLLPVKKPGTNDYRPVQDLREVNKRVEDIHPTVPNPYNLLSGLPPSHQWYTVLDLKDAFFCLRLHPTSQSLFAFEWRDPEMGISGQLTWTRLPQGFKNSPTLFNEALHRDLADFRIQHPDLILLQYVDDLLLAATSELDCQQGTRALLQTLGDLGYRASAKKAQICQKQVKYLGYLLKEGQRWLTEARKETVMGQPTPKTPRQLREFLGTAGFCRLWIPGFAEMAAPLYPLTKPGTLFEWGPDQQKAYQEIKQALLTAPALGLPDLTKPFELFVDEKQGYAKGVLTQKLGPWRRPVAYLSKKLDPVAAGWPPCLRMVAAIAVLTKDAGKLTMGQPLVILAPHAVEALVKQPPDRWLSNARMTHYQALLLDTDRVQFGPIVALNPATLLPLPEEGLQHDCLDILAEAHGTRPDLTDQPLPDADHTWYTDGSSFLQEGQRKAGAAVTTETEVVWAKALPAGTSAQRAELIALTQALKMAEGKKLNVYTDSRYAFATAHIHGEIYRRRGWLTSEGKEIKNKDEILALLKALFLPKRLSIIHCPGHQKGNRAEARGNRMADQAAREVATRETPETSTLLAGKRTADGSEFEKRTADGSEFESPKKKAKVE

SEQ ID NO: 2457 - protein, 2096 aa, synthetic construct
MPAAKRVKLDGGDKKYSIGLDIGTNSVGWAVITDEYKVPSKKFKVLGNTDRHSIKKNLIGALLFDSGETAEATRLKRTARRRYTRRKNRICYLQEIFSNEMAKVDDSFFHRLEESFLVEEDKKHERHPIFGNIVDEVAYHEKYPTIYHLRKKLVDSTDKADLRLIYLALAHMIKFRGHFLIEGDLNPDNSDVDKLFIQLVQTYNQLFEENPINASGVDAKAILSARLSKSRRLENLIAQLPGEKKNGLFGNLIALSLGLTPNFKSNFDLAEDAKLQLSKDTYDDDLDNLLAQIGDQYADLFLAAKNLSDAILLSDILRVNTEITKAPLSASMIKRYDEHHQDLTLLKALVRQQLPEKYKEIFFDQSKNGYAGYIDGGASQEEFYKFIKPILEKMDGTEELLVKLNREDLLRKQRTFDNGSIPHQIHLGELHAILRRQEDFYPFLKDNREKIEKILTFRIPYYVGPLARGNSRFAWMTRKSEETITPWNFEEVVDKGASAQSFIERMTNFDKNLPNEKVLPKHSLLYEYFTVYNELTKVKYVTEGMRKPAFLSGEQKKAIVDLLFKTNRKVTVKQLKEDYFKKIECFDSVEISGVEDRFNASLGTYHDLLKIIKDKDFLDNEENEDILEDIVLTLTLFEDREMIEERLKTYAHLFDDKVMKQLKRRRYTGWGRLSRKLINGIRDKQSGKTILDFLKSDGFANRNFMQLIHDDSLTFKEDIQKAQVSGQGDSLHEHIANLAGSPAIKKGILQTVKVVDELVKVMGRHKPENIVIEMARENQTTQKGQKNSRERMKRIEEGIKELGSQILKEHPVENTQLQNEKLYLYYLQNGRDMYVDQELDINRLSDYDVDHIVPQSFLKDDSIDNKVLTRSDKARGKSDNVPSEEVVKKMKNYWRQLLNAKLITQRKFDNLTKAERGGLSELDKAGFIKRQLVETRQITKHVAQILDSRMNTKYDENDKLIREVKVITLKSKLVSDFRKDFQFYKVREINNYHHAHDAYLNAVVGTALIKKYPKLESEFVYGDYKVYDVRKMIAKSEQEIGKATAKYFFYSNIMNFFKTEITLANGEIRKRPLIETNGETGEIVWDKGRDFATVRKVLSMPQVNIVKKTEVQTGGFSKESILPKRNSDKLIARKKDWDPKKYGGFDSPTVAYSVLVVAKVEKGKSKKLKSVKELLGITIMERSSFEKNPIDFLEAKGYKEVKKDLIIKLPKYSLFELENGRKRMLASAGELQKGNELALPSKYVNFLYLASHYEKLKGSPEDNEQKQLFVEQHKHYLDEIIEQISEFSKRVILADANLDKVLSAYNKHRDKPIREQAENIIHLFTLTNLGAPAAFKYFDTTIDRKRYTSTKEVLDATLIHQSITGLYETRIDLSQLGGDGGEAAAKGGGPAPGGTLNIEDEYRLHETSKGPDVPLGSTWLSDFPQAWAETGGMGLAVRQAPLIIPLKATSTPVSIKQYPMSQEARLGIKPHIQRLLDQGILVPCQSPWNTPLLPVKKPGTNDYRPVQDLREVNKRVEDIHPTVPNPYNLLSGLPPSHQWYTVLDLKDAFFCLRLHPTSQSLFAFEWRDPEMGISGQLTWTRLPQGFKNSPTLFNEALHRDLADFRIQHPDLILLQYVDDLLLAATSELDCQQGTRALLQTLGDLGYRASAKKAQICQKQVKYLGYLLKEGQRWLTEARKETVMGQPTPKTPRQLREFLGTAGFCRLWIPGFAEMAAPLYPLTKPGTLFEWGPDQQKAYQEIKQALLTAPALGLPDLTKPFELFVDEKQGYAKGVLTQKLGPWRRPVAYLSKKLDPVAAGWPPCLRMVAAIAVLTKDAGKLTMGQPLVILAPHAVEALVKQPPDRWLSNARMTHYQALLLDTDRVQFGPIVALNPATLLPLPEEGLQHDCLDILAEAHGTRPDLTDQPLPDADHTWYTDGSSFLQEGQRKAGAAVTTETEVVWAKALPAGTSAQRAELIALTQALKMAEGKKLNVYTDSRYAFATAHIHGEIYRRRGWLTSEGKEIKNKDEILALLKALFLPKRLSIIHCPGHQKGNRAEARGNRMADQAAREVATRETPETSTLLAGKRTADGSEFEKRTADGSEFESPKKKAKVE

SEQ ID NO: 2458 - protein, 2096 aa, synthetic construct
MPAAKRVKLDGGDKKYSIGLDIGTNSVGWAVITDEYKVPSKKFKVLGNTDRHSIKKNLIGALLFDSGETAEATRLKRTARRRYTRRKNRICYLQEIFSNEMAKVDDSFFHRLEESFLVEEDKKHERHPIFGNIVDEVAYHEKYPTIYHLRKKLVDSTDKADLRLIYLALAHMIKFRGHFLIEGDLNPDNSDVDKLFIQLVQTYNQLFEENPINASGVDAKAILSARLSKSRRLENLIAQLPGEKKNGLFGNLIALSLGLTPNFKSNFDLAEDAKLQLSKDTYDDDLDNLLAQIGDQYADLFLAAKNLSDAILLSDILRVNTEITKAPLSASMIKRYDEHHQDLTLLKALVRQQLPEKYKEIFFDQSKNGYAGYIDGGASQEEFYKFIKPILEKMDGTEELLVKLNREDLLRKQRTFDNGSIPHQIHLGELHAILRRQEDFYPFLKDNREKIEKILTFRIPYYVGPLARGNSRFAWMTRKSEETITPWNFEEVVDKGASAQSFIERMTNFDKNLPNEKVLPKHSLLYEYFTVYNELTKVKYVTEGMRKPAFLSGEQKKAIVDLLFKTNRKVTVKQLKEDYFKKIECFDSVEISGVEDRFNASLGTYHDLLKIIKDKDFLDNEENEDILEDIVLTLTLFEDREMIEERLKTYAHLFDDKVMKQLKRRRYTGWGRLSRKLINGIRDKQSGKTILDFLKSDGFANRNFMQLIHDDSLTFKEDIQKAQVSGQGDSLHEHIANLAGSPAIKKGILQTVKVVDELVKVMGRHKPENIVIEMARENQTTQKGQKNSRERMKRIEEGIKELGSQILKEHPVENTQLQNEKLYLYYLQNGRDMYVDQELDINRLSDYDVDHIVPQSFLKDDSIDNKVLTRSDKARGKSDNVPSEEVVKKMKNYWRQLLNAKLITQRKFDNLTKAERGGLSELDKAGFIKRQLVETRQITKHVAQILDSRMNTKYDENDKLIREVKVITLKSKLVSDFRKDFQFYKVREINNYHHAHDAYLNAVVGTALIKKYPKLESEFVYGDYKVYDVRKMIAKSEQEIGKATAKYFFYSNIMNFFKTEITLANGEIRKRPLIETNGETGEIVWDKGRDFATVRKVLSMPQVNIVKKTEVQTGGFSKESILPKRNSDKLIARKKDWDPKKYGGFDSPTVAYSVLVVAKVEKGKSKKLKSVKELLGITIMERSSFEKNPIDFLEAKGYKEVKKDLIIKLPKYSLFELENGRKRMLASAGELQKGNELALPSKYVNFLYLASHYEKLKGSPEDNEQKQLFVEQHKHYLDEIIEQISEFSKRVILADANLDKVLSAYNKHRDKPIREQAENIIHLFTLTNLGAPAAFKYFDTTIDRKRYTSTKEVLDATLIHQSITGLYETRIDLSQLGGDGGGSSEAAAKGGGGGTLNIEDEYRLHETSKGPDVPLGSTWLSDFPQAWAETGGMGLAVRQAPLIIPLKATSTPVSIKQYPMSQEARLGIKPHIQRLLDQGILVPCQSPWNTPLLPVKKPGTNDYRPVQDLREVNKRVEDIHPTVPNPYNLLSGLPPSHQWYTVLDLKDAFFCLRLHPTSQSLFAFEWRDPEMGISGQLTWTRLPQGFKNSPTLFNEALHRDLADFRIQHPDLILLQYVDDLLLAATSELDCQQGTRALLQTLGDLGYRASAKKAQICQKQVKYLGYLLKEGQRWLTEARKETVMGQPTPKTPRQLREFLGTAGFCRLWIPGFAEMAAPLYPLTKPGTLFEWGPDQQKAYQEIKQALLTAPALGLPDLTKPFELFVDEKQGYAKGVLTQKLGPWRRPVAYLSKKLDPVAAGWPPCLRMVAAIAVLTKDAGKLTMGQPLVILAPHAVEALVKQPPDRWLSNARMTHYQALLLDTDRVQFGPIVALNPATLLPLPEEGLQHDCLDILAEAHGTRPDLTDQPLPDADHTWYTDGSSFLQEGQRKAGAAVTTETEVVWAKALPAGTSAQRAELIALTQALKMAEGKKLNVYTDSRYAFATAHIHGEIYRRRGWLTSEGKEIKNKDEILALLKALFLPKRLSIIHCPGHQKGNRAEARGNRMADQAAREVATRETPETSTLLAGKRTADGSEFEKRTADGSEFESPKKKAKVE

SEQ ID NO: 2459 - protein, 2096 aa, synthetic construct
MPAAKRVKLDGGDKKYSIGLDIGTNSVGWAVITDEYKVPSKKFKVLGNTDRHSIKKNLIGALLFDSGETAEATRLKRTARRRYTRRKNRICYLQEIFSNEMAKVDDSFFHRLEESFLVEEDKKHERHPIFGNIVDEVAYHEKYPTIYHLRKKLVDSTDKADLRLIYLALAHMIKFRGHFLIEGDLNPDNSDVDKLFIQLVQTYNQLFEENPINASGVDAKAILSARLSKSRRLENLIAQLPGEKKNGLFGNLIALSLGLTPNFKSNFDLAEDAKLQLSKDTYDDDLDNLLAQIGDQYADLFLAAKNLSDAILLSDILRVNTEITKAPLSASMIKRYDEHHQDLTLLKALVRQQLPEKYKEIFFDQSKNGYAGYIDGGASQEEFYKFIKPILEKMDGTEELLVKLNREDLLRKQRTFDNGSIPHQIHLGELHAILRRQEDFYPFLKDNREKIEKILTFRIPYYVGPLARGNSRFAWMTRKSEETITPWNFEEVVDKGASAQSFIERMTNFDKNLPNEKVLPKHSLLYEYFTVYNELTKVKYVTEGMRKPAFLSGEQKKAIVDLLFKTNRKVTVKQLKEDYFKKIECFDSVEISGVEDRFNASLGTYHDLLKIIKDKDFLDNEENEDILEDIVLTLTLFEDREMIEERLKTYAHLFDDKVMKQLKRRRYTGWGRLSRKLINGIRDKQSGKTILDFLKSDGFANRNFMQLIHDDSLTFKEDIQKAQVSGQGDSLHEHIANLAGSPAIKKGILQTVKVVDELVKVMGRHKPENIVIEMARENQTTQKGQKNSRERMKRIEEGIKELGSQILKEHPVENTQLQNEKLYLYYLQNGRDMYVDQELDINRLSDYDVDHIVPQSFLKDDSIDNKVLTRSDKARGKSDNVPSEEVVKKMKNYWRQLLNAKLITQRKFDNLTKAERGGLSELDKAGFIKRQLVETRQITKHVAQILDSRMNTKYDENDKLIREVKVITLKSKLVSDFRKDFQFYKVREINNYHHAHDAYLNAVVGTALIKKYPKLESEFVYGDYKVYDVRKMIAKSEQEIGKATAKYFFYSNIMNFFKTEITLANGEIRKRPLIETNGETGEIVWDKGRDFATVRKVLSMPQVNIVKKTEVQTGGFSKESILPKRNSDKLIARKKDWDPKKYGGFDSPTVAYSVLVVAKVEKGKSKKLKSVKELLGITIMERSSFEKNPIDFLEAKGYKEVKKDLIIKLPKYSLFELENGRKRMLASAGELQKGNELALPSKYVNFLYLASHYEKLKGSPEDNEQKQLFVEQHKHYLDEIIEQISEFSKRVILADANLDKVLSAYNKHRDKPIREQAENIIHLFTLTNLGAPAAFKYFDTTIDRKRYTSTKEVLDATLIHQSITGLYETRIDLSQLGGDGGGGSGGGEAAAKGGTLNIEDEYRLHETSKGPDVPLGSTWLSDFPQAWAETGGMGLAVRQAPLIIPLKATSTPVSIKQYPMSQEARLGIKPHIQRLLDQGILVPCQSPWNTPLLPVKKPGTNDYRPVQDLREVNKRVEDIHPTVPNPYNLLSGLPPSHQWYTVLDLKDAFFCLRLHPTSQSLFAFEWRDPEMGISGQLTWTRLPQGFKNSPTLFNEALHRDLADFRIQHPDLILLQYVDDLLLAATSELDCQQGTRALLQTLGDLGYRASAKKAQICQKQVKYLGYLLKEGQRWLTEARKETVMGQPTPKTPRQLREFLGTAGFCRLWIPGFAEMAAPLYPLTKPGTLFEWGPDQQKAYQEIKQALLTAPALGLPDLTKPFELFVDEKQGYAKGVLTQKLGPWRRPVAYLSKKLDPVAAGWPPCLRMVAAIAVLTKDAGKLTMGQPLVILAPHAVEALVKQPPDRWLSNARMTHYQALLLDTDRVQFGPIVALNPATLLPLPEEGLQHDCLDILAEAHGTRPDLTDQPLPDADHTWYTDGSSFLQEGQRKAGAAVTTETEVVWAKALPAGTSAQRAELIALTQALKMAEGKKLNVYTDSRYAFATAHIHGEIYRRRGWLTSEGKEIKNKDEILALLKALFLPKRLSIIHCPGHQKGNRAEARGNRMADQAAREVATRETPETSTLLAGKRTADGSEFEKRTADGSEFESPKKKAKVE

SEQ ID NO: 2460 - protein, 2096 aa, synthetic construct
MPAAKRVKLDGGDKKYSIGLDIGTNSVGWAVITDEYKVPSKKFKVLGNTDRHSIKKNLIGALLFDSGETAEATRLKRTARRRYTRRKNRICYLQEIFSNEMAKVDDSFFHRLEESFLVEEDKKHERHPIFGNIVDEVAYHEKYPTIYHLRKKLVDSTDKADLRLIYLALAHMIKFRGHFLIEGDLNPDNSDVDKLFIQLVQTYNQLFEENPINASGVDAKAILSARLSKSRRLENLIAQLPGEKKNGLFGNLIALSLGLTPNFKSNFDLAEDAKLQLSKDTYDDDLDNLLAQIGDQYADLFLAAKNLSDAILLSDILRVNTEITKAPLSASMIKRYDEHHQDLTLLKALVRQQLPEKYKEIFFDQSKNGYAGYIDGGASQEEFYKFIKPILEKMDGTEELLVKLNREDLLRKQRTFDNGSIPHQIHLGELHAILRRQEDFYPFLKDNREKIEKILTFRIPYYVGPLARGNSRFAWMTRKSEETITPWNFEEVVDKGASAQSFIERMTNFDKNLPNEKVLPKHSLLYEYFTVYNELTKVKYVTEGMRKPAFLSGEQKKAIVDLLFKTNRKVTVKQLKEDYFKKIECFDSVEISGVEDRFNASLGTYHDLLKIIKDKDFLDNEENEDILEDIVLTLTLFEDREMIEERLKTYAHLFDDKVMKQLKRRRYTGWGRLSRKLINGIRDKQSGKTILDFLKSDGFANRNFMQLIHDDSLTFKEDIQKAQVSGQGDSLHEHIANLAGSPAIKKGILQTVKVVDELVKVMGRHKPENIVIEMARENQTTQKGQKNSRERMKRIEEGIKELGSQILKEHPVENTQLQNEKLYLYYLQNGRDMYVDQELDINRLSDYDVDHIVPQSFLKDDSIDNKVLTRSDKARGKSDNVPSEEVVKKMKNYWRQLLNAKLITQRKFDNLTKAERGGLSELDKAGFIKRQLVETRQITKHVAQILDSRMNTKYDENDKLIREVKVITLKSKLVSDFRKDFQFYKVREINNYHHAHDAYLNAVVGTALIKKYPKLESEFVYGDYKVYDVRKMIAKSEQEIGKATAKYFFYSNIMNFFKTEITLANGEIRKRPLIETNGETGEIVWDKGRDFATVRKVLSMPQVNIVKKTEVQTGGFSKESILPKRNSDKLIARKKDWDPKKYGGFDSPTVAYSVLVVAKVEKGKSKKLKSVKELLGITIMERSSFEKNPIDFLEAKGYKEVKKDLIIKLPKYSLFELENGRKRMLASAGELQKGNELALPSKYVNFLYLASHYEKLKGSPEDNEQKQLFVEQHKHYLDEIIEQISEFSKRVILADANLDKVLSAYNKHRDKPIREQAENIIHLFTLTNLGAPAAFKYFDTTIDRKRYTSTKEVLDATLIHQSITGLYETRIDLSQLGGDGGEAAAKGGSGSSGGTLNIEDEYRLHETSKGPDVPLGSTWLSDFPQAWAETGGMGLAVRQAPLIIPLKATSTPVSIKQYPMSQEARLGIKPHIQRLLDQGILVPCQSPWNTPLLPVKKPGTNDYRPVQDLREVNKRVEDIHPTVPNPYNLLSGLPPSHQWYTVLDLKDAFFCLRLHPTSQSLFAFEWRDPEMGISGQLTWTRLPQGFKNSPTLFNEALHRDLADFRIQHPDLILLQYVDDLLLAATSELDCQQGTRALLQTLGDLGYRASAKKAQICQKQVKYLGYLLKEGQRWLTEARKETVMGQPTPKTPRQLREFLGTAGFCRLWIPGFAEMAAPLYPLTKPGTLFEWGPDQQKAYQEIKQALLTAPALGLPDLTKPFELFVDEKQGYAKGVLTQKLGPWRRPVAYLSKKLDPVAAGWPPCLRMVAAIAVLTKDAGKLTMGQPLVILAPHAVEALVKQPPDRWLSNARMTHYQALLLDTDRVQFGPIVALNPATLLPLPEEGLQHDCLDILAEAHGTRPDLTDQPLPDADHTWYTDGSSFLQEGQRKAGAAVTTETEVVWAKALPAGTSAQRAELIALTQALKMAEGKKLNVYTDSRYAFATAHIHGEIYRRRGWLTSEGKEIKNKDEILALLKALFLPKRLSIIHCPGHQKGNRAEARGNRMADQAAREVATRETPETSTLLAGKRTADGSEFEKRTADGSEFESPKKKAKVE

SEQ ID NO: 2461 - protein, 2096 aa, synthetic construct
MPAAKRVKLDGGDKKYSIGLDIGTNSVGWAVITDEYKVPSKKFKVLGNTDRHSIKKNLIGALLFDSGETAEATRLKRTARRRYTRRKNRICYLQEIFSNEMAKVDDSFFHRLEESFLVEEDKKHERHPIFGNIVDEVAYHEKYPTIYHLRKKLVDSTDKADLRLIYLALAHMIKFRGHFLIEGDLNPDNSDVDKLFIQLVQTYNQLFEENPINASGVDAKAILSARLSKSRRLENLIAQLPGEKKNGLFGNLIALSLGLTPNFKSNFDLAEDAKLQLSKDTYDDDLDNLLAQIGDQYADLFLAAKNLSDAILLSDILRVNTEITKAPLSASMIKRYDEHHQDLTLLKALVRQQLPEKYKEIFFDQSKNGYAGYIDGGASQEEFYKFIKPILEKMDGTEELLVKLNREDLLRKQRTFDNGSIPHQIHLGELHAILRRQEDFYPFLKDNREKIEKILTFRIPYYVGPLARGNSRFAWMTRKSEETITPWNFEEVVDKGASAQSFIERMTNFDKNLPNEKVLPKHSLLYEYFTVYNELTKVKYVTEGMRKPAFLSGEQKKAIVDLLFKTNRKVTVKQLKEDYFKKIECFDSVEISGVEDRFNASLGTYHDLLKIIKDKDFLDNEENEDILEDIVLTLTLFEDREMIEERLKTYAHLFDDKVMKQLKRRRYTGWGRLSRKLINGIRDKQSGKTILDFLKSDGFANRNFMQLIHDDSLTFKEDIQKAQVSGQGDSLHEHIANLAGSPAIKKGILQTVKVVDELVKVMGRHKPENIVIEMARENQTTQKGQKNSRERMKRIEEGIKELGSQILKEHPVENTQLQNEKLYLYYLQNGRDMYVDQELDINRLSDYDVDHIVPQSFLKDDSIDNKVLTRSDKARGKSDNVPSEEVVKKMKNYWRQLLNAKLITQRKFDNLTKAERGGLSELDKAGFIKRQLVETRQITKHVAQILDSRMNTKYDENDKLIREVKVITLKSKLVSDFRKDFQFYKVREINNYHHAHDAYLNAVVGTALIKKYPKLESEFVYGDYKVYDVRKMIAKSEQEIGKATAKYFFYSNIMNFFKTEITLANGEIRKRPLIETNGETGEIVWDKGRDFATVRKVLSMPQVNIVKKTEVQTGGFSKESILPKRNSDKLIARKKDWDPKKYGGFDSPTVAYSVLVVAKVEKGKSKKLKSVKELLGITIMERSSFEKNPIDFLEAKGYKEVKKDLIIKLPKYSLFELENGRKRMLASAGELQKGNELALPSKYVNFLYLASHYEKLKGSPEDNEQKQLFVEQHKHYLDEIIEQISEFSKRVILADANLDKVLSAYNKHRDKPIREQAENIIHLFTLTNLGAPAAFKYFDTTIDRKRYTSTKEVLDATLIHQSITGLYETRIDLSQLGGDGGGGGGSSEAAAKGGTLNIEDEYRLHETSKGPDVPLGSTWLSDFPQAWAETGGMGLAVRQAPLIIPLKATSTPVSIKQYPMSQEARLGIKPHIQRLLDQGILVPCQSPWNTPLLPVKKPGTNDYRPVQDLREVNKRVEDIHPTVPNPYNLLSGLPPSHQWYTVLDLKDAFFCLRLHPTSQSLFAFEWRDPEMGISGQLTWTRLPQGFKNSPTLFNEALHRDLADFRIQHPDLILLQYVDDLLLAATSELDCQQGTRALLQTLGDLGYRASAKKAQICQKQVKYLGYLLKEGQRWLTEARKETVMGQPTPKTPRQLREFLGTAGFCRLWIPGFAEMAAPLYPLTKPGTLFEWGPDQQKAYQEIKQALLTAPALGLPDLTKPFELFVDEKQGYAKGVLTQKLGPWRRPVAYLSKKLDPVAAGWPPCLRMVAAIAVLTKDAGKLTMGQPLVILAPHAVEALVKQPPDRWLSNARMTHYQALLLDTDRVQFGPIVALNPATLLPLPEEGLQHDCLDILAEAHGTRPDLTDQPLPDADHTWYTDGSSFLQEGQRKAGAAVTTETEVVWAKALPAGTSAQRAELIALTQALKMAEGKKLNVYTDSRYAFATAHIHGEIYRRRGWLTSEGKEIKNKDEILALLKALFLPKRLSIIHCPGHQKGNRAEARGNRMADQAAREVATRETPETSTLLAGKRTADGSEFEKRTADGSEFESPKKKAKVE

SEQ ID NO: 2462 - protein, 2096 aa, synthetic construct
MPAAKRVKLDGGDKKYSIGLDIGTNSVGWAVITDEYKVPSKKFKVLGNTDRHSIKKNLIGALLFDSGETAEATRLKRTARRRYTRRKNRICYLQEIFSNEMAKVDDSFFHRLEESFLVEEDKKHERHPIFGNIVDEVAYHEKYPTIYHLRKKLVDSTDKADLRLIYLALAHMIKFRGHFLIEGDLNPDNSDVDKLFIQLVQTYNQLFEENPINASGVDAKAILSARLSKSRRLENLIAQLPGEKKNGLFGNLIALSLGLTPNFKSNFDLAEDAKLQLSKDTYDDDLDNLLAQIGDQYADLFLAAKNLSDAILLSDILRVNTEITKAPLSASMIKRYDEHHQDLTLLKALVRQQLPEKYKEIFFDQSKNGYAGYIDGGASQEEFYKFIKPILEKMDGTEELLVKLNREDLLRKQRTFDNGSIPHQIHLGELHAILRRQEDFYPFLKDNREKIEKILTFRIPYYVGPLARGNSRFAWMTRKSEETITPWNFEEVVDKGASAQSFIERMTNFDKNLPNEKVLPKHSLLYEYFTVYNELTKVKYVTEGMRKPAFLSGEQKKAIVDLLFKTNRKVTVKQLKEDYFKKIECFDSVEISGVEDRFNASLGTYHDLLKIIKDKDFLDNEENEDILEDIVLTLTLFEDREMIEERLKTYAHLFDDKVMKQLKRRRYTGWGRLSRKLINGIRDKQSGKTILDFLKSDGFANRNFMQLIHDDSLTFKEDIQKAQVSGQGDSLHEHIANLAGSPAIKKGILQTVKVVDELVKVMGRHKPENIVIEMARENQTTQKGQKNSRERMKRIEEGIKELGSQILKEHPVENTQLQNEKLYLYYLQNGRDMYVDQELDINRLSDYDVDHIVPQSFLKDDSIDNKVLTRSDKARGKSDNVPSEEVVKKMKNYWRQLLNAKLITQRKFDNLTKAERGGLSELDKAGFIKRQLVETRQITKHVAQILDSRMNTKYDENDKLIREVKVITLKSKLVSDFRKDFQFYKVREINNYHHAHDAYLNAVVGTALIKKYPKLESEFVYGDYKVYDVRKMIAKSEQEIGKATAKYFFYSNIMNFFKTEITLANGEIRKRPLIETNGETGEIVWDKGRDFATVRKVLSMPQVNIVKKTEVQTGGFSKESILPKRNSDKLIARKKDWDPKKYGGFDSPTVAYSVLVVAKVEKGKSKKLKSVKELLGITIMERSSFEKNPIDFLEAKGYKEVKKDLIIKLPKYSLFELENGRKRMLASAGELQKGNELALPSKYVNFLYLASHYEKLKGSPEDNEQKQLFVEQHKHYLDEIIEQISEFSKRVILADANLDKVLSAYNKHRDKPIREQAENIIHLFTLTNLGAPAAFKYFDTTIDRKRYTSTKEVLDATLIHQSITGLYETRIDLSQLGGDGGEAAAKGGGGSSGGTLNIEDEYRLHETSKGPDVPLGSTWLSDFPQAWAETGGMGLAVRQAPLIIPLKATSTPVSIKQYPMSQEARLGIKPHIQRLLDQGILVPCQSPWNTPLLPVKKPGTNDYRPVQDLREVNKRVEDIHPTVPNPYNLLSGLPPSHQWYTVLDLKDAFFCLRLHPTSQSLFAFEWRDPEMGISGQLTWTRLPQGFKNSPTLFNEALHRDLADFRIQHPDLILLQYVDDLLLAATSELDCQQGTRALLQTLGDLGYRASAKKAQICQKQVKYLGYLLKEGQRWLTEARKETVMGQPTPKTPRQLREFLGTAGFCRLWIPGFAEMAAPLYPLTKPGTLFEWGPDQQKAYQEIKQALLTAPALGLPDLTKPFELFVDEKQGYAKGVLTQKLGPWRRPVAYLSKKLDPVAAGWPPCLRMVAAIAVLTKDAGKLTMGQPLVILAPHAVEALVKQPPDRWLSNARMTHYQALLLDTDRVQFGPIVALNPATLLPLPEEGLQHDCLDILAEAHGTRPDLTDQPLPDADHTWYTDGSSFLQEGQRKAGAAVTTETEVVWAKALPAGTSAQRAELIALTQALKMAEGKKLNVYTDSRYAFATAHIHGEIYRRRGWLTSEGKEIKNKDEILALLKALFLPKRLSIIHCPGHQKGNRAEARGNRMADQAAREVATRETPETSTLLAGKRTADGSEFEKRTADGSEFESPKKKAKVE

SEQ ID NO: 2463 - protein, 2094 aa, synthetic construct
MPAAKRVKLDGGDKKYSIGLDIGTNSVGWAVITDEYKVPSKKFKVLGNTDRHSIKKNLIGALLFDSGETAEATRLKRTARRRYTRRKNRICYLQEIFSNEMAKVDDSFFHRLEESFLVEEDKKHERHPIFGNIVDEVAYHEKYPTIYHLRKKLVDSTDKADLRLIYLALAHMIKFRGHFLIEGDLNPDNSDVDKLFIQLVQTYNQLFEENPINASGVDAKAILSARLSKSRRLENLIAQLPGEKKNGLFGNLIALSLGLTPNFKSNFDLAEDAKLQLSKDTYDDDLDNLLAQIGDQYADLFLAAKNLSDAILLSDILRVNTEITKAPLSASMIKRYDEHHQDLTLLKALVRQQLPEKYKEIFFDQSKNGYAGYIDGGASQEEFYKFIKPILEKMDGTEELLVKLNREDLLRKQRTFDNGSIPHQIHLGELHAILRRQEDFYPFLKDNREKIEKILTFRIPYYVGPLARGNSRFAWMTRKSEETITPWNFEEVVDKGASAQSFIERMTNFDKNLPNEKVLPKHSLLYEYFTVYNELTKVKYVTEGMRKPAFLSGEQKKAIVDLLFKTNRKVTVKQLKEDYFKKIECFDSVEISGVEDRFNASLGTYHDLLKIIKDKDFLDNEENEDILEDIVLTLTLFEDREMIEERLKTYAHLFDDKVMKQLKRRRYTGWGRLSRKLINGIRDKQSGKTILDFLKSDGFANRNFMQLIHDDSLTFKEDIQKAQVSGQGDSLHEHIANLAGSPAIKKGILQTVKVVDELVKVMGRHKPENIVIEMARENQTTQKGQKNSRERMKRIEEGIKELGSQILKEHPVENTQLQNEKLYLYYLQNGRDMYVDQELDINRLSDYDVDHIVPQSFLKDDSIDNKVLTRSDKARGKSDNVPSEEVVKKMKNYWRQLLNAKLITQRKFDNLTKAERGGLSELDKAGFIKRQLVETRQITKHVAQILDSRMNTKYDENDKLIREVKVITLKSKLVSDFRKDFQFYKVREINNYHHAHDAYLNAVVGTALIKKYPKLESEFVYGDYKVYDVRKMIAKSEQEIGKATAKYFFYSNIMNFFKTEITLANGEIRKRPLIETNGETGEIVWDKGRDFATVRKVLSMPQVNIVKKTEVQTGGFSKESILPKRNSDKLIARKKDWDPKKYGGFDSPTVAYSVLVVAKVEKGKSKKLKSVKELLGITIMERSSFEKNPIDFLEAKGYKEVKKDLIIKLPKYSLFELENGRKRMLASAGELQKGNELALPSKYVNFLYLASHYEKLKGSPEDNEQKQLFVEQHKHYLDEIIEQISEFSKRVILADANLDKVLSAYNKHRDKPIREQAENIIHLFTLTNLGAPAAFKYFDTTIDRKRYTSTKEVLDATLIHQSITGLYETRIDLSQLGGDGGGSSGGSGGGGGTLNIEDEYRLHETSKGPDVPLGSTWLSDFPQAWAETGGMGLAVRQAPLIIPLKATSTPVSIKQYPMSQEARLGIKPHIQRLLDQGILVPCQSPWNTPLLPVKKPGTNDYRPVQDLREVNKRVEDIHPTVPNPYNLLSGLPPSHQWYTVLDLKDAFFCLRLHPTSQSLFAFEWRDPEMGISGQLTWTRLPQGFKNSPTLFNEALHRDLADFRIQHPDLILLQYVDDLLLAATSELDCQQGTRALLQTLGDLGYRASAKKAQICQKQVKYLGYLLKEGQRWLTEARKETVMGQPTPKTPRQLREFLGTAGFCRLWIPGFAEMAAPLYPLTKPGTLFEWGPDQQKAYQEIKQALLTAPALGLPDLTKPFELFVDEKQGYAKGVLTQKLGPWRRPVAYLSKKLDPVAAGWPPCLRMVAAIAVLTKDAGKLTMGQPLVILAPHAVEALVKQPPDRWLSNARMTHYQALLLDTDRVQFGPIVALNPATLLPLPEEGLQHDCLDILAEAHGTRPDLTDQPLPDADHTWYTDGSSFLQEGQRKAGAAVTTETEVVWAKALPAGTSAQRAELIALTQALKMAEGKKLNVYTDSRYAFATAHIHGEIYRRRGWLTSEGKEIKNKDEILALLKALFLPKRLSIIHCPGHQKGNRAEARGNRMADQAAREVATRETPETSTLLAGKRTADGSEFEKRTADGSEFESPKKKAKVE

SEQ ID NO: 2464 - protein, 2105 aa, synthetic construct
MPAAKRVKLDGGDKKYSIGLDIGTNSVGWAVITDEYKVPSKKFKVLGNTDRHSIKKNLIGALLFDSGETAEATRLKRTARRRYTRRKNRICYLQEIFSNEMAKVDDSFFHRLEESFLVEEDKKHERHPIFGNIVDEVAYHEKYPTIYHLRKKLVDSTDKADLRLIYLALAHMIKFRGHFLIEGDLNPDNSDVDKLFIQLVQTYNQLFEENPINASGVDAKAILSARLSKSRRLENLIAQLPGEKKNGLFGNLIALSLGLTPNFKSNFDLAEDAKLQLSKDTYDDDLDNLLAQIGDQYADLFLAAKNLSDAILLSDILRVNTEITKAPLSASMIKRYDEHHQDLTLLKALVRQQLPEKYKEIFFDQSKNGYAGYIDGGASQEEFYKFIKPILEKMDGTEELLVKLNREDLLRKQRTFDNGSIPHQIHLGELHAILRRQEDFYPFLKDNREKIEKILTFRIPYYVGPLARGNSRFAWMTRKSEETITPWNFEEVVDKGASAQSFIERMTNFDKNLPNEKVLPKHSLLYEYFTVYNELTKVKYVTEGMRKPAFLSGEQKKAIVDLLFKTNRKVTVKQLKEDYFKKIECFDSVEISGVEDRFNASLGTYHDLLKIIKDKDFLDNEENEDILEDIVLTLTLFEDREMIEERLKTYAHLFDDKVMKQLKRRRYTGWGRLSRKLINGIRDKQSGKTILDFLKSDGFANRNFMQLIHDDSLTFKEDIQKAQVSGQGDSLHEHIANLAGSPAIKKGILQTVKVVDELVKVMGRHKPENIVIEMARENQTTQKGQKNSRERMKRIEEGIKELGSQILKEHPVENTQLQNEKLYLYYLQNGRDMYVDQELDINRLSDYDVDHIVPQSFLKDDSIDNKVLTRSDKARGKSDNVPSEEVVKKMKNYWRQLLNAKLITQRKFDNLTKAERGGLSELDKAGFIKRQLVETRQITKHVAQILDSRMNTKYDENDKLIREVKVITLKSKLVSDFRKDFQFYKVREINNYHHAHDAYLNAVVGTALIKKYPKLESEFVYGDYKVYDVRKMIAKSEQEIGKATAKYFFYSNIMNFFKTEITLANGEIRKRPLIETNGETGEIVWDKGRDFATVRKVLSMPQVNIVKKTEVQTGGFSKESILPKRNSDKLIARKKDWDPKKYGGFDSPTVAYSVLVVAKVEKGKSKKLKSVKELLGITIMERSSFEKNPIDFLEAKGYKEVKKDLIIKLPKYSLFELENGRKRMLASAGELQKGNELALPSKYVNFLYLASHYEKLKGSPEDNEQKQLFVEQHKHYLDEIIEQISEFSKRVILADANLDKVLSAYNKHRDKPIREQAENIIHLFTLTNLGAPAAFKYFDTTIDRKRYTSTKEVLDATLIHQSITGLYETRIDLSQLGGDGGGGGGSGGGGSGGGGSGGGGSGGTLNIEDEYRLHETSKGPDVPLGSTWLSDFPQAWAETGGMGLAVRQAPLIIPLKATSTPVSIKQYPMSQEARLGIKPHIQRLLDQGILVPCQSPWNTPLLPVKKPGTNDYRPVQDLREVNKRVEDIHPTVPNPYNLLSGLPPSHQWYTVLDLKDAFFCLRLHPTSQSLFAFEWRDPEMGISGQLTWTRLPQGFKNSPTLFNEALHRDLADFRIQHPDLILLQYVDDLLLAATSELDCQQGTRALLQTLGDLGYRASAKKAQICQKQVKYLGYLLKEGQRWLTEARKETVMGQPTPKTPRQLREFLGTAGFCRLWIPGFAEMAAPLYPLTKPGTLFEWGPDQQKAYQEIKQALLTAPALGLPDLTKPFELFVDEKQGYAKGVLTQKLGPWRRPVAYLSKKLDPVAAGWPPCLRMVAAIAVLTKDAGKLTMGQPLVILAPHAVEALVKQPPDRWLSNARMTHYQALLLDTDRVQFGPIVALNPATLLPLPEEGLQHDCLDILAEAHGTRPDLTDQPLPDADHTWYTDGSSFLQEGQRKAGAAVTTETEVVWAKALPAGTSAQRAELIALTQALKMAEGKKLNVYTDSRYAFATAHIHGEIYRRRGWLTSEGKEIKNKDEILALLKALFLPKRLSIIHCPGHQKGNRAEARGNRMADQAAREVATRETPETSTLLAGKRTADGSEFEKRTADGSEFESPKKKAKVE

SEQ ID NO: 2465 - protein, 2100 aa, synthetic construct
MPAAKRVKLDGGDKKYSIGLDIGTNSVGWAVITDEYKVPSKKFKVLGNTDRHSIKKNLIGALLFDSGETAEATRLKRTARRRYTRRKNRICYLQEIFSNEMAKVDDSFFHRLEESFLVEEDKKHERHPIFGNIVDEVAYHEKYPTIYHLRKKLVDSTDKADLRLIYLALAHMIKFRGHFLIEGDLNPDNSDVDKLFIQLVQTYNQLFEENPINASGVDAKAILSARLSKSRRLENLIAQLPGEKKNGLFGNLIALSLGLTPNFKSNFDLAEDAKLQLSKDTYDDDLDNLLAQIGDQYADLFLAAKNLSDAILLSDILRVNTEITKAPLSASMIKRYDEHHQDLTLLKALVRQQLPEKYKEIFFDQSKNGYAGYIDGGASQEEFYKFIKPILEKMDGTEELLVKLNREDLLRKQRTFDNGSIPHQIHLGELHAILRRQEDFYPFLKDNREKIEKILTFRIPYYVGPLARGNSRFAWMTRKSEETITPWNFEEVVDKGASAQSFIERMTNFDKNLPNEKVLPKHSLLYEYFTVYNELTKVKYVTEGMRKPAFLSGEQKKAIVDLLFKTNRKVTVKQLKEDYFKKIECFDSVEISGVEDRFNASLGTYHDLLKIIKDKDFLDNEENEDILEDIVLTLTLFEDREMIEERLKTYAHLFDDKVMKQLKRRRYTGWGRLSRKLINGIRDKQSGKTILDFLKSDGFANRNFMQLIHDDSLTFKEDIQKAQVSGQGDSLHEHIANLAGSPAIKKGILQTVKVVDELVKVMGRHKPENIVIEMARENQTTQKGQKNSRERMKRIEEGIKELGSQILKEHPVENTQLQNEKLYLYYLQNGRDMYVDQELDINRLSDYDVDHIVPQSFLKDDSIDNKVLTRSDKARGKSDNVPSEEVVKKMKNYWRQLLNAKLITQRKFDNLTKAERGGLSELDKAGFIKRQLVETRQITKHVAQILDSRMNTKYDENDKLIREVKVITLKSKLVSDFRKDFQFYKVREINNYHHAHDAYLNAVVGTALIKKYPKLESEFVYGDYKVYDVRKMIAKSEQEIGKATAKYFFYSNIMNFFKTEITLANGEIRKRPLIETNGETGEIVWDKGRDFATVRKVLSMPQVNIVKKTEVQTGGFSKESILPKRNSDKLIARKKDWDPKKYGGFDSPTVAYSVLVVAKVEKGKSKKLKSVKELLGITIMERSSFEKNPIDFLEAKGYKEVKKDLIIKLPKYSLFELENGRKRMLASAGELQKGNELALPSKYVNFLYLASHYEKLKGSPEDNEQKQLFVEQHKHYLDEIIEQISEFSKRVILADANLDKVLSAYNKHRDKPIREQAENIIHLFTLTNLGAPAAFKYFDTTIDRKRYTSTKEVLDATLIHQSITGLYETRIDLSQLGGDGGGGSGGSGGSGGSGGSGGTLNIEDEYRLHETSKGPDVPLGSTWLSDFPQAWAETGGMGLAVRQAPLIIPLKATSTPVSIKQYPMSQEARLGIKPHIQRLLDQGILVPCQSPWNTPLLPVKKPGTNDYRPVQDLREVNKRVEDIHPTVPNPYNLLSGLPPSHQWYTVLDLKDAFFCLRLHPTSQSLFAFEWRDPEMGISGQLTWTRLPQGFKNSPTLFNEALHRDLADFRIQHPDLILLQYVDDLLLAATSELDCQQGTRALLQTLGDLGYRASAKKAQICQKQVKYLGYLLKEGQRWLTEARKETVMGQPTPKTPRQLREFLGTAGFCRLWIPGFAEMAAPLYPLTKPGTLFEWGPDQQKAYQEIKQALLTAPALGLPDLTKPFELFVDEKQGYAKGVLTQKLGPWRRPVAYLSKKLDPVAAGWPPCLRMVAAIAVLTKDAGKLTMGQPLVILAPHAVEALVKQPPDRWLSNARMTHYQALLLDTDRVQFGPIVALNPATLLPLPEEGLQHDCLDILAEAHGTRPDLTDQPLPDADHTWYTDGSSFLQEGQRKAGAAVTTETEVVWAKALPAGTSAQRAELIALTQALKMAEGKKLNVYTDSRYAFATAHIHGEIYRRRGWLTSEGKEIKNKDEILALLKALFLPKRLSIIHCPGHQKGNRAEARGNRMADQAAREVATRETPETSTLLAGKRTADGSEFEKRTADGSEFESPKKKAKVE

SEQ ID NO: 2466 - protein, 2096 aa, synthetic construct
MPAAKRVKLDGGDKKYSIGLDIGTNSVGWAVITDEYKVPSKKFKVLGNTDRHSIKKNLIGALLFDSGETAEATRLKRTARRRYTRRKNRICYLQEIFSNEMAKVDDSFFHRLEESFLVEEDKKHERHPIFGNIVDEVAYHEKYPTIYHLRKKLVDSTDKADLRLIYLALAHMIKFRGHFLIEGDLNPDNSDVDKLFIQLVQTYNQLFEENPINASGVDAKAILSARLSKSRRLENLIAQLPGEKKNGLFGNLIALSLGLTPNFKSNFDLAEDAKLQLSKDTYDDDLDNLLAQIGDQYADLFLAAKNLSDAILLSDILRVNTEITKAPLSASMIKRYDEHHQDLTLLKALVRQQLPEKYKEIFFDQSKNGYAGYIDGGASQEEFYKFIKPILEKMDGTEELLVKLNREDLLRKQRTFDNGSIPHQIHLGELHAILRRQEDFYPFLKDNREKIEKILTFRIPYYVGPLARGNSRFAWMTRKSEETITPWNFEEVVDKGASAQSFIERMTNFDKNLPNEKVLPKHSLLYEYFTVYNELTKVKYVTEGMRKPAFLSGEQKKAIVDLLFKTNRKVTVKQLKEDYFKKIECFDSVEISGVEDRFNASLGTYHDLLKIIKDKDFLDNEENEDILEDIVLTLTLFEDREMIEERLKTYAHLFDDKVMKQLKRRRYTGWGRLSRKLINGIRDKQSGKTILDFLKSDGFANRNFMQLIHDDSLTFKEDIQKAQVSGQGDSLHEHIANLAGSPAIKKGILQTVKVVDELVKVMGRHKPENIVIEMARENQTTQKGQKNSRERMKRIEEGIKELGSQILKEHPVENTQLQNEKLYLYYLQNGRDMYVDQELDINRLSDYDVDHIVPQSFLKDDSIDNKVLTRSDKARGKSDNVPSEEVVKKMKNYWRQLLNAKLITQRKFDNLTKAERGGLSELDKAGFIKRQLVETRQITKHVAQILDSRMNTKYDENDKLIREVKVITLKSKLVSDFRKDFQFYKVREINNYHHAHDAYLNAVVGTALIKKYPKLESEFVYGDYKVYDVRKMIAKSEQEIGKATAKYFFYSNIMNFFKTEITLANGEIRKRPLIETNGETGEIVWDKGRDFATVRKVLSMPQVNIVKKTEVQTGGFSKESILPKRNSDKLIARKKDWDPKKYGGFDSPTVAYSVLVVAKVEKGKSKKLKSVKELLGITIMERSSFEKNPIDFLEAKGYKEVKKDLIIKLPKYSLFELENGRKRMLASAGELQKGNELALPSKYVNFLYLASHYEKLKGSPEDNEQKQLFVEQHKHYLDEIIEQISEFSKRVILADANLDKVLSAYNKHRDKPIREQAENIIHLFTLTNLGAPAAFKYFDTTIDRKRYTSTKEVLDATLIHQSITGLYETRIDLSQLGGDGGPAPEAAAKGSSGGTLNIEDEYRLHETSKGPDVPLGSTWLSDFPQAWAETGGMGLAVRQAPLIIPLKATSTPVSIKQYPMSQEARLGIKPHIQRLLDQGILVPCQSPWNTPLLPVKKPGTNDYRPVQDLREVNKRVEDIHPTVPNPYNLLSGLPPSHQWYTVLDLKDAFFCLRLHPTSQSLFAFEWRDPEMGISGQLTWTRLPQGFKNSPTLFNEALHRDLADFRIQHPDLILLQYVDDLLLAATSELDCQQGTRALLQTLGDLGYRASAKKAQICQKQVKYLGYLLKEGQRWLTEARKETVMGQPTPKTPRQLREFLGTAGFCRLWIPGFAEMAAPLYPLTKPGTLFEWGPDQQKAYQEIKQALLTAPALGLPDLTKPFELFVDEKQGYAKGVLTQKLGPWRRPVAYLSKKLDPVAAGWPPCLRMVAAIAVLTKDAGKLTMGQPLVILAPHAVEALVKQPPDRWLSNARMTHYQALLLDTDRVQFGPIVALNPATLLPLPEEGLQHDCLDILAEAHGTRPDLTDQPLPDADHTWYTDGSSFLQEGQRKAGAAVTTETEVVWAKALPAGTSAQRAELIALTQALKMAEGKKLNVYTDSRYAFATAHIHGEIYRRRGWLTSEGKEIKNKDEILALLKALFLPKRLSIIHCPGHQKGNRAEARGNRMADQAAREVATRETPETSTLLAGKRTADGSEFEKRTADGSEFESPKKKAKVE

SEQ ID NO: 2467 - protein, 2094 aa, synthetic construct
MPAAKRVKLDGGDKKYSIGLDIGTNSVGWAVITDEYKVPSKKFKVLGNTDRHSIKKNLIGALLFDSGETAEATRLKRTARRRYTRRKNRICYLQEIFSNEMAKVDDSFFHRLEESFLVEEDKKHERHPIFGNIVDEVAYHEKYPTIYHLRKKLVDSTDKADLRLIYLALAHMIKFRGHFLIEGDLNPDNSDVDKLFIQLVQTYNQLFEENPINASGVDAKAILSARLSKSRRLENLIAQLPGEKKNGLFGNLIALSLGLTPNFKSNFDLAEDAKLQLSKDTYDDDLDNLLAQIGDQYADLFLAAKNLSDAILLSDILRVNTEITKAPLSASMIKRYDEHHQDLTLLKALVRQQLPEKYKEIFFDQSKNGYAGYIDGGASQEEFYKFIKPILEKMDGTEELLVKLNREDLLRKQRTFDNGSIPHQIHLGELHAILRRQEDFYPFLKDNREKIEKILTFRIPYYVGPLARGNSRFAWMTRKSEETITPWNFEEVVDKGASAQSFIERMTNFDKNLPNEKVLPKHSLLYEYFTVYNELTKVKYVTEGMRKPAFLSGEQKKAIVDLLFKTNRKVTVKQLKEDYFKKIECFDSVEISGVEDRFNASLGTYHDLLKIIKDKDFLDNEENEDILEDIVLTLTLFEDREMIEERLKTYAHLFDDKVMKQLKRRRYTGWGRLSRKLINGIRDKQSGKTILDFLKSDGFANRNFMQLIHDDSLTFKEDIQKAQVSGQGDSLHEHIANLAGSPAIKKGILQTVKVVDELVKVMGRHKPENIVIEMARENQTTQKGQKNSRERMKRIEEGIKELGSQILKEHPVENTQLQNEKLYLYYLQNGRDMYVDQELDINRLSDYDVDHIVPQSFLKDDSIDNKVLTRSDKARGKSDNVPSEEVVKKMKNYWRQLLNAKLITQRKFDNLTKAERGGLSELDKAGFIKRQLVETRQITKHVAQILDSRMNTKYDENDKLIREVKVITLKSKLVSDFRKDFQFYKVREINNYHHAHDAYLNAVVGTALIKKYPKLESEFVYGDYKVYDVRKMIAKSEQEIGKATAKYFFYSNIMNFFKTEITLANGEIRKRPLIETNGETGEIVWDKGRDFATVRKVLSMPQVNIVKKTEVQTGGFSKESILPKRNSDKLIARKKDWDPKKYGGFDSPTVAYSVLVVAKVEKGKSKKLKSVKELLGITIMERSSFEKNPIDFLEAKGYKEVKKDLIIKLPKYSLFELENGRKRMLASAGELQKGNELALPSKYVNFLYLASHYEKLKGSPEDNEQKQLFVEQHKHYLDEIIEQISEFSKRVILADANLDKVLSAYNKHRDKPIREQAENIIHLFTLTNLGAPAAFKYFDTTIDRKRYTSTKEVLDATLIHQSITGLYETRIDLSQLGGDGGPAPGGSGSSGGTLNIEDEYRLHETSKGPDVPLGSTWLSDFPQAWAETGGMGLAVRQAPLIIPLKATSTPVSIKQYPMSQEARLGIKPHIQRLLDQGILVPCQSPWNTPLLPVKKPGTNDYRPVQDLREVNKRVEDIHPTVPNPYNLLSGLPPSHQWYTVLDLKDAFFCLRLHPTSQSLFAFEWRDPEMGISGQLTWTRLPQGFKNSPTLFNEALHRDLADFRIQHPDLILLQYVDDLLLAATSELDCQQGTRALLQTLGDLGYRASAKKAQICQKQVKYLGYLLKEGQRWLTEARKETVMGQPTPKTPRQLREFLGTAGFCRLWIPGFAEMAAPLYPLTKPGTLFEWGPDQQKAYQEIKQALLTAPALGLPDLTKPFELFVDEKQGYAKGVLTQKLGPWRRPVAYLSKKLDPVAAGWPPCLRMVAAIAVLTKDAGKLTMGQPLVILAPHAVEALVKQPPDRWLSNARMTHYQALLLDTDRVQFGPIVALNPATLLPLPEEGLQHDCLDILAEAHGTRPDLTDQPLPDADHTWYTDGSSFLQEGQRKAGAAVTTETEVVWAKALPAGTSAQRAELIALTQALKMAEGKKLNVYTDSRYAFATAHIHGEIYRRRGWLTSEGKEIKNKDEILALLKALFLPKRLSIIHCPGHQKGNRAEARGNRMADQAAREVATRETPETSTLLAGKRTADGSEFEKRTADGSEFESPKKKAKVE

SEQ ID NO: 2468 - protein, 2091 aa, synthetic construct
MPAAKRVKLDGGDKKYSIGLDIGTNSVGWAVITDEYKVPSKKFKVLGNTDRHSIKKNLIGALLFDSGETAEATRLKRTARRRYTRRKNRICYLQEIFSNEMAKVDDSFFHRLEESFLVEEDKKHERHPIFGNIVDEVAYHEKYPTIYHLRKKLVDSTDKADLRLIYLALAHMIKFRGHFLIEGDLNPDNSDVDKLFIQLVQTYNQLFEENPINASGVDAKAILSARLSKSRRLENLIAQLPGEKKNGLFGNLIALSLGLTPNFKSNFDLAEDAKLQLSKDTYDDDLDNLLAQIGDQYADLFLAAKNLSDAILLSDILRVNTEITKAPLSASMIKRYDEHHQDLTLLKALVRQQLPEKYKEIFFDQSKNGYAGYIDGGASQEEFYKFIKPILEKMDGTEELLVKLNREDLLRKQRTFDNGSIPHQIHLGELHAILRRQEDFYPFLKDNREKIEKILTFRIPYYVGPLARGNSRFAWMTRKSEETITPWNFEEVVDKGASAQSFIERMTNFDKNLPNEKVLPKHSLLYEYFTVYNELTKVKYVTEGMRKPAFLSGEQKKAIVDLLFKTNRKVTVKQLKEDYFKKIECFDSVEISGVEDRFNASLGTYHDLLKIIKDKDFLDNEENEDILEDIVLTLTLFEDREMIEERLKTYAHLFDDKVMKQLKRRRYTGWGRLSRKLINGIRDKQSGKTILDFLKSDGFANRNFMQLIHDDSLTFKEDIQKAQVSGQGDSLHEHIANLAGSPAIKKGILQTVKVVDELVKVMGRHKPENIVIEMARENQTTQKGQKNSRERMKRIEEGIKELGSQILKEHPVENTQLQNEKLYLYYLQNGRDMYVDQELDINRLSDYDVDHIVPQSFLKDDSIDNKVLTRSDKARGKSDNVPSEEVVKKMKNYWRQLLNAKLITQRKFDNLTKAERGGLSELDKAGFIKRQLVETRQITKHVAQILDSRMNTKYDENDKLIREVKVITLKSKLVSDFRKDFQFYKVREINNYHHAHDAYLNAVVGTALIKKYPKLESEFVYGDYKVYDVRKMIAKSEQEIGKATAKYFFYSNIMNFFKTEITLANGEIRKRPLIETNGETGEIVWDKGRDFATVRKVLSMPQVNIVKKTEVQTGGFSKESILPKRNSDKLIARKKDWDPKKYGGFDSPTVAYSVLVVAKVEKGKSKKLKSVKELLGITIMERSSFEKNPIDFLEAKGYKEVKKDLIIKLPKYSLFELENGRKRMLASAGELQKGNELALPSKYVNFLYLASHYEKLKGSPEDNEQKQLFVEQHKHYLDEIIEQISEFSKRVILADANLDKVLSAYNKHRDKPIREQAENIIHLFTLTNLGAPAAFKYFDTTIDRKRYTSTKEVLDATLIHQSITGLYETRIDLSQLGGDGGGGGGSSGGTLNIEDEYRLHETSKGPDVPLGSTWLSDFPQAWAETGGMGLAVRQAPLIIPLKATSTPVSIKQYPMSQEARLGIKPHIQRLLDQGILVPCQSPWNTPLLPVKKPGTNDYRPVQDLREVNKRVEDIHPTVPNPYNLLSGLPPSHQWYTVLDLKDAFFCLRLHPTSQSLFAFEWRDPEMGISGQLTWTRLPQGFKNSPTLFNEALHRDLADFRIQHPDLILLQYVDDLLLAATSELDCQQGTRALLQTLGDLGYRASAKKAQICQKQVKYLGYLLKEGQRWLTEARKETVMGQPTPKTPRQLREFLGTAGFCRLWIPGFAEMAAPLYPLTKPGTLFEWGPDQQKAYQEIKQALLTAPALGLPDLTKPFELFVDEKQGYAKGVLTQKLGPWRRPVAYLSKKLDPVAAGWPPCLRMVAAIAVLTKDAGKLTMGQPLVILAPHAVEALVKQPPDRWLSNARMTHYQALLLDTDRVQFGPIVALNPATLLPLPEEGLQHDCLDILAEAHGTRPDLTDQPLPDADHTWYTDGSSFLQEGQRKAGAAVTTETEVVWAKALPAGTSAQRAELIALTQALKMAEGKKLNVYTDSRYAFATAHIHGEIYRRRGWLTSEGKEIKNKDEILALLKALFLPKRLSIIHCPGHQKGNRAEARGNRMADQAAREVATRETPETSTLLAGKRTADGSEFEKRTADGSEFESPKKKAKVE

SEQ ID NO: 2469 - protein, 2096 aa, synthetic construct
MPAAKRVKLDGGDKKYSIGLDIGTNSVGWAVITDEYKVPSKKFKVLGNTDRHSIKKNLIGALLFDSGETAEATRLKRTARRRYTRRKNRICYLQEIFSNEMAKVDDSFFHRLEESFLVEEDKKHERHPIFGNIVDEVAYHEKYPTIYHLRKKLVDSTDKADLRLIYLALAHMIKFRGHFLIEGDLNPDNSDVDKLFIQLVQTYNQLFEENPINASGVDAKAILSARLSKSRRLENLIAQLPGEKKNGLFGNLIALSLGLTPNFKSNFDLAEDAKLQLSKDTYDDDLDNLLAQIGDQYADLFLAAKNLSDAILLSDILRVNTEITKAPLSASMIKRYDEHHQDLTLLKALVRQQLPEKYKEIFFDQSKNGYAGYIDGGASQEEFYKFIKPILEKMDGTEELLVKLNREDLLRKQRTFDNGSIPHQIHLGELHAILRRQEDFYPFLKDNREKIEKILTFRIPYYVGPLARGNSRFAWMTRKSEETITPWNFEEVVDKGASAQSFIERMTNFDKNLPNEKVLPKHSLLYEYFTVYNELTKVKYVTEGMRKPAFLSGEQKKAIVDLLFKTNRKVTVKQLKEDYFKKIECFDSVEISGVEDRFNASLGTYHDLLKIIKDKDFLDNEENEDILEDIVLTLTLFEDREMIEERLKTYAHLFDDKVMKQLKRRRYTGWGRLSRKLINGIRDKQSGKTILDFLKSDGFANRNFMQLIHDDSLTFKEDIQKAQVSGQGDSLHEHIANLAGSPAIKKGILQTVKVVDELVKVMGRHKPENIVIEMARENQTTQKGQKNSRERMKRIEEGIKELGSQILKEHPVENTQLQNEKLYLYYLQNGRDMYVDQELDINRLSDYDVDHIVPQSFLKDDSIDNKVLTRSDKARGKSDNVPSEEVVKKMKNYWRQLLNAKLITQRKFDNLTKAERGGLSELDKAGFIKRQLVETRQITKHVAQILDSRMNTKYDENDKLIREVKVITLKSKLVSDFRKDFQFYKVREINNYHHAHDAYLNAVVGTALIKKYPKLESEFVYGDYKVYDVRKMIAKSEQEIGKATAKYFFYSNIMNFFKTEITLANGEIRKRPLIETNGETGEIVWDKGRDFATVRKVLSMPQVNIVKKTEVQTGGFSKESILPKRNSDKLIARKKDWDPKKYGGFDSPTVAYSVLVVAKVEKGKSKKLKSVKELLGITIMERSSFEKNPIDFLEAKGYKEVKKDLIIKLPKYSLFELENGRKRMLASAGELQKGNELALPSKYVNFLYLASHYEKLKGSPEDNEQKQLFVEQHKHYLDEIIEQISEFSKRVILADANLDKVLSAYNKHRDKPIREQAENIIHLFTLTNLGAPAAFKYFDTTIDRKRYTSTKEVLDATLIHQSITGLYETRIDLSQLGGDGGEAAAKGSSPAPGGTLNIEDEYRLHETSKGPDVPLGSTWLSDFPQAWAETGGMGLAVRQAPLIIPLKATSTPVSIKQYPMSQEARLGIKPHIQRLLDQGILVPCQSPWNTPLLPVKKPGTNDYRPVQDLREVNKRVEDIHPTVPNPYNLLSGLPPSHQWYTVLDLKDAFFCLRLHPTSQSLFAFEWRDPEMGISGQLTWTRLPQGFKNSPTLFNEALHRDLADFRIQHPDLILLQYVDDLLLAATSELDCQQGTRALLQTLGDLGYRASAKKAQICQKQVKYLGYLLKEGQRWLTEARKETVMGQPTPKTPRQLREFLGTAGFCRLWIPGFAEMAAPLYPLTKPGTLFEWGPDQQKAYQEIKQALLTAPALGLPDLTKPFELFVDEKQGYAKGVLTQKLGPWRRPVAYLSKKLDPVAAGWPPCLRMVAAIAVLTKDAGKLTMGQPLVILAPHAVEALVKQPPDRWLSNARMTHYQALLLDTDRVQFGPIVALNPATLLPLPEEGLQHDCLDILAEAHGTRPDLTDQPLPDADHTWYTDGSSFLQEGQRKAGAAVTTETEVVWAKALPAGTSAQRAELIALTQALKMAEGKKLNVYTDSRYAFATAHIHGEIYRRRGWLTSEGKEIKNKDEILALLKALFLPKRLSIIHCPGHQKGNRAEARGNRMADQAAREVATRETPETSTLLAGKRTADGSEFEKRTADGSEFESPKKKAKVE

SEQ ID NO: 2470 - protein, 2096 aa, synthetic construct
MPAAKRVKLDGGDKKYSIGLDIGTNSVGWAVITDEYKVPSKKFKVLGNTDRHSIKKNLIGALLFDSGETAEATRLKRTARRRYTRRKNRICYLQEIFSNEMAKVDDSFFHRLEESFLVEEDKKHERHPIFGNIVDEVAYHEKYPTIYHLRKKLVDSTDKADLRLIYLALAHMIKFRGHFLIEGDLNPDNSDVDKLFIQLVQTYNQLFEENPINASGVDAKAILSARLSKSRRLENLIAQLPGEKKNGLFGNLIALSLGLTPNFKSNFDLAEDAKLQLSKDTYDDDLDNLLAQIGDQYADLFLAAKNLSDAILLSDILRVNTEITKAPLSASMIKRYDEHHQDLTLLKALVRQQLPEKYKEIFFDQSKNGYAGYIDGGASQEEFYKFIKPILEKMDGTEELLVKLNREDLLRKQRTFDNGSIPHQIHLGELHAILRRQEDFYPFLKDNREKIEKILTFRIPYYVGPLARGNSRFAWMTRKSEETITPWNFEEVVDKGASAQSFIERMTNFDKNLPNEKVLPKHSLLYEYFTVYNELTKVKYVTEGMRKPAFLSGEQKKAIVDLLFKTNRKVTVKQLKEDYFKKIECFDSVEISGVEDRFNASLGTYHDLLKIIKDKDFLDNEENEDILEDIVLTLTLFEDREMIEERLKTYAHLFDDKVMKQLKRRRYTGWGRLSRKLINGIRDKQSGKTILDFLKSDGFANRNFMQLIHDDSLTFKEDIQKAQVSGQGDSLHEHIANLAGSPAIKKGILQTVKVVDELVKVMGRHKPENIVIEMARENQTTQKGQKNSRERMKRIEEGIKELGSQILKEHPVENTQLQNEKLYLYYLQNGRDMYVDQELDINRLSDYDVDHIVPQSFLKDDSIDNKVLTRSDKARGKSDNVPSEEVVKKMKNYWRQLLNAKLITQRKFDNLTKAERGGLSELDKAGFIKRQLVETRQITKHVAQILDSRMNTKYDENDKLIREVKVITLKSKLVSDFRKDFQFYKVREINNYHHAHDAYLNAVVGTALIKKYPKLESEFVYGDYKVYDVRKMIAKSEQEIGKATAKYFFYSNIMNFFKTEITLANGEIRKRPLIETNGETGEIVWDKGRDFATVRKVLSMPQVNIVKKTEVQTGGFSKESILPKRNSDKLIARKKDWDPKKYGGFDSPTVAYSVLVVAKVEKGKSKKLKSVKELLGITIMERSSFEKNPIDFLEAKGYKEVKKDLIIKLPKYSLFELENGRKRMLASAGELQKGNELALPSKYVNFLYLASHYEKLKGSPEDNEQKQLFVEQHKHYLDEIIEQISEFSKRVILADANLDKVLSAYNKHRDKPIREQAENIIHLFTLTNLGAPAAFKYFDTTIDRKRYTSTKEVLDATLIHQSITGLYETRIDLSQLGGDGGGGSGSSEAAAKGGTLNIEDEYRLHETSKGPDVPLGSTWLSDFPQAWAETGGMGLAVRQAPLIIPLKATSTPVSIKQYPMSQEARLGIKPHIQRLLDQGILVPCQSPWNTPLLPVKKPGTNDYRPVQDLREVNKRVEDIHPTVPNPYNLLSGLPPSHQWYTVLDLKDAFFCLRLHPTSQSLFAFEWRDPEMGISGQLTWTRLPQGFKNSPTLFNEALHRDLADFRIQHPDLILLQYVDDLLLAATSELDCQQGTRALLQTLGDLGYRASAKKAQICQKQVKYLGYLLKEGQRWLTEARKETVMGQPTPKTPRQLREFLGTAGFCRLWIPGFAEMAAPLYPLTKPGTLFEWGPDQQKAYQEIKQALLTAPALGLPDLTKPFELFVDEKQGYAKGVLTQKLGPWRRPVAYLSKKLDPVAAGWPPCLRMVAAIAVLTKDAGKLTMGQPLVILAPHAVEALVKQPPDRWLSNARMTHYQALLLDTDRVQFGPIVALNPATLLPLPEEGLQHDCLDILAEAHGTRPDLTDQPLPDADHTWYTDGSSFLQEGQRKAGAAVTTETEVVWAKALPAGTSAQRAELIALTQALKMAEGKKLNVYTDSRYAFATAHIHGEIYRRRGWLTSEGKEIKNKDEILALLKALFLPKRLSIIHCPGHQKGNRAEARGNRMADQAAREVATRETPETSTLLAGKRTADGSEFEKRTADGSEFESPKKKAKVE

SEQ ID NO: 2471 - protein, 2094 aa, synthetic construct
MPAAKRVKLDGGDKKYSIGLDIGTNSVGWAVITDEYKVPSKKFKVLGNTDRHSIKKNLIGALLFDSGETAEATRLKRTARRRYTRRKNRICYLQEIFSNEMAKVDDSFFHRLEESFLVEEDKKHERHPIFGNIVDEVAYHEKYPTIYHLRKKLVDSTDKADLRLIYLALAHMIKFRGHFLIEGDLNPDNSDVDKLFIQLVQTYNQLFEENPINASGVDAKAILSARLSKSRRLENLIAQLPGEKKNGLFGNLIALSLGLTPNFKSNFDLAEDAKLQLSKDTYDDDLDNLLAQIGDQYADLFLAAKNLSDAILLSDILRVNTEITKAPLSASMIKRYDEHHQDLTLLKALVRQQLPEKYKEIFFDQSKNGYAGYIDGGASQEEFYKFIKPILEKMDGTEELLVKLNREDLLRKQRTFDNGSIPHQIHLGELHAILRRQEDFYPFLKDNREKIEKILTFRIPYYVGPLARGNSRFAWMTRKSEETITPWNFEEVVDKGASAQSFIERMTNFDKNLPNEKVLPKHSLLYEYFTVYNELTKVKYVTEGMRKPAFLSGEQKKAIVDLLFKTNRKVTVKQLKEDYFKKIECFDSVEISGVEDRFNASLGTYHDLLKIIKDKDFLDNEENEDILEDIVLTLTLFEDREMIEERLKTYAHLFDDKVMKQLKRRRYTGWGRLSRKLINGIRDKQSGKTILDFLKSDGFANRNFMQLIHDDSLTFKEDIQKAQVSGQGDSLHEHIANLAGSPAIKKGILQTVKVVDELVKVMGRHKPENIVIEMARENQTTQKGQKNSRERMKRIEEGIKELGSQILKEHPVENTQLQNEKLYLYYLQNGRDMYVDQELDINRLSDYDVDHIVPQSFLKDDSIDNKVLTRSDKARGKSDNVPSEEVVKKMKNYWRQLLNAKLITQRKFDNLTKAERGGLSELDKAGFIKRQLVETRQITKHVAQILDSRMNTKYDENDKLIREVKVITLKSKLVSDFRKDFQFYKVREINNYHHAHDAYLNAVVGTALIKKYPKLESEFVYGDYKVYDVRKMIAKSEQEIGKATAKYFFYSNIMNFFKTEITLANGEIRKRPLIETNGETGEIVWDKGRDFATVRKVLSMPQVNIVKKTEVQTGGFSKESILPKRNSDKLIARKKDWDPKKYGGFDSPTVAYSVLVVAKVEKGKSKKLKSVKELLGITIMERSSFEKNPIDFLEAKGYKEVKKDLIIKLPKYSLFELENGRKRMLASAGELQKGNELALPSKYVNFLYLASHYEKLKGSPEDNEQKQLFVEQHKHYLDEIIEQISEFSKRVILADANLDKVLSAYNKHRDKPIREQAENIIHLFTLTNLGAPAAFKYFDTTIDRKRYTSTKEVLDATLIHQSITGLYETRIDLSQLGGDGGGSSGSSGSSGGTLNIEDEYRLHETSKGPDVPLGSTWLSDFPQAWAETGGMGLAVRQAPLIIPLKATSTPVSIKQYPMSQEARLGIKPHIQRLLDQGILVPCQSPWNTPLLPVKKPGTNDYRPVQDLREVNKRVEDIHPTVPNPYNLLSGLPPSHQWYTVLDLKDAFFCLRLHPTSQSLFAFEWRDPEMGISGQLTWTRLPQGFKNSPTLFNEALHRDLADFRIQHPDLILLQYVDDLLLAATSELDCQQGTRALLQTLGDLGYRASAKKAQICQKQVKYLGYLLKEGQRWLTEARKETVMGQPTPKTPRQLREFLGTAGFCRLWIPGFAEMAAPLYPLTKPGTLFEWGPDQQKAYQEIKQALLTAPALGLPDLTKPFELFVDEKQGYAKGVLTQKLGPWRRPVAYLSKKLDPVAAGWPPCLRMVAAIAVLTKDAGKLTMGQPLVILAPHAVEALVKQPPDRWLSNARMTHYQALLLDTDRVQFGPIVALNPATLLPLPEEGLQHDCLDILAEAHGTRPDLTDQPLPDADHTWYTDGSSFLQEGQRKAGAAVTTETEVVWAKALPAGTSAQRAELIALTQALKMAEGKKLNVYTDSRYAFATAHIHGEIYRRRGWLTSEGKEIKNKDEILALLKALFLPKRLSIIHCPGHQKGNRAEARGNRMADQAAREVATRETPETSTLLAGKRTADGSEFEKRTADGSEFESPKKKAKVE

SEQ ID NO: 2472 - protein, 2096 aa, synthetic construct
MPAAKRVKLDGGDKKYSIGLDIGTNSVGWAVITDEYKVPSKKFKVLGNTDRHSIKKNLIGALLFDSGETAEATRLKRTARRRYTRRKNRICYLQEIFSNEMAKVDDSFFHRLEESFLVEEDKKHERHPIFGNIVDEVAYHEKYPTIYHLRKKLVDSTDKADLRLIYLALAHMIKFRGHFLIEGDLNPDNSDVDKLFIQLVQTYNQLFEENPINASGVDAKAILSARLSKSRRLENLIAQLPGEKKNGLFGNLIALSLGLTPNFKSNFDLAEDAKLQLSKDTYDDDLDNLLAQIGDQYADLFLAAKNLSDAILLSDILRVNTEITKAPLSASMIKRYDEHHQDLTLLKALVRQQLPEKYKEIFFDQSKNGYAGYIDGGASQEEFYKFIKPILEKMDGTEELLVKLNREDLLRKQRTFDNGSIPHQIHLGELHAILRRQEDFYPFLKDNREKIEKILTFRIPYYVGPLARGNSRFAWMTRKSEETITPWNFEEVVDKGASAQSFIERMTNFDKNLPNEKVLPKHSLLYEYFTVYNELTKVKYVTEGMRKPAFLSGEQKKAIVDLLFKTNRKVTVKQLKEDYFKKIECFDSVEISGVEDRFNASLGTYHDLLKIIKDKDFLDNEENEDILEDIVLTLTLFEDREMIEERLKTYAHLFDDKVMKQLKRRRYTGWGRLSRKLINGIRDKQSGKTILDFLKSDGFANRNFMQLIHDDSLTFKEDIQKAQVSGQGDSLHEHIANLAGSPAIKKGILQTVKVVDELVKVMGRHKPENIVIEMARENQTTQKGQKNSRERMKRIEEGIKELGSQILKEHPVENTQLQNEKLYLYYLQNGRDMYVDQELDINRLSDYDVDHIVPQSFLKDDSIDNKVLTRSDKARGKSDNVPSEEVVKKMKNYWRQLLNAKLITQRKFDNLTKAERGGLSELDKAGFIKRQLVETRQITKHVAQILDSRMNTKYDENDKLIREVKVITLKSKLVSDFRKDFQFYKVREINNYHHAHDAYLNAVVGTALIKKYPKLESEFVYGDYKVYDVRKMIAKSEQEIGKATAKYFFYSNIMNFFKTEITLANGEIRKRPLIETNGETGEIVWDKGRDFATVRKVLSMPQVNIVKKTEVQTGGFSKESILPKRNSDKLIARKKDWDPKKYGGFDSPTVAYSVLVVAKVEKGKSKKLKSVKELLGITIMERSSFEKNPIDFLEAKGYKEVKKDLIIKLPKYSLFELENGRKRMLASAGELQKGNELALPSKYVNFLYLASHYEKLKGSPEDNEQKQLFVEQHKHYLDEIIEQISEFSKRVILADANLDKVLSAYNKHRDKPIREQAENIIHLFTLTNLGAPAAFKYFDTTIDRKRYTSTKEVLDATLIHQSITGLYETRIDLSQLGGDGGGGGPAPEAAAKGGTLNIEDEYRLHETSKGPDVPLGSTWLSDFPQAWAETGGMGLAVRQAPLIIPLKATSTPVSIKQYPMSQEARLGIKPHIQRLLDQGILVPCQSPWNTPLLPVKKPGTNDYRPVQDLREVNKRVEDIHPTVPNPYNLLSGLPPSHQWYTVLDLKDAFFCLRLHPTSQSLFAFEWRDPEMGISGQLTWTRLPQGFKNSPTLFNEALHRDLADFRIQHPDLILLQYVDDLLLAATSELDCQQGTRALLQTLGDLGYRASAKKAQICQKQVKYLGYLLKEGQRWLTEARKETVMGQPTPKTPRQLREFLGTAGFCRLWIPGFAEMAAPLYPLTKPGTLFEWGPDQQKAYQEIKQALLTAPALGLPDLTKPFELFVDEKQGYAKGVLTQKLGPWRRPVAYLSKKLDPVAAGWPPCLRMVAAIAVLTKDAGKLTMGQPLVILAPHAVEALVKQPPDRWLSNARMTHYQALLLDTDRVQFGPIVALNPATLLPLPEEGLQHDCLDILAEAHGTRPDLTDQPLPDADHTWYTDGSSFLQEGQRKAGAAVTTETEVVWAKALPAGTSAQRAELIALTQALKMAEGKKLNVYTDSRYAFATAHIHGEIYRRRGWLTSEGKEIKNKDEILALLKALFLPKRLSIIHCPGHQKGNRAEARGNRMADQAAREVATRETPETSTLLAGKRTADGSEFEKRTADGSEFESPKKKAKVE

SEQ ID NO: 2473 - protein, 2096 aa, synthetic construct
MPAAKRVKLDGGDKKYSIGLDIGTNSVGWAVITDEYKVPSKKFKVLGNTDRHSIKKNLIGALLFDSGETAEATRLKRTARRRYTRRKNRICYLQEIFSNEMAKVDDSFFHRLEESFLVEEDKKHERHPIFGNIVDEVAYHEKYPTIYHLRKKLVDSTDKADLRLIYLALAHMIKFRGHFLIEGDLNPDNSDVDKLFIQLVQTYNQLFEENPINASGVDAKAILSARLSKSRRLENLIAQLPGEKKNGLFGNLIALSLGLTPNFKSNFDLAEDAKLQLSKDTYDDDLDNLLAQIGDQYADLFLAAKNLSDAILLSDILRVNTEITKAPLSASMIKRYDEHHQDLTLLKALVRQQLPEKYKEIFFDQSKNGYAGYIDGGASQEEFYKFIKPILEKMDGTEELLVKLNREDLLRKQRTFDNGSIPHQIHLGELHAILRRQEDFYPFLKDNREKIEKILTFRIPYYVGPLARGNSRFAWMTRKSEETITPWNFEEVVDKGASAQSFIERMTNFDKNLPNEKVLPKHSLLYEYFTVYNELTKVKYVTEGMRKPAFLSGEQKKAIVDLLFKTNRKVTVKQLKEDYFKKIECFDSVEISGVEDRFNASLGTYHDLLKIIKDKDFLDNEENEDILEDIVLTLTLFEDREMIEERLKTYAHLFDDKVMKQLKRRRYTGWGRLSRKLINGIRDKQSGKTILDFLKSDGFANRNFMQLIHDDSLTFKEDIQKAQVSGQGDSLHEHIANLAGSPAIKKGILQTVKVVDELVKVMGRHKPENIVIEMARENQTTQKGQKNSRERMKRIEEGIKELGSQILKEHPVENTQLQNEKLYLYYLQNGRDMYVDQELDINRLSDYDVDHIVPQSFLKDDSIDNKVLTRSDKARGKSDNVPSEEVVKKMKNYWRQLLNAKLITQRKFDNLTKAERGGLSELDKAGFIKRQLVETRQITKHVAQILDSRMNTKYDENDKLIREVKVITLKSKLVSDFRKDFQFYKVREINNYHHAHDAYLNAVVGTALIKKYPKLESEFVYGDYKVYDVRKMIAKSEQEIGKATAKYFFYSNIMNFFKTEITLANGEIRKRPLIETNGETGEIVWDKGRDFATVRKVLSMPQVNIVKKTEVQTGGFSKESILPKRNSDKLIARKKDWDPKKYGGFDSPTVAYSVLVVAKVEKGKSKKLKSVKELLGITIMERSSFEKNPIDFLEAKGYKEVKKDLIIKLPKYSLFELENGRKRMLASAGELQKGNELALPSKYVNFLYLASHYEKLKGSPEDNEQKQLFVEQHKHYLDEIIEQISEFSKRVILADANLDKVLSAYNKHRDKPIREQAENIIHLFTLTNLGAPAAFKYFDTTIDRKRYTSTKEVLDATLIHQSITGLYETRIDLSQLGGDGGEAAAKPAPGSSGGTLNIEDEYRLHETSKGPDVPLGSTWLSDFPQAWAETGGMGLAVRQAPLIIPLKATSTPVSIKQYPMSQEARLGIKPHIQRLLDQGILVPCQSPWNTPLLPVKKPGTNDYRPVQDLREVNKRVEDIHPTVPNPYNLLSGLPPSHQWYTVLDLKDAFFCLRLHPTSQSLFAFEWRDPEMGISGQLTWTRLPQGFKNSPTLFNEALHRDLADFRIQHPDLILLQYVDDLLLAATSELDCQQGTRALLQTLGDLGYRASAKKAQICQKQVKYLGYLLKEGQRWLTEARKETVMGQPTPKTPRQLREFLGTAGFCRLWIPGFAEMAAPLYPLTKPGTLFEWGPDQQKAYQEIKQALLTAPALGLPDLTKPFELFVDEKQGYAKGVLTQKLGPWRRPVAYLSKKLDPVAAGWPPCLRMVAAIAVLTKDAGKLTMGQPLVILAPHAVEALVKQPPDRWLSNARMTHYQALLLDTDRVQFGPIVALNPATLLPLPEEGLQHDCLDILAEAHGTRPDLTDQPLPDADHTWYTDGSSFLQEGQRKAGAAVTTETEVVWAKALPAGTSAQRAELIALTQALKMAEGKKLNVYTDSRYAFATAHIHGEIYRRRGWLTSEGKEIKNKDEILALLKALFLPKRLSIIHCPGHQKGNRAEARGNRMADQAAREVATRETPETSTLLAGKRTADGSEFEKRTADGSEFESPKKKAKVE

SEQ ID NO: 2474 - protein, 2096 aa, synthetic construct
MPAAKRVKLDGGDKKYSIGLDIGTNSVGWAVITDEYKVPSKKFKVLGNTDRHSIKKNLIGALLFDSGETAEATRLKRTARRRYTRRKNRICYLQEIFSNEMAKVDDSFFHRLEESFLVEEDKKHERHPIFGNIVDEVAYHEKYPTIYHLRKKLVDSTDKADLRLIYLALAHMIKFRGHFLIEGDLNPDNSDVDKLFIQLVQTYNQLFEENPINASGVDAKAILSARLSKSRRLENLIAQLPGEKKNGLFGNLIALSLGLTPNFKSNFDLAEDAKLQLSKDTYDDDLDNLLAQIGDQYADLFLAAKNLSDAILLSDILRVNTEITKAPLSASMIKRYDEHHQDLTLLKALVRQQLPEKYKEIFFDQSKNGYAGYIDGGASQEEFYKFIKPILEKMDGTEELLVKLNREDLLRKQRTFDNGSIPHQIHLGELHAILRRQEDFYPFLKDNREKIEKILTFRIPYYVGPLARGNSRFAWMTRKSEETITPWNFEEVVDKGASAQSFIERMTNFDKNLPNEKVLPKHSLLYEYFTVYNELTKVKYVTEGMRKPAFLSGEQKKAIVDLLFKTNRKVTVKQLKEDYFKKIECFDSVEISGVEDRFNASLGTYHDLLKIIKDKDFLDNEENEDILEDIVLTLTLFEDREMIEERLKTYAHLFDDKVMKQLKRRRYTGWGRLSRKLINGIRDKQSGKTILDFLKSDGFANRNFMQLIHDDSLTFKEDIQKAQVSGQGDSLHEHIANLAGSPAIKKGILQTVKVVDELVKVMGRHKPENIVIEMARENQTTQKGQKNSRERMKRIEEGIKELGSQILKEHPVENTQLQNEKLYLYYLQNGRDMYVDQELDINRLSDYDVDHIVPQSFLKDDSIDNKVLTRSDKARGKSDNVPSEEVVKKMKNYWRQLLNAKLITQRKFDNLTKAERGGLSELDKAGFIKRQLVETRQITKHVAQILDSRMNTKYDENDKLIREVKVITLKSKLVSDFRKDFQFYKVREINNYHHAHDAYLNAVVGTALIKKYPKLESEFVYGDYKVYDVRKMIAKSEQEIGKATAKYFFYSNIMNFFKTEITLANGEIRKRPLIETNGETGEIVWDKGRDFATVRKVLSMPQVNIVKKTEVQTGGFSKESILPKRNSDKLIARKKDWDPKKYGGFDSPTVAYSVLVVAKVEKGKSKKLKSVKELLGITIMERSSFEKNPIDFLEAKGYKEVKKDLIIKLPKYSLFELENGRKRMLASAGELQKGNELALPSKYVNFLYLASHYEKLKGSPEDNEQKQLFVEQHKHYLDEIIEQISEFSKRVILADANLDKVLSAYNKHRDKPIREQAENIIHLFTLTNLGAPAAFKYFDTTIDRKRYTSTKEVLDATLIHQSITGLYETRIDLSQLGGDGGEAAAKGGSPAPGGTLNIEDEYRLHETSKGPDVPLGSTWLSDFPQAWAETGGMGLAVRQAPLIIPLKATSTPVSIKQYPMSQEARLGIKPHIQRLLDQGILVPCQSPWNTPLLPVKKPGTNDYRPVQDLREVNKRVEDIHPTVPNPYNLLSGLPPSHQWYTVLDLKDAFFCLRLHPTSQSLFAFEWRDPEMGISGQLTWTRLPQGFKNSPTLFNEALHRDLADFRIQHPDLILLQYVDDLLLAATSELDCQQGTRALLQTLGDLGYRASAKKAQICQKQVKYLGYLLKEGQRWLTEARKETVMGQPTPKTPRQLREFLGTAGFCRLWIPGFAEMAAPLYPLTKPGTLFEWGPDQQKAYQEIKQALLTAPALGLPDLTKPFELFVDEKQGYAKGVLTQKLGPWRRPVAYLSKKLDPVAAGWPPCLRMVAAIAVLTKDAGKLTMGQPLVILAPHAVEALVKQPPDRWLSNARMTHYQALLLDTDRVQFGPIVALNPATLLPLPEEGLQHDCLDILAEAHGTRPDLTDQPLPDADHTWYTDGSSFLQEGQRKAGAAVTTETEVVWAKALPAGTSAQRAELIALTQALKMAEGKKLNVYTDSRYAFATAHIHGEIYRRRGWLTSEGKEIKNKDEILALLKALFLPKRLSIIHCPGHQKGNRAEARGNRMADQAAREVATRETPETSTLLAGKRTADGSEFEKRTADGSEFESPKKKAKVE

SEQ ID NO: 2475 - protein, 2093 aa, synthetic construct
MPAAKRVKLDGGDKKYSIGLDIGTNSVGWAVITDEYKVPSKKFKVLGNTDRHSIKKNLIGALLFDSGETAEATRLKRTARRRYTRRKNRICYLQEIFSNEMAKVDDSFFHRLEESFLVEEDKKHERHPIFGNIVDEVAYHEKYPTIYHLRKKLVDSTDKADLRLIYLALAHMIKFRGHFLIEGDLNPDNSDVDKLFIQLVQTYNQLFEENPINASGVDAKAILSARLSKSRRLENLIAQLPGEKKNGLFGNLIALSLGLTPNFKSNFDLAEDAKLQLSKDTYDDDLDNLLAQIGDQYADLFLAAKNLSDAILLSDILRVNTEITKAPLSASMIKRYDEHHQDLTLLKALVRQQLPEKYKEIFFDQSKNGYAGYIDGGASQEEFYKFIKPILEKMDGTEELLVKLNREDLLRKQRTFDNGSIPHQIHLGELHAILRRQEDFYPFLKDNREKIEKILTFRIPYYVGPLARGNSRFAWMTRKSEETITPWNFEEVVDKGASAQSFIERMTNFDKNLPNEKVLPKHSLLYEYFTVYNELTKVKYVTEGMRKPAFLSGEQKKAIVDLLFKTNRKVTVKQLKEDYFKKIECFDSVEISGVEDRFNASLGTYHDLLKIIKDKDFLDNEENEDILEDIVLTLTLFEDREMIEERLKTYAHLFDDKVMKQLKRRRYTGWGRLSRKLINGIRDKQSGKTILDFLKSDGFANRNFMQLIHDDSLTFKEDIQKAQVSGQGDSLHEHIANLAGSPAIKKGILQTVKVVDELVKVMGRHKPENIVIEMARENQTTQKGQKNSRERMKRIEEGIKELGSQILKEHPVENTQLQNEKLYLYYLQNGRDMYVDQELDINRLSDYDVDHIVPQSFLKDDSIDNKVLTRSDKARGKSDNVPSEEVVKKMKNYWRQLLNAKLITQRKFDNLTKAERGGLSELDKAGFIKRQLVETRQITKHVAQILDSRMNTKYDENDKLIREVKVITLKSKLVSDFRKDFQFYKVREINNYHHAHDAYLNAVVGTALIKKYPKLESEFVYGDYKVYDVRKMIAKSEQEIGKATAKYFFYSNIMNFFKTEITLANGEIRKRPLIETNGETGEIVWDKGRDFATVRKVLSMPQVNIVKKTEVQTGGFSKESILPKRNSDKLIARKKDWDPKKYGGFDSPTVAYSVLVVAKVEKGKSKKLKSVKELLGITIMERSSFEKNPIDFLEAKGYKEVKKDLIIKLPKYSLFELENGRKRMLASAGELQKGNELALPSKYVNFLYLASHYEKLKGSPEDNEQKQLFVEQHKHYLDEIIEQISEFSKRVILADANLDKVLSAYNKHRDKPIREQAENIIHLFTLTNLGAPAAFKYFDTTIDRKRYTSTKEVLDATLIHQSITGLYETRIDLSQLGGDGGGSSEAAAKGGTLNIEDEYRLHETSKGPDVPLGSTWLSDFPQAWAETGGMGLAVRQAPLIIPLKATSTPVSIKQYPMSQEARLGIKPHIQRLLDQGILVPCQSPWNTPLLPVKKPGTNDYRPVQDLREVNKRVEDIHPTVPNPYNLLSGLPPSHQWYTVLDLKDAFFCLRLHPTSQSLFAFEWRDPEMGISGQLTWTRLPQGFKNSPTLFNEALHRDLADFRIQHPDLILLQYVDDLLLAATSELDCQQGTRALLQTLGDLGYRASAKKAQICQKQVKYLGYLLKEGQRWLTEARKETVMGQPTPKTPRQLREFLGTAGFCRLWIPGFAEMAAPLYPLTKPGTLFEWGPDQQKAYQEIKQALLTAPALGLPDLTKPFELFVDEKQGYAKGVLTQKLGPWRRPVAYLSKKLDPVAAGWPPCLRMVAAIAVLTKDAGKLTMGQPLVILAPHAVEALVKQPPDRWLSNARMTHYQALLLDTDRVQFGPIVALNPATLLPLPEEGLQHDCLDILAEAHGTRPDLTDQPLPDADHTWYTDGSSFLQEGQRKAGAAVTTETEVVWAKALPAGTSAQRAELIALTQALKMAEGKKLNVYTDSRYAFATAHIHGEIYRRRGWLTSEGKEIKNKDEILALLKALFLPKRLSIIHCPGHQKGNRAEARGNRMADQAAREVATRETPETSTLLAGKRTADGSEFEKRTADGSEFESPKKKAKVE

SEQ ID NO: 2476 - protein, 2094 aa, synthetic construct
MPAAKRVKLDGGDKKYSIGLDIGTNSVGWAVITDEYKVPSKKFKVLGNTDRHSIKKNLIGALLFDSGETAEATRLKRTARRRYTRRKNRICYLQEIFSNEMAKVDDSFFHRLEESFLVEEDKKHERHPIFGNIVDEVAYHEKYPTIYHLRKKLVDSTDKADLRLIYLALAHMIKFRGHFLIEGDLNPDNSDVDKLFIQLVQTYNQLFEENPINASGVDAKAILSARLSKSRRLENLIAQLPGEKKNGLFGNLIALSLGLTPNFKSNFDLAEDAKLQLSKDTYDDDLDNLLAQIGDQYADLFLAAKNLSDAILLSDILRVNTEITKAPLSASMIKRYDEHHQDLTLLKALVRQQLPEKYKEIFFDQSKNGYAGYIDGGASQEEFYKFIKPILEKMDGTEELLVKLNREDLLRKQRTFDNGSIPHQIHLGELHAILRRQEDFYPFLKDNREKIEKILTFRIPYYVGPLARGNSRFAWMTRKSEETITPWNFEEVVDKGASAQSFIERMTNFDKNLPNEKVLPKHSLLYEYFTVYNELTKVKYVTEGMRKPAFLSGEQKKAIVDLLFKTNRKVTVKQLKEDYFKKIECFDSVEISGVEDRFNASLGTYHDLLKIIKDKDFLDNEENEDILEDIVLTLTLFEDREMIEERLKTYAHLFDDKVMKQLKRRRYTGWGRLSRKLINGIRDKQSGKTILDFLKSDGFANRNFMQLIHDDSLTFKEDIQKAQVSGQGDSLHEHIANLAGSPAIKKGILQTVKVVDELVKVMGRHKPENIVIEMARENQTTQKGQKNSRERMKRIEEGIKELGSQILKEHPVENTQLQNEKLYLYYLQNGRDMYVDQELDINRLSDYDVDHIVPQSFLKDDSIDNKVLTRSDKARGKSDNVPSEEVVKKMKNYWRQLLNAKLITQRKFDNLTKAERGGLSELDKAGFIKRQLVETRQITKHVAQILDSRMNTKYDENDKLIREVKVITLKSKLVSDFRKDFQFYKVREINNYHHAHDAYLNAVVGTALIKKYPKLESEFVYGDYKVYDVRKMIAKSEQEIGKATAKYFFYSNIMNFFKTEITLANGEIRKRPLIETNGETGEIVWDKGRDFATVRKVLSMPQVNIVKKTEVQTGGFSKESILPKRNSDKLIARKKDWDPKKYGGFDSPTVAYSVLVVAKVEKGKSKKLKSVKELLGITIMERSSFEKNPIDFLEAKGYKEVKKDLIIKLPKYSLFELENGRKRMLASAGELQKGNELALPSKYVNFLYLASHYEKLKGSPEDNEQKQLFVEQHKHYLDEIIEQISEFSKRVILADANLDKVLSAYNKHRDKPIREQAENIIHLFTLTNLGAPAAFKYFDTTIDRKRYTSTKEVLDATLIHQSITGLYETRIDLSQLGGDGGGGSPAPGGGGGTLNIEDEYRLHETSKGPDVPLGSTWLSDFPQAWAETGGMGLAVRQAPLIIPLKATSTPVSIKQYPMSQEARLGIKPHIQRLLDQGILVPCQSPWNTPLLPVKKPGTNDYRPVQDLREVNKRVEDIHPTVPNPYNLLSGLPPSHQWYTVLDLKDAFFCLRLHPTSQSLFAFEWRDPEMGISGQLTWTRLPQGFKNSPTLFNEALHRDLADFRIQHPDLILLQYVDDLLLAATSELDCQQGTRALLQTLGDLGYRASAKKAQICQKQVKYLGYLLKEGQRWLTEARKETVMGQPTPKTPRQLREFLGTAGFCRLWIPGFAEMAAPLYPLTKPGTLFEWGPDQQKAYQEIKQALLTAPALGLPDLTKPFELFVDEKQGYAKGVLTQKLGPWRRPVAYLSKKLDPVAAGWPPCLRMVAAIAVLTKDAGKLTMGQPLVILAPHAVEALVKQPPDRWLSNARMTHYQALLLDTDRVQFGPIVALNPATLLPLPEEGLQHDCLDILAEAHGTRPDLTDQPLPDADHTWYTDGSSFLQEGQRKAGAAVTTETEVVWAKALPAGTSAQRAELIALTQALKMAEGKKLNVYTDSRYAFATAHIHGEIYRRRGWLTSEGKEIKNKDEILALLKALFLPKRLSIIHCPGHQKGNRAEARGNRMADQAAREVATRETPETSTLLAGKRTADGSEFEKRTADGSEFESPKKKAKVE

SEQ ID NO: 2477 - protein, 2091 aa, synthetic construct
MPAAKRVKLDGGDKKYSIGLDIGTNSVGWAVITDEYKVPSKKFKVLGNTDRHSIKKNLIGALLFDSGETAEATRLKRTARRRYTRRKNRICYLQEIFSNEMAKVDDSFFHRLEESFLVEEDKKHERHPIFGNIVDEVAYHEKYPTIYHLRKKLVDSTDKADLRLIYLALAHMIKFRGHFLIEGDLNPDNSDVDKLFIQLVQTYNQLFEENPINASGVDAKAILSARLSKSRRLENLIAQLPGEKKNGLFGNLIALSLGLTPNFKSNFDLAEDAKLQLSKDTYDDDLDNLLAQIGDQYADLFLAAKNLSDAILLSDILRVNTEITKAPLSASMIKRYDEHHQDLTLLKALVRQQLPEKYKEIFFDQSKNGYAGYIDGGASQEEFYKFIKPILEKMDGTEELLVKLNREDLLRKQRTFDNGSIPHQIHLGELHAILRRQEDFYPFLKDNREKIEKILTFRIPYYVGPLARGNSRFAWMTRKSEETITPWNFEEVVDKGASAQSFIERMTNFDKNLPNEKVLPKHSLLYEYFTVYNELTKVKYVTEGMRKPAFLSGEQKKAIVDLLFKTNRKVTVKQLKEDYFKKIECFDSVEISGVEDRFNASLGTYHDLLKIIKDKDFLDNEENEDILEDIVLTLTLFEDREMIEERLKTYAHLFDDKVMKQLKRRRYTGWGRLSRKLINGIRDKQSGKTILDFLKSDGFANRNFMQLIHDDSLTFKEDIQKAQVSGQGDSLHEHIANLAGSPAIKKGILQTVKVVDELVKVMGRHKPENIVIEMARENQTTQKGQKNSRERMKRIEEGIKELGSQILKEHPVENTQLQNEKLYLYYLQNGRDMYVDQELDINRLSDYDVDHIVPQSFLKDDSIDNKVLTRSDKARGKSDNVPSEEVVKKMKNYWRQLLNAKLITQRKFDNLTKAERGGLSELDKAGFIKRQLVETRQITKHVAQILDSRMNTKYDENDKLIREVKVITLKSKLVSDFRKDFQFYKVREINNYHHAHDAYLNAVVGTALIKKYPKLESEFVYGDYKVYDVRKMIAKSEQEIGKATAKYFFYSNIMNFFKTEITLANGEIRKRPLIETNGETGEIVWDKGRDFATVRKVLSMPQVNIVKKTEVQTGGFSKESILPKRNSDKLIARKKDWDPKKYGGFDSPTVAYSVLVVAKVEKGKSKKLKSVKELLGITIMERSSFEKNPIDFLEAKGYKEVKKDLIIKLPKYSLFELENGRKRMLASAGELQKGNELALPSKYVNFLYLASHYEKLKGSPEDNEQKQLFVEQHKHYLDEIIEQISEFSKRVILADANLDKVLSAYNKHRDKPIREQAENIIHLFTLTNLGAPAAFKYFDTTIDRKRYTSTKEVLDATLIHQSITGLYETRIDLSQLGGDGGGSSPAPGGTLNIEDEYRLHETSKGPDVPLGSTWLSDFPQAWAETGGMGLAVRQAPLIIPLKATSTPVSIKQYPMSQEARLGIKPHIQRLLDQGILVPCQSPWNTPLLPVKKPGTNDYRPVQDLREVNKRVEDIHPTVPNPYNLLSGLPPSHQWYTVLDLKDAFFCLRLHPTSQSLFAFEWRDPEMGISGQLTWTRLPQGFKNSPTLFNEALHRDLADFRIQHPDLILLQYVDDLLLAATSELDCQQGTRALLQTLGDLGYRASAKKAQICQKQVKYLGYLLKEGQRWLTEARKETVMGQPTPKTPRQLREFLGTAGFCRLWIPGFAEMAAPLYPLTKPGTLFEWGPDQQKAYQEIKQALLTAPALGLPDLTKPFELFVDEKQGYAKGVLTQKLGPWRRPVAYLSKKLDPVAAGWPPCLRMVAAIAVLTKDAGKLTMGQPLVILAPHAVEALVKQPPDRWLSNARMTHYQALLLDTDRVQFGPIVALNPATLLPLPEEGLQHDCLDILAEAHGTRPDLTDQPLPDADHTWYTDGSSFLQEGQRKAGAAVTTETEVVWAKALPAGTSAQRAELIALTQALKMAEGKKLNVYTDSRYAFATAHIHGEIYRRRGWLTSEGKEIKNKDEILALLKALFLPKRLSIIHCPGHQKGNRAEARGNRMADQAAREVATRETPETSTLLAGKRTADGSEFEKRTADGSEFESPKKKAKVE

SEQ ID NO: 2478 - protein, 2091 aa, synthetic construct
MPAAKRVKLDGGDKKYSIGLDIGTNSVGWAVITDEYKVPSKKFKVLGNTDRHSIKKNLIGALLFDSGETAEATRLKRTARRRYTRRKNRICYLQEIFSNEMAKVDDSFFHRLEESFLVEEDKKHERHPIFGNIVDEVAYHEKYPTIYHLRKKLVDSTDKADLRLIYLALAHMIKFRGHFLIEGDLNPDNSDVDKLFIQLVQTYNQLFEENPINASGVDAKAILSARLSKSRRLENLIAQLPGEKKNGLFGNLIALSLGLTPNFKSNFDLAEDAKLQLSKDTYDDDLDNLLAQIGDQYADLFLAAKNLSDAILLSDILRVNTEITKAPLSASMIKRYDEHHQDLTLLKALVRQQLPEKYKEIFFDQSKNGYAGYIDGGASQEEFYKFIKPILEKMDGTEELLVKLNREDLLRKQRTFDNGSIPHQIHLGELHAILRRQEDFYPFLKDNREKIEKILTFRIPYYVGPLARGNSRFAWMTRKSEETITPWNFEEVVDKGASAQSFIERMTNFDKNLPNEKVLPKHSLLYEYFTVYNELTKVKYVTEGMRKPAFLSGEQKKAIVDLLFKTNRKVTVKQLKEDYFKKIECFDSVEISGVEDRFNASLGTYHDLLKIIKDKDFLDNEENEDILEDIVLTLTLFEDREMIEERLKTYAHLFDDKVMKQLKRRRYTGWGRLSRKLINGIRDKQSGKTILDFLKSDGFANRNFMQLIHDDSLTFKEDIQKAQVSGQGDSLHEHIANLAGSPAIKKGILQTVKVVDELVKVMGRHKPENIVIEMARENQTTQKGQKNSRERMKRIEEGIKELGSQILKEHPVENTQLQNEKLYLYYLQNGRDMYVDQELDINRLSDYDVDHIVPQSFLKDDSIDNKVLTRSDKARGKSDNVPSEEVVKKMKNYWRQLLNAKLITQRKFDNLTKAERGGLSELDKAGFIKRQLVETRQITKHVAQILDSRMNTKYDENDKLIREVKVITLKSKLVSDFRKDFQFYKVREINNYHHAHDAYLNAVVGTALIKKYPKLESEFVYGDYKVYDVRKMIAKSEQEIGKATAKYFFYSNIMNFFKTEITLANGEIRKRPLIETNGETGEIVWDKGRDFATVRKVLSMPQVNIVKKTEVQTGGFSKESILPKRNSDKLIARKKDWDPKKYGGFDSPTVAYSVLVVAKVEKGKSKKLKSVKELLGITIMERSSFEKNPIDFLEAKGYKEVKKDLIIKLPKYSLFELENGRKRMLASAGELQKGNELALPSKYVNFLYLASHYEKLKGSPEDNEQKQLFVEQHKHYLDEIIEQISEFSKRVILADANLDKVLSAYNKHRDKPIREQAENIIHLFTLTNLGAPAAFKYFDTTIDRKRYTSTKEVLDATLIHQSITGLYETRIDLSQLGGDGGGGSGGGGGTLNIEDEYRLHETSKGPDVPLGSTWLSDFPQAWAETGGMGLAVRQAPLIIPLKATSTPVSIKQYPMSQEARLGIKPHIQRLLDQGILVPCQSPWNTPLLPVKKPGTNDYRPVQDLREVNKRVEDIHPTVPNPYNLLSGLPPSHQWYTVLDLKDAFFCLRLHPTSQSLFAFEWRDPEMGISGQLTWTRLPQGFKNSPTLFNEALHRDLADFRIQHPDLILLQYVDDLLLAATSELDCQQGTRALLQTLGDLGYRASAKKAQICQKQVKYLGYLLKEGQRWLTEARKETVMGQPTPKTPRQLREFLGTAGFCRLWIPGFAEMAAPLYPLTKPGTLFEWGPDQQKAYQEIKQALLTAPALGLPDLTKPFELFVDEKQGYAKGVLTQKLGPWRRPVAYLSKKLDPVAAGWPPCLRMVAAIAVLTKDAGKLTMGQPLVILAPHAVEALVKQPPDRWLSNARMTHYQALLLDTDRVQFGPIVALNPATLLPLPEEGLQHDCLDILAEAHGTRPDLTDQPLPDADHTWYTDGSSFLQEGQRKAGAAVTTETEVVWAKALPAGTSAQRAELIALTQALKMAEGKKLNVYTDSRYAFATAHIHGEIYRRRGWLTSEGKEIKNKDEILALLKALFLPKRLSIIHCPGHQKGNRAEARGNRMADQAAREVATRETPETSTLLAGKRTADGSEFEKRTADGSEFESPKKKAKVE

SEQ ID NO: 2479 - protein, 2094 aa, synthetic construct
MPAAKRVKLDGGDKKYSIGLDIGTNSVGWAVITDEYKVPSKKFKVLGNTDRHSIKKNLIGALLFDSGETAEATRLKRTARRRYTRRKNRICYLQEIFSNEMAKVDDSFFHRLEESFLVEEDKKHERHPIFGNIVDEVAYHEKYPTIYHLRKKLVDSTDKADLRLIYLALAHMIKFRGHFLIEGDLNPDNSDVDKLFIQLVQTYNQLFEENPINASGVDAKAILSARLSKSRRLENLIAQLPGEKKNGLFGNLIALSLGLTPNFKSNFDLAEDAKLQLSKDTYDDDLDNLLAQIGDQYADLFLAAKNLSDAILLSDILRVNTEITKAPLSASMIKRYDEHHQDLTLLKALVRQQLPEKYKEIFFDQSKNGYAGYIDGGASQEEFYKFIKPILEKMDGTEELLVKLNREDLLRKQRTFDNGSIPHQIHLGELHAILRRQEDFYPFLKDNREKIEKILTFRIPYYVGPLARGNSRFAWMTRKSEETITPWNFEEVVDKGASAQSFIERMTNFDKNLPNEKVLPKHSLLYEYFTVYNELTKVKYVTEGMRKPAFLSGEQKKAIVDLLFKTNRKVTVKQLKEDYFKKIECFDSVEISGVEDRFNASLGTYHDLLKIIKDKDFLDNEENEDILEDIVLTLTLFEDREMIEERLKTYAHLFDDKVMKQLKRRRYTGWGRLSRKLINGIRDKQSGKTILDFLKSDGFANRNFMQLIHDDSLTFKEDIQKAQVSGQGDSLHEHIANLAGSPAIKKGILQTVKVVDELVKVMGRHKPENIVIEMARENQTTQKGQKNSRERMKRIEEGIKELGSQILKEHPVENTQLQNEKLYLYYLQNGRDMYVDQELDINRLSDYDVDHIVPQSFLKDDSIDNKVLTRSDKARGKSDNVPSEEVVKKMKNYWRQLLNAKLITQRKFDNLTKAERGGLSELDKAGFIKRQLVETRQITKHVAQILDSRMNTKYDENDKLIREVKVITLKSKLVSDFRKDFQFYKVREINNYHHAHDAYLNAVVGTALIKKYPKLESEFVYGDYKVYDVRKMIAKSEQEIGKATAKYFFYSNIMNFFKTEITLANGEIRKRPLIETNGETGEIVWDKGRDFATVRKVLSMPQVNIVKKTEVQTGGFSKESILPKRNSDKLIARKKDWDPKKYGGFDSPTVAYSVLVVAKVEKGKSKKLKSVKELLGITIMERSSFEKNPIDFLEAKGYKEVKKDLIIKLPKYSLFELENGRKRMLASAGELQKGNELALPSKYVNFLYLASHYEKLKGSPEDNEQKQLFVEQHKHYLDEIIEQISEFSKRVILADANLDKVLSAYNKHRDKPIREQAENIIHLFTLTNLGAPAAFKYFDTTIDRKRYTSTKEVLDATLIHQSITGLYETRIDLSQLGGDGGGGSGGGGSSGGTLNIEDEYRLHETSKGPDVPLGSTWLSDFPQAWAETGGMGLAVRQAPLIIPLKATSTPVSIKQYPMSQEARLGIKPHIQRLLDQGILVPCQSPWNTPLLPVKKPGTNDYRPVQDLREVNKRVEDIHPTVPNPYNLLSGLPPSHQWYTVLDLKDAFFCLRLHPTSQSLFAFEWRDPEMGISGQLTWTRLPQGFKNSPTLFNEALHRDLADFRIQHPDLILLQYVDDLLLAATSELDCQQGTRALLQTLGDLGYRASAKKAQICQKQVKYLGYLLKEGQRWLTEARKETVMGQPTPKTPRQLREFLGTAGFCRLWIPGFAEMAAPLYPLTKPGTLFEWGPDQQKAYQEIKQALLTAPALGLPDLTKPFELFVDEKQGYAKGVLTQKLGPWRRPVAYLSKKLDPVAAGWPPCLRMVAAIAVLTKDAGKLTMGQPLVILAPHAVEALVKQPPDRWLSNARMTHYQALLLDTDRVQFGPIVALNPATLLPLPEEGLQHDCLDILAEAHGTRPDLTDQPLPDADHTWYTDGSSFLQEGQRKAGAAVTTETEVVWAKALPAGTSAQRAELIALTQALKMAEGKKLNVYTDSRYAFATAHIHGEIYRRRGWLTSEGKEIKNKDEILALLKALFLPKRLSIIHCPGHQKGNRAEARGNRMADQAAREVATRETPETSTLLAGKRTADGSEFEKRTADGSEFESPKKKAKVE

SEQ ID NO: 2480 - protein, 2096 aa, synthetic construct
MPAAKRVKLDGGDKKYSIGLDIGTNSVGWAVITDEYKVPSKKFKVLGNTDRHSIKKNLIGALLFDSGETAEATRLKRTARRRYTRRKNRICYLQEIFSNEMAKVDDSFFHRLEESFLVEEDKKHERHPIFGNIVDEVAYHEKYPTIYHLRKKLVDSTDKADLRLIYLALAHMIKFRGHFLIEGDLNPDNSDVDKLFIQLVQTYNQLFEENPINASGVDAKAILSARLSKSRRLENLIAQLPGEKKNGLFGNLIALSLGLTPNFKSNFDLAEDAKLQLSKDTYDDDLDNLLAQIGDQYADLFLAAKNLSDAILLSDILRVNTEITKAPLSASMIKRYDEHHQDLTLLKALVRQQLPEKYKEIFFDQSKNGYAGYIDGGASQEEFYKFIKPILEKMDGTEELLVKLNREDLLRKQRTFDNGSIPHQIHLGELHAILRRQEDFYPFLKDNREKIEKILTFRIPYYVGPLARGNSRFAWMTRKSEETITPWNFEEVVDKGASAQSFIERMTNFDKNLPNEKVLPKHSLLYEYFTVYNELTKVKYVTEGMRKPAFLSGEQKKAIVDLLFKTNRKVTVKQLKEDYFKKIECFDSVEISGVEDRFNASLGTYHDLLKIIKDKDFLDNEENEDILEDIVLTLTLFEDREMIEERLKTYAHLFDDKVMKQLKRRRYTGWGRLSRKLINGIRDKQSGKTILDFLKSDGFANRNFMQLIHDDSLTFKEDIQKAQVSGQGDSLHEHIANLAGSPAIKKGILQTVKVVDELVKVMGRHKPENIVIEMARENQTTQKGQKNSRERMKRIEEGIKELGSQILKEHPVENTQLQNEKLYLYYLQNGRDMYVDQELDINRLSDYDVDHIVPQSFLKDDSIDNKVLTRSDKARGKSDNVPSEEVVKKMKNYWRQLLNAKLITQRKFDNLTKAERGGLSELDKAGFIKRQLVETRQITKHVAQILDSRMNTKYDENDKLIREVKVITLKSKLVSDFRKDFQFYKVREINNYHHAHDAYLNAVVGTALIKKYPKLESEFVYGDYKVYDVRKMIAKSEQEIGKATAKYFFYSNIMNFFKTEITLANGEIRKRPLIETNGETGEIVWDKGRDFATVRKVLSMPQVNIVKKTEVQTGGFSKESILPKRNSDKLIARKKDWDPKKYGGFDSPTVAYSVLVVAKVEKGKSKKLKSVKELLGITIMERSSFEKNPIDFLEAKGYKEVKKDLIIKLPKYSLFELENGRKRMLASAGELQKGNELALPSKYVNFLYLASHYEKLKGSPEDNEQKQLFVEQHKHYLDEIIEQISEFSKRVILADANLDKVLSAYNKHRDKPIREQAENIIHLFTLTNLGAPAAFKYFDTTIDRKRYTSTKEVLDATLIHQSITGLYETRIDLSQLGGDGGGSSPAPEAAAKGGTLNIEDEYRLHETSKGPDVPLGSTWLSDFPQAWAETGGMGLAVRQAPLIIPLKATSTPVSIKQYPMSQEARLGIKPHIQRLLDQGILVPCQSPWNTPLLPVKKPGTNDYRPVQDLREVNKRVEDIHPTVPNPYNLLSGLPPSHQWYTVLDLKDAFFCLRLHPTSQSLFAFEWRDPEMGISGQLTWTRLPQGFKNSPTLFNEALHRDLADFRIQHPDLILLQYVDDLLLAATSELDCQQGTRALLQTLGDLGYRASAKKAQICQKQVKYLGYLLKEGQRWLTEARKETVMGQPTPKTPRQLREFLGTAGFCRLWIPGFAEMAAPLYPLTKPGTLFEWGPDQQKAYQEIKQALLTAPALGLPDLTKPFELFVDEKQGYAKGVLTQKLGPWRRPVAYLSKKLDPVAAGWPPCLRMVAAIAVLTKDAGKLTMGQPLVILAPHAVEALVKQPPDRWLSNARMTHYQALLLDTDRVQFGPIVALNPATLLPLPEEGLQHDCLDILAEAHGTRPDLTDQPLPDADHTWYTDGSSFLQEGQRKAGAAVTTETEVVWAKALPAGTSAQRAELIALTQALKMAEGKKLNVYTDSRYAFATAHIHGEIYRRRGWLTSEGKEIKNKDEILALLKALFLPKRLSIIHCPGHQKGNRAEARGNRMADQAAREVATRETPETSTLLAGKRTADGSEFEKRTADGSEFESPKKKAKVE

SEQ ID NO: 2481 - protein, 2091 aa, synthetic construct
MPAAKRVKLDGGDKKYSIGLDIGTNSVGWAVITDEYKVPSKKFKVLGNTDRHSIKKNLIGALLFDSGETAEATRLKRTARRRYTRRKNRICYLQEIFSNEMAKVDDSFFHRLEESFLVEEDKKHERHPIFGNIVDEVAYHEKYPTIYHLRKKLVDSTDKADLRLIYLALAHMIKFRGHFLIEGDLNPDNSDVDKLFIQLVQTYNQLFEENPINASGVDAKAILSARLSKSRRLENLIAQLPGEKKNGLFGNLIALSLGLTPNFKSNFDLAEDAKLQLSKDTYDDDLDNLLAQIGDQYADLFLAAKNLSDAILLSDILRVNTEITKAPLSASMIKRYDEHHQDLTLLKALVRQQLPEKYKEIFFDQSKNGYAGYIDGGASQEEFYKFIKPILEKMDGTEELLVKLNREDLLRKQRTFDNGSIPHQIHLGELHAILRRQEDFYPFLKDNREKIEKILTFRIPYYVGPLARGNSRFAWMTRKSEETITPWNFEEVVDKGASAQSFIERMTNFDKNLPNEKVLPKHSLLYEYFTVYNELTKVKYVTEGMRKPAFLSGEQKKAIVDLLFKTNRKVTVKQLKEDYFKKIECFDSVEISGVEDRFNASLGTYHDLLKIIKDKDFLDNEENEDILEDIVLTLTLFEDREMIEERLKTYAHLFDDKVMKQLKRRRYTGWGRLSRKLINGIRDKQSGKTILDFLKSDGFANRNFMQLIHDDSLTFKEDIQKAQVSGQGDSLHEHIANLAGSPAIKKGILQTVKVVDELVKVMGRHKPENIVIEMARENQTTQKGQKNSRERMKRIEEGIKELGSQILKEHPVENTQLQNEKLYLYYLQNGRDMYVDQELDINRLSDYDVDHIVPQSFLKDDSIDNKVLTRSDKARGKSDNVPSEEVVKKMKNYWRQLLNAKLITQRKFDNLTKAERGGLSELDKAGFIKRQLVETRQITKHVAQILDSRMNTKYDENDKLIREVKVITLKSKLVSDFRKDFQFYKVREINNYHHAHDAYLNAVVGTALIKKYPKLESEFVYGDYKVYDVRKMIAKSEQEIGKATAKYFFYSNIMNFFKTEITLANGEIRKRPLIETNGETGEIVWDKGRDFATVRKVLSMPQVNIVKKTEVQTGGFSKESILPKRNSDKLIARKKDWDPKKYGGFDSPTVAYSVLVVAKVEKGKSKKLKSVKELLGITIMERSSFEKNPIDFLEAKGYKEVKKDLIIKLPKYSLFELENGRKRMLASAGELQKGNELALPSKYVNFLYLASHYEKLKGSPEDNEQKQLFVEQHKHYLDEIIEQISEFSKRVILADANLDKVLSAYNKHRDKPIREQAENIIHLFTLTNLGAPAAFKYFDTTIDRKRYTSTKEVLDATLIHQSITGLYETRIDLSQLGGDGGGGSPAPGGTLNIEDEYRLHETSKGPDVPLGSTWLSDFPQAWAETGGMGLAVRQAPLIIPLKATSTPVSIKQYPMSQEARLGIKPHIQRLLDQGILVPCQSPWNTPLLPVKKPGTNDYRPVQDLREVNKRVEDIHPTVPNPYNLLSGLPPSHQWYTVLDLKDAFFCLRLHPTSQSLFAFEWRDPEMGISGQLTWTRLPQGFKNSPTLFNEALHRDLADFRIQHPDLILLQYVDDLLLAATSELDCQQGTRALLQTLGDLGYRASAKKAQICQKQVKYLGYLLKEGQRWLTEARKETVMGQPTPKTPRQLREFLGTAGFCRLWIPGFAEMAAPLYPLTKPGTLFEWGPDQQKAYQEIKQALLTAPALGLPDLTKPFELFVDEKQGYAKGVLTQKLGPWRRPVAYLSKKLDPVAAGWPPCLRMVAAIAVLTKDAGKLTMGQPLVILAPHAVEALVKQPPDRWLSNARMTHYQALLLDTDRVQFGPIVALNPATLLPLPEEGLQHDCLDILAEAHGTRPDLTDQPLPDADHTWYTDGSSFLQEGQRKAGAAVTTETEVVWAKALPAGTSAQRAELIALTQALKMAEGKKLNVYTDSRYAFATAHIHGEIYRRRGWLTSEGKEIKNKDEILALLKALFLPKRLSIIHCPGHQKGNRAEARGNRMADQAAREVATRETPETSTLLAGKRTADGSEFEKRTADGSEFESPKKKAKVE

SEQ ID NO: 2482 - protein, 2090 aa, synthetic construct
MPAAKRVKLDGGDKKYSIGLDIGTNSVGWAVITDEYKVPSKKFKVLGNTDRHSIKKNLIGALLFDSGETAEATRLKRTARRRYTRRKNRICYLQEIFSNEMAKVDDSFFHRLEESFLVEEDKKHERHPIFGNIVDEVAYHEKYPTIYHLRKKLVDSTDKADLRLIYLALAHMIKFRGHFLIEGDLNPDNSDVDKLFIQLVQTYNQLFEENPINASGVDAKAILSARLSKSRRLENLIAQLPGEKKNGLFGNLIALSLGLTPNFKSNFDLAEDAKLQLSKDTYDDDLDNLLAQIGDQYADLFLAAKNLSDAILLSDILRVNTEITKAPLSASMIKRYDEHHQDLTLLKALVRQQLPEKYKEIFFDQSKNGYAGYIDGGASQEEFYKFIKPILEKMDGTEELLVKLNREDLLRKQRTFDNGSIPHQIHLGELHAILRRQEDFYPFLKDNREKIEKILTFRIPYYVGPLARGNSRFAWMTRKSEETITPWNFEEVVDKGASAQSFIERMTNFDKNLPNEKVLPKHSLLYEYFTVYNELTKVKYVTEGMRKPAFLSGEQKKAIVDLLFKTNRKVTVKQLKEDYFKKIECFDSVEISGVEDRFNASLGTYHDLLKIIKDKDFLDNEENEDILEDIVLTLTLFEDREMIEERLKTYAHLFDDKVMKQLKRRRYTGWGRLSRKLINGIRDKQSGKTILDFLKSDGFANRNFMQLIHDDSLTFKEDIQKAQVSGQGDSLHEHIANLAGSPAIKKGILQTVKVVDELVKVMGRHKPENIVIEMARENQTTQKGQKNSRERMKRIEEGIKELGSQILKEHPVENTQLQNEKLYLYYLQNGRDMYVDQELDINRLSDYDVDHIVPQSFLKDDSIDNKVLTRSDKARGKSDNVPSEEVVKKMKNYWRQLLNAKLITQRKFDNLTKAERGGLSELDKAGFIKRQLVETRQITKHVAQILDSRMNTKYDENDKLIREVKVITLKSKLVSDFRKDFQFYKVREINNYHHAHDAYLNAVVGTALIKKYPKLESEFVYGDYKVYDVRKMIAKSEQEIGKATAKYFFYSNIMNFFKTEITLANGEIRKRPLIETNGETGEIVWDKGRDFATVRKVLSMPQVNIVKKTEVQTGGFSKESILPKRNSDKLIARKKDWDPKKYGGFDSPTVAYSVLVVAKVEKGKSKKLKSVKELLGITIMERSSFEKNPIDFLEAKGYKEVKKDLIIKLPKYSLFELENGRKRMLASAGELQKGNELALPSKYVNFLYLASHYEKLKGSPEDNEQKQLFVEQHKHYLDEIIEQISEFSKRVILADANLDKVLSAYNKHRDKPIREQAENIIHLFTLTNLGAPAAFKYFDTTIDRKRYTSTKEVLDATLIHQSITGLYETRIDLSQLGGDGGGGGGSGGTLNIEDEYRLHETSKGPDVPLGSTWLSDFPQAWAETGGMGLAVRQAPLIIPLKATSTPVSIKQYPMSQEARLGIKPHIQRLLDQGILVPCQSPWNTPLLPVKKPGTNDYRPVQDLREVNKRVEDIHPTVPNPYNLLSGLPPSHQWYTVLDLKDAFFCLRLHPTSQSLFAFEWRDPEMGISGQLTWTRLPQGFKNSPTLFNEALHRDLADFRIQHPDLILLQYVDDLLLAATSELDCQQGTRALLQTLGDLGYRASAKKAQICQKQVKYLGYLLKEGQRWLTEARKETVMGQPTPKTPRQLREFLGTAGFCRLWIPGFAEMAAPLYPLTKPGTLFEWGPDQQKAYQEIKQALLTAPALGLPDLTKPFELFVDEKQGYAKGVLTQKLGPWRRPVAYLSKKLDPVAAGWPPCLRMVAAIAVLTKDAGKLTMGQPLVILAPHAVEALVKQPPDRWLSNARMTHYQALLLDTDRVQFGPIVALNPATLLPLPEEGLQHDCLDILAEAHGTRPDLTDQPLPDADHTWYTDGSSFLQEGQRKAGAAVTTETEVVWAKALPAGTSAQRAELIALTQALKMAEGKKLNVYTDSRYAFATAHIHGEIYRRRGWLTSEGKEIKNKDEILALLKALFLPKRLSIIHCPGHQKGNRAEARGNRMADQAAREVATRETPETSTLLAGKRTADGSEFEKRTADGSEFESPKKKAKVE

SEQ ID NO: 2483 - protein, 2096 aa, synthetic construct
MPAAKRVKLDGGDKKYSIGLDIGTNSVGWAVITDEYKVPSKKFKVLGNTDRHSIKKNLIGALLFDSGETAEATRLKRTARRRYTRRKNRICYLQEIFSNEMAKVDDSFFHRLEESFLVEEDKKHERHPIFGNIVDEVAYHEKYPTIYHLRKKLVDSTDKADLRLIYLALAHMIKFRGHFLIEGDLNPDNSDVDKLFIQLVQTYNQLFEENPINASGVDAKAILSARLSKSRRLENLIAQLPGEKKNGLFGNLIALSLGLTPNFKSNFDLAEDAKLQLSKDTYDDDLDNLLAQIGDQYADLFLAAKNLSDAILLSDILRVNTEITKAPLSASMIKRYDEHHQDLTLLKALVRQQLPEKYKEIFFDQSKNGYAGYIDGGASQEEFYKFIKPILEKMDGTEELLVKLNREDLLRKQRTFDNGSIPHQIHLGELHAILRRQEDFYPFLKDNREKIEKILTFRIPYYVGPLARGNSRFAWMTRKSEETITPWNFEEVVDKGASAQSFIERMTNFDKNLPNEKVLPKHSLLYEYFTVYNELTKVKYVTEGMRKPAFLSGEQKKAIVDLLFKTNRKVTVKQLKEDYFKKIECFDSVEISGVEDRFNASLGTYHDLLKIIKDKDFLDNEENEDILEDIVLTLTLFEDREMIEERLKTYAHLFDDKVMKQLKRRRYTGWGRLSRKLINGIRDKQSGKTILDFLKSDGFANRNFMQLIHDDSLTFKEDIQKAQVSGQGDSLHEHIANLAGSPAIKKGILQTVKVVDELVKVMGRHKPENIVIEMARENQTTQKGQKNSRERMKRIEEGIKELGSQILKEHPVENTQLQNEKLYLYYLQNGRDMYVDQELDINRLSDYDVDHIVPQSFLKDDSIDNKVLTRSDKARGKSDNVPSEEVVKKMKNYWRQLLNAKLITQRKFDNLTKAERGGLSELDKAGFIKRQLVETRQITKHVAQILDSRMNTKYDENDKLIREVKVITLKSKLVSDFRKDFQFYKVREINNYHHAHDAYLNAVVGTALIKKYPKLESEFVYGDYKVYDVRKMIAKSEQEIGKATAKYFFYSNIMNFFKTEITLANGEIRKRPLIETNGETGEIVWDKGRDFATVRKVLSMPQVNIVKKTEVQTGGFSKESILPKRNSDKLIARKKDWDPKKYGGFDSPTVAYSVLVVAKVEKGKSKKLKSVKELLGITIMERSSFEKNPIDFLEAKGYKEVKKDLIIKLPKYSLFELENGRKRMLASAGELQKGNELALPSKYVNFLYLASHYEKLKGSPEDNEQKQLFVEQHKHYLDEIIEQISEFSKRVILADANLDKVLSAYNKHRDKPIREQAENIIHLFTLTNLGAPAAFKYFDTTIDRKRYTSTKEVLDATLIHQSITGLYETRIDLSQLGGDGGEAAAKGGGGGSGGTLNIEDEYRLHETSKGPDVPLGSTWLSDFPQAWAETGGMGLAVRQAPLIIPLKATSTPVSIKQYPMSQEARLGIKPHIQRLLDQGILVPCQSPWNTPLLPVKKPGTNDYRPVQDLREVNKRVEDIHPTVPNPYNLLSGLPPSHQWYTVLDLKDAFFCLRLHPTSQSLFAFEWRDPEMGISGQLTWTRLPQGFKNSPTLFNEALHRDLADFRIQHPDLILLQYVDDLLLAATSELDCQQGTRALLQTLGDLGYRASAKKAQICQKQVKYLGYLLKEGQRWLTEARKETVMGQPTPKTPRQLREFLGTAGFCRLWIPGFAEMAAPLYPLTKPGTLFEWGPDQQKAYQEIKQALLTAPALGLPDLTKPFELFVDEKQGYAKGVLTQKLGPWRRPVAYLSKKLDPVAAGWPPCLRMVAAIAVLTKDAGKLTMGQPLVILAPHAVEALVKQPPDRWLSNARMTHYQALLLDTDRVQFGPIVALNPATLLPLPEEGLQHDCLDILAEAHGTRPDLTDQPLPDADHTWYTDGSSFLQEGQRKAGAAVTTETEVVWAKALPAGTSAQRAELIALTQALKMAEGKKLNVYTDSRYAFATAHIHGEIYRRRGWLTSEGKEIKNKDEILALLKALFLPKRLSIIHCPGHQKGNRAEARGNRMADQAAREVATRETPETSTLLAGKRTADGSEFEKRTADGSEFESPKKKAKVE

SEQ ID NO: 2484 - protein, 2095 aa, synthetic construct
MPAAKRVKLDGGDKKYSIGLDIGTNSVGWAVITDEYKVPSKKFKVLGNTDRHSIKKNLIGALLFDSGETAEATRLKRTARRRYTRRKNRICYLQEIFSNEMAKVDDSFFHRLEESFLVEEDKKHERHPIFGNIVDEVAYHEKYPTIYHLRKKLVDSTDKADLRLIYLALAHMIKFRGHFLIEGDLNPDNSDVDKLFIQLVQTYNQLFEENPINASGVDAKAILSARLSKSRRLENLIAQLPGEKKNGLFGNLIALSLGLTPNFKSNFDLAEDAKLQLSKDTYDDDLDNLLAQIGDQYADLFLAAKNLSDAILLSDILRVNTEITKAPLSASMIKRYDEHHQDLTLLKALVRQQLPEKYKEIFFDQSKNGYAGYIDGGASQEEFYKFIKPILEKMDGTEELLVKLNREDLLRKQRTFDNGSIPHQIHLGELHAILRRQEDFYPFLKDNREKIEKILTFRIPYYVGPLARGNSRFAWMTRKSEETITPWNFEEVVDKGASAQSFIERMTNFDKNLPNEKVLPKHSLLYEYFTVYNELTKVKYVTEGMRKPAFLSGEQKKAIVDLLFKTNRKVTVKQLKEDYFKKIECFDSVEISGVEDRFNASLGTYHDLLKIIKDKDFLDNEENEDILEDIVLTLTLFEDREMIEERLKTYAHLFDDKVMKQLKRRRYTGWGRLSRKLINGIRDKQSGKTILDFLKSDGFANRNFMQLIHDDSLTFKEDIQKAQVSGQGDSLHEHIANLAGSPAIKKGILQTVKVVDELVKVMGRHKPENIVIEMARENQTTQKGQKNSRERMKRIEEGIKELGSQILKEHPVENTQLQNEKLYLYYLQNGRDMYVDQELDINRLSDYDVDHIVPQSFLKDDSIDNKVLTRSDKARGKSDNVPSEEVVKKMKNYWRQLLNAKLITQRKFDNLTKAERGGLSELDKAGFIKRQLVETRQITKHVAQILDSRMNTKYDENDKLIREVKVITLKSKLVSDFRKDFQFYKVREINNYHHAHDAYLNAVVGTALIKKYPKLESEFVYGDYKVYDVRKMIAKSEQEIGKATAKYFFYSNIMNFFKTEITLANGEIRKRPLIETNGETGEIVWDKGRDFATVRKVLSMPQVNIVKKTEVQTGGFSKESILPKRNSDKLIARKKDWDPKKYGGFDSPTVAYSVLVVAKVEKGKSKKLKSVKELLGITIMERSSFEKNPIDFLEAKGYKEVKKDLIIKLPKYSLFELENGRKRMLASAGELQKGNELALPSKYVNFLYLASHYEKLKGSPEDNEQKQLFVEQHKHYLDEIIEQISEFSKRVILADANLDKVLSAYNKHRDKPIREQAENIIHLFTLTNLGAPAAFKYFDTTIDRKRYTSTKEVLDATLIHQSITGLYETRIDLSQLGGDGGEAAAKEAAAKGGTLNIEDEYRLHETSKGPDVPLGSTWLSDFPQAWAETGGMGLAVRQAPLIIPLKATSTPVSIKQYPMSQEARLGIKPHIQRLLDQGILVPCQSPWNTPLLPVKKPGTNDYRPVQDLREVNKRVEDIHPTVPNPYNLLSGLPPSHQWYTVLDLKDAFFCLRLHPTSQSLFAFEWRDPEMGISGQLTWTRLPQGFKNSPTLFNEALHRDLADFRIQHPDLILLQYVDDLLLAATSELDCQQGTRALLQTLGDLGYRASAKKAQICQKQVKYLGYLLKEGQRWLTEARKETVMGQPTPKTPRQLREFLGTAGFCRLWIPGFAEMAAPLYPLTKPGTLFEWGPDQQKAYQEIKQALLTAPALGLPDLTKPFELFVDEKQGYAKGVLTQKLGPWRRPVAYLSKKLDPVAAGWPPCLRMVAAIAVLTKDAGKLTMGQPLVILAPHAVEALVKQPPDRWLSNARMTHYQALLLDTDRVQFGPIVALNPATLLPLPEEGLQHDCLDILAEAHGTRPDLTDQPLPDADHTWYTDGSSFLQEGQRKAGAAVTTETEVVWAKALPAGTSAQRAELIALTQALKMAEGKKLNVYTDSRYAFATAHIHGEIYRRRGWLTSEGKEIKNKDEILALLKALFLPKRLSIIHCPGHQKGNRAEARGNRMADQAAREVATRETPETSTLLAGKRTADGSEFEKRTADGSEFESPKKKAKVE

SEQ ID NO: 2485 - protein, 2096 aa, synthetic construct
MPAAKRVKLDGGDKKYSIGLDIGTNSVGWAVITDEYKVPSKKFKVLGNTDRHSIKKNLIGALLFDSGETAEATRLKRTARRRYTRRKNRICYLQEIFSNEMAKVDDSFFHRLEESFLVEEDKKHERHPIFGNIVDEVAYHEKYPTIYHLRKKLVDSTDKADLRLIYLALAHMIKFRGHFLIEGDLNPDNSDVDKLFIQLVQTYNQLFEENPINASGVDAKAILSARLSKSRRLENLIAQLPGEKKNGLFGNLIALSLGLTPNFKSNFDLAEDAKLQLSKDTYDDDLDNLLAQIGDQYADLFLAAKNLSDAILLSDILRVNTEITKAPLSASMIKRYDEHHQDLTLLKALVRQQLPEKYKEIFFDQSKNGYAGYIDGGASQEEFYKFIKPILEKMDGTEELLVKLNREDLLRKQRTFDNGSIPHQIHLGELHAILRRQEDFYPFLKDNREKIEKILTFRIPYYVGPLARGNSRFAWMTRKSEETITPWNFEEVVDKGASAQSFIERMTNFDKNLPNEKVLPKHSLLYEYFTVYNELTKVKYVTEGMRKPAFLSGEQKKAIVDLLFKTNRKVTVKQLKEDYFKKIECFDSVEISGVEDRFNASLGTYHDLLKIIKDKDFLDNEENEDILEDIVLTLTLFEDREMIEERLKTYAHLFDDKVMKQLKRRRYTGWGRLSRKLINGIRDKQSGKTILDFLKSDGFANRNFMQLIHDDSLTFKEDIQKAQVSGQGDSLHEHIANLAGSPAIKKGILQTVKVVDELVKVMGRHKPENIVIEMARENQTTQKGQKNSRERMKRIEEGIKELGSQILKEHPVENTQLQNEKLYLYYLQNGRDMYVDQELDINRLSDYDVDHIVPQSFLKDDSIDNKVLTRSDKARGKSDNVPSEEVVKKMKNYWRQLLNAKLITQRKFDNLTKAERGGLSELDKAGFIKRQLVETRQITKHVAQILDSRMNTKYDENDKLIREVKVITLKSKLVSDFRKDFQFYKVREINNYHHAHDAYLNAVVGTALIKKYPKLESEFVYGDYKVYDVRKMIAKSEQEIGKATAKYFFYSNIMNFFKTEITLANGEIRKRPLIETNGETGEIVWDKGRDFATVRKVLSMPQVNIVKKTEVQTGGFSKESILPKRNSDKLIARKKDWDPKKYGGFDSPTVAYSVLVVAKVEKGKSKKLKSVKELLGITIMERSSFEKNPIDFLEAKGYKEVKKDLIIKLPKYSLFELENGRKRMLASAGELQKGNELALPSKYVNFLYLASHYEKLKGSPEDNEQKQLFVEQHKHYLDEIIEQISEFSKRVILADANLDKVLSAYNKHRDKPIREQAENIIHLFTLTNLGAPAAFKYFDTTIDRKRYTSTKEVLDATLIHQSITGLYETRIDLSQLGGDGGGSSEAAAKPAPGGTLNIEDEYRLHETSKGPDVPLGSTWLSDFPQAWAETGGMGLAVRQAPLIIPLKATSTPVSIKQYPMSQEARLGIKPHIQRLLDQGILVPCQSPWNTPLLPVKKPGTNDYRPVQDLREVNKRVEDIHPTVPNPYNLLSGLPPSHQWYTVLDLKDAFFCLRLHPTSQSLFAFEWRDPEMGISGQLTWTRLPQGFKNSPTLFNEALHRDLADFRIQHPDLILLQYVDDLLLAATSELDCQQGTRALLQTLGDLGYRASAKKAQICQKQVKYLGYLLKEGQRWLTEARKETVMGQPTPKTPRQLREFLGTAGFCRLWIPGFAEMAAPLYPLTKPGTLFEWGPDQQKAYQEIKQALLTAPALGLPDLTKPFELFVDEKQGYAKGVLTQKLGPWRRPVAYLSKKLDPVAAGWPPCLRMVAAIAVLTKDAGKLTMGQPLVILAPHAVEALVKQPPDRWLSNARMTHYQALLLDTDRVQFGPIVALNPATLLPLPEEGLQHDCLDILAEAHGTRPDLTDQPLPDADHTWYTDGSSFLQEGQRKAGAAVTTETEVVWAKALPAGTSAQRAELIALTQALKMAEGKKLNVYTDSRYAFATAHIHGEIYRRRGWLTSEGKEIKNKDEILALLKALFLPKRLSIIHCPGHQKGNRAEARGNRMADQAAREVATRETPETSTLLAGKRTADGSEFEKRTADGSEFESPKKKAKVE

SEQ ID NO: 2486 - protein, 2096 aa, synthetic construct
MPAAKRVKLDGGDKKYSIGLDIGTNSVGWAVITDEYKVPSKKFKVLGNTDRHSIKKNLIGALLFDSGETAEATRLKRTARRRYTRRKNRICYLQEIFSNEMAKVDDSFFHRLEESFLVEEDKKHERHPIFGNIVDEVAYHEKYPTIYHLRKKLVDSTDKADLRLIYLALAHMIKFRGHFLIEGDLNPDNSDVDKLFIQLVQTYNQLFEENPINASGVDAKAILSARLSKSRRLENLIAQLPGEKKNGLFGNLIALSLGLTPNFKSNFDLAEDAKLQLSKDTYDDDLDNLLAQIGDQYADLFLAAKNLSDAILLSDILRVNTEITKAPLSASMIKRYDEHHQDLTLLKALVRQQLPEKYKEIFFDQSKNGYAGYIDGGASQEEFYKFIKPILEKMDGTEELLVKLNREDLLRKQRTFDNGSIPHQIHLGELHAILRRQEDFYPFLKDNREKIEKILTFRIPYYVGPLARGNSRFAWMTRKSEETITPWNFEEVVDKGASAQSFIERMTNFDKNLPNEKVLPKHSLLYEYFTVYNELTKVKYVTEGMRKPAFLSGEQKKAIVDLLFKTNRKVTVKQLKEDYFKKIECFDSVEISGVEDRFNASLGTYHDLLKIIKDKDFLDNEENEDILEDIVLTLTLFEDREMIEERLKTYAHLFDDKVMKQLKRRRYTGWGRLSRKLINGIRDKQSGKTILDFLKSDGFANRNFMQLIHDDSLTFKEDIQKAQVSGQGDSLHEHIANLAGSPAIKKGILQTVKVVDELVKVMGRHKPENIVIEMARENQTTQKGQKNSRERMKRIEEGIKELGSQILKEHPVENTQLQNEKLYLYYLQNGRDMYVDQELDINRLSDYDVDHIVPQSFLKDDSIDNKVLTRSDKARGKSDNVPSEEVVKKMKNYWRQLLNAKLITQRKFDNLTKAERGGLSELDKAGFIKRQLVETRQITKHVAQILDSRMNTKYDENDKLIREVKVITLKSKLVSDFRKDFQFYKVREINNYHHAHDAYLNAVVGTALIKKYPKLESEFVYGDYKVYDVRKMIAKSEQEIGKATAKYFFYSNIMNFFKTEITLANGEIRKRPLIETNGETGEIVWDKGRDFATVRKVLSMPQVNIVKKTEVQTGGFSKESILPKRNSDKLIARKKDWDPKKYGGFDSPTVAYSVLVVAKVEKGKSKKLKSVKELLGITIMERSSFEKNPIDFLEAKGYKEVKKDLIIKLPKYSLFELENGRKRMLASAGELQKGNELALPSKYVNFLYLASHYEKLKGSPEDNEQKQLFVEQHKHYLDEIIEQISEFSKRVILADANLDKVLSAYNKHRDKPIREQAENIIHLFTLTNLGAPAAFKYFDTTIDRKRYTSTKEVLDATLIHQSITGLYETRIDLSQLGGDGGGGSEAAAKPAPGGTLNIEDEYRLHETSKGPDVPLGSTWLSDFPQAWAETGGMGLAVRQAPLIIPLKATSTPVSIKQYPMSQEARLGIKPHIQRLLDQGILVPCQSPWNTPLLPVKKPGTNDYRPVQDLREVNKRVEDIHPTVPNPYNLLSGLPPSHQWYTVLDLKDAFFCLRLHPTSQSLFAFEWRDPEMGISGQLTWTRLPQGFKNSPTLFNEALHRDLADFRIQHPDLILLQYVDDLLLAATSELDCQQGTRALLQTLGDLGYRASAKKAQICQKQVKYLGYLLKEGQRWLTEARKETVMGQPTPKTPRQLREFLGTAGFCRLWIPGFAEMAAPLYPLTKPGTLFEWGPDQQKAYQEIKQALLTAPALGLPDLTKPFELFVDEKQGYAKGVLTQKLGPWRRPVAYLSKKLDPVAAGWPPCLRMVAAIAVLTKDAGKLTMGQPLVILAPHAVEALVKQPPDRWLSNARMTHYQALLLDTDRVQFGPIVALNPATLLPLPEEGLQHDCLDILAEAHGTRPDLTDQPLPDADHTWYTDGSSFLQEGQRKAGAAVTTETEVVWAKALPAGTSAQRAELIALTQALKMAEGKKLNVYTDSRYAFATAHIHGEIYRRRGWLTSEGKEIKNKDEILALLKALFLPKRLSIIHCPGHQKGNRAEARGNRMADQAAREVATRETPETSTLLAGKRTADGSEFEKRTADGSEFESPKKKAKVE

SEQ ID NO: 2487 - protein, 2091 aa, synthetic construct
MPAAKRVKLDGGDKKYSIGLDIGTNSVGWAVITDEYKVPSKKFKVLGNTDRHSIKKNLIGALLFDSGETAEATRLKRTARRRYTRRKNRICYLQEIFSNEMAKVDDSFFHRLEESFLVEEDKKHERHPIFGNIVDEVAYHEKYPTIYHLRKKLVDSTDKADLRLIYLALAHMIKFRGHFLIEGDLNPDNSDVDKLFIQLVQTYNQLFEENPINASGVDAKAILSARLSKSRRLENLIAQLPGEKKNGLFGNLIALSLGLTPNFKSNFDLAEDAKLQLSKDTYDDDLDNLLAQIGDQYADLFLAAKNLSDAILLSDILRVNTEITKAPLSASMIKRYDEHHQDLTLLKALVRQQLPEKYKEIFFDQSKNGYAGYIDGGASQEEFYKFIKPILEKMDGTEELLVKLNREDLLRKQRTFDNGSIPHQIHLGELHAILRRQEDFYPFLKDNREKIEKILTFRIPYYVGPLARGNSRFAWMTRKSEETITPWNFEEVVDKGASAQSFIERMTNFDKNLPNEKVLPKHSLLYEYFTVYNELTKVKYVTEGMRKPAFLSGEQKKAIVDLLFKTNRKVTVKQLKEDYFKKIECFDSVEISGVEDRFNASLGTYHDLLKIIKDKDFLDNEENEDILEDIVLTLTLFEDREMIEERLKTYAHLFDDKVMKQLKRRRYTGWGRLSRKLINGIRDKQSGKTILDFLKSDGFANRNFMQLIHDDSLTFKEDIQKAQVSGQGDSLHEHIANLAGSPAIKKGILQTVKVVDELVKVMGRHKPENIVIEMARENQTTQKGQKNSRERMKRIEEGIKELGSQILKEHPVENTQLQNEKLYLYYLQNGRDMYVDQELDINRLSDYDVDHIVPQSFLKDDSIDNKVLTRSDKARGKSDNVPSEEVVKKMKNYWRQLLNAKLITQRKFDNLTKAERGGLSELDKAGFIKRQLVETRQITKHVAQILDSRMNTKYDENDKLIREVKVITLKSKLVSDFRKDFQFYKVREINNYHHAHDAYLNAVVGTALIKKYPKLESEFVYGDYKVYDVRKMIAKSEQEIGKATAKYFFYSNIMNFFKTEITLANGEIRKRPLIETNGETGEIVWDKGRDFATVRKVLSMPQVNIVKKTEVQTGGFSKESILPKRNSDKLIARKKDWDPKKYGGFDSPTVAYSVLVVAKVEKGKSKKLKSVKELLGITIMERSSFEKNPIDFLEAKGYKEVKKDLIIKLPKYSLFELENGRKRMLASAGELQKGNELALPSKYVNFLYLASHYEKLKGSPEDNEQKQLFVEQHKHYLDEIIEQISEFSKRVILADANLDKVLSAYNKHRDKPIREQAENIIHLFTLTNLGAPAAFKYFDTTIDRKRYTSTKEVLDATLIHQSITGLYETRIDLSQLGGDGGGGSGSSGGTLNIEDEYRLHETSKGPDVPLGSTWLSDFPQAWAETGGMGLAVRQAPLIIPLKATSTPVSIKQYPMSQEARLGIKPHIQRLLDQGILVPCQSPWNTPLLPVKKPGTNDYRPVQDLREVNKRVEDIHPTVPNPYNLLSGLPPSHQWYTVLDLKDAFFCLRLHPTSQSLFAFEWRDPEMGISGQLTWTRLPQGFKNSPTLFNEALHRDLADFRIQHPDLILLQYVDDLLLAATSELDCQQGTRALLQTLGDLGYRASAKKAQICQKQVKYLGYLLKEGQRWLTEARKETVMGQPTPKTPRQLREFLGTAGFCRLWIPGFAEMAAPLYPLTKPGTLFEWGPDQQKAYQEIKQALLTAPALGLPDLTKPFELFVDEKQGYAKGVLTQKLGPWRRPVAYLSKKLDPVAAGWPPCLRMVAAIAVLTKDAGKLTMGQPLVILAPHAVEALVKQPPDRWLSNARMTHYQALLLDTDRVQFGPIVALNPATLLPLPEEGLQHDCLDILAEAHGTRPDLTDQPLPDADHTWYTDGSSFLQEGQRKAGAAVTTETEVVWAKALPAGTSAQRAELIALTQALKMAEGKKLNVYTDSRYAFATAHIHGEIYRRRGWLTSEGKEIKNKDEILALLKALFLPKRLSIIHCPGHQKGNRAEARGNRMADQAAREVATRETPETSTLLAGKRTADGSEFEKRTADGSEFESPKKKAKVE

SEQ ID NO: 2488 - protein, 2096 aa, synthetic construct
MPAAKRVKLDGGDKKYSIGLDIGTNSVGWAVITDEYKVPSKKFKVLGNTDRHSIKKNLIGALLFDSGETAEATRLKRTARRRYTRRKNRICYLQEIFSNEMAKVDDSFFHRLEESFLVEEDKKHERHPIFGNIVDEVAYHEKYPTIYHLRKKLVDSTDKADLRLIYLALAHMIKFRGHFLIEGDLNPDNSDVDKLFIQLVQTYNQLFEENPINASGVDAKAILSARLSKSRRLENLIAQLPGEKKNGLFGNLIALSLGLTPNFKSNFDLAEDAKLQLSKDTYDDDLDNLLAQIGDQYADLFLAAKNLSDAILLSDILRVNTEITKAPLSASMIKRYDEHHQDLTLLKALVRQQLPEKYKEIFFDQSKNGYAGYIDGGASQEEFYKFIKPILEKMDGTEELLVKLNREDLLRKQRTFDNGSIPHQIHLGELHAILRRQEDFYPFLKDNREKIEKILTFRIPYYVGPLARGNSRFAWMTRKSEETITPWNFEEVVDKGASAQSFIERMTNFDKNLPNEKVLPKHSLLYEYFTVYNELTKVKYVTEGMRKPAFLSGEQKKAIVDLLFKTNRKVTVKQLKEDYFKKIECFDSVEISGVEDRFNASLGTYHDLLKIIKDKDFLDNEENEDILEDIVLTLTLFEDREMIEERLKTYAHLFDDKVMKQLKRRRYTGWGRLSRKLINGIRDKQSGKTILDFLKSDGFANRNFMQLIHDDSLTFKEDIQKAQVSGQGDSLHEHIANLAGSPAIKKGILQTVKVVDELVKVMGRHKPENIVIEMARENQTTQKGQKNSRERMKRIEEGIKELGSQILKEHPVENTQLQNEKLYLYYLQNGRDMYVDQELDINRLSDYDVDHIVPQSFLKDDSIDNKVLTRSDKARGKSDNVPSEEVVKKMKNYWRQLLNAKLITQRKFDNLTKAERGGLSELDKAGFIKRQLVETRQITKHVAQILDSRMNTKYDENDKLIREVKVITLKSKLVSDFRKDFQFYKVREINNYHHAHDAYLNAVVGTALIKKYPKLESEFVYGDYKVYDVRKMIAKSEQEIGKATAKYFFYSNIMNFFKTEITLANGEIRKRPLIETNGETGEIVWDKGRDFATVRKVLSMPQVNIVKKTEVQTGGFSKESILPKRNSDKLIARKKDWDPKKYGGFDSPTVAYSVLVVAKVEKGKSKKLKSVKELLGITIMERSSFEKNPIDFLEAKGYKEVKKDLIIKLPKYSLFELENGRKRMLASAGELQKGNELALPSKYVNFLYLASHYEKLKGSPEDNEQKQLFVEQHKHYLDEIIEQISEFSKRVILADANLDKVLSAYNKHRDKPIREQAENIIHLFTLTNLGAPAAFKYFDTTIDRKRYTSTKEVLDATLIHQSITGLYETRIDLSQLGGDGGGSSGGSEAAAKGGTLNIEDEYRLHETSKGPDVPLGSTWLSDFPQAWAETGGMGLAVRQAPLIIPLKATSTPVSIKQYPMSQEARLGIKPHIQRLLDQGILVPCQSPWNTPLLPVKKPGTNDYRPVQDLREVNKRVEDIHPTVPNPYNLLSGLPPSHQWYTVLDLKDAFFCLRLHPTSQSLFAFEWRDPEMGISGQLTWTRLPQGFKNSPTLFNEALHRDLADFRIQHPDLILLQYVDDLLLAATSELDCQQGTRALLQTLGDLGYRASAKKAQICQKQVKYLGYLLKEGQRWLTEARKETVMGQPTPKTPRQLREFLGTAGFCRLWIPGFAEMAAPLYPLTKPGTLFEWGPDQQKAYQEIKQALLTAPALGLPDLTKPFELFVDEKQGYAKGVLTQKLGPWRRPVAYLSKKLDPVAAGWPPCLRMVAAIAVLTKDAGKLTMGQPLVILAPHAVEALVKQPPDRWLSNARMTHYQALLLDTDRVQFGPIVALNPATLLPLPEEGLQHDCLDILAEAHGTRPDLTDQPLPDADHTWYTDGSSFLQEGQRKAGAAVTTETEVVWAKALPAGTSAQRAELIALTQALKMAEGKKLNVYTDSRYAFATAHIHGEIYRRRGWLTSEGKEIKNKDEILALLKALFLPKRLSIIHCPGHQKGNRAEARGNRMADQAAREVATRETPETSTLLAGKRTADGSEFEKRTADGSEFESPKKKAKVE

SEQ ID NO: 2489 - protein, 2101 aa, synthetic construct
MPAAKRVKLDGGDKKYSIGLDIGTNSVGWAVITDEYKVPSKKFKVLGNTDRHSIKKNLIGALLFDSGETAEATRLKRTARRRYTRRKNRICYLQEIFSNEMAKVDDSFFHRLEESFLVEEDKKHERHPIFGNIVDEVAYHEKYPTIYHLRKKLVDSTDKADLRLIYLALAHMIKFRGHFLIEGDLNPDNSDVDKLFIQLVQTYNQLFEENPINASGVDAKAILSARLSKSRRLENLIAQLPGEKKNGLFGNLIALSLGLTPNFKSNFDLAEDAKLQLSKDTYDDDLDNLLAQIGDQYADLFLAAKNLSDAILLSDILRVNTEITKAPLSASMIKRYDEHHQDLTLLKALVRQQLPEKYKEIFFDQSKNGYAGYIDGGASQEEFYKFIKPILEKMDGTEELLVKLNREDLLRKQRTFDNGSIPHQIHLGELHAILRRQEDFYPFLKDNREKIEKILTFRIPYYVGPLARGNSRFAWMTRKSEETITPWNFEEVVDKGASAQSFIERMTNFDKNLPNEKVLPKHSLLYEYFTVYNELTKVKYVTEGMRKPAFLSGEQKKAIVDLLFKTNRKVTVKQLKEDYFKKIECFDSVEISGVEDRFNASLGTYHDLLKIIKDKDFLDNEENEDILEDIVLTLTLFEDREMIEERLKTYAHLFDDKVMKQLKRRRYTGWGRLSRKLINGIRDKQSGKTILDFLKSDGFANRNFMQLIHDDSLTFKEDIQKAQVSGQGDSLHEHIANLAGSPAIKKGILQTVKVVDELVKVMGRHKPENIVIEMARENQTTQKGQKNSRERMKRIEEGIKELGSQILKEHPVENTQLQNEKLYLYYLQNGRDMYVDQELDINRLSDYDVDHIVPQSFLKDDSIDNKVLTRSDKARGKSDNVPSEEVVKKMKNYWRQLLNAKLITQRKFDNLTKAERGGLSELDKAGFIKRQLVETRQITKHVAQILDSRMNTKYDENDKLIREVKVITLKSKLVSDFRKDFQFYKVREINNYHHAHDAYLNAVVGTALIKKYPKLESEFVYGDYKVYDVRKMIAKSEQEIGKATAKYFFYSNIMNFFKTEITLANGEIRKRPLIETNGETGEIVWDKGRDFATVRKVLSMPQVNIVKKTEVQTGGFSKESILPKRNSDKLIARKKDWDPKKYGGFDSPTVAYSVLVVAKVEKGKSKKLKSVKELLGITIMERSSFEKNPIDFLEAKGYKEVKKDLIIKLPKYSLFELENGRKRMLASAGELQKGNELALPSKYVNFLYLASHYEKLKGSPEDNEQKQLFVEQHKHYLDEIIEQISEFSKRVILADANLDKVLSAYNKHRDKPIREQAENIIHLFTLTNLGAPAAFKYFDTTIDRKRYTSTKEVLDATLIHQSITGLYETRIDLSQLGGDGGSGSETPGTSESATPESGGTLNIEDEYRLHETSKGPDVPLGSTWLSDFPQAWAETGGMGLAVRQAPLIIPLKATSTPVSIKQYPMSQEARLGIKPHIQRLLDQGILVPCQSPWNTPLLPVKKPGTNDYRPVQDLREVNKRVEDIHPTVPNPYNLLSGLPPSHQWYTVLDLKDAFFCLRLHPTSQSLFAFEWRDPEMGISGQLTWTRLPQGFKNSPTLFNEALHRDLADFRIQHPDLILLQYVDDLLLAATSELDCQQGTRALLQTLGDLGYRASAKKAQICQKQVKYLGYLLKEGQRWLTEARKETVMGQPTPKTPRQLREFLGTAGFCRLWIPGFAEMAAPLYPLTKPGTLFEWGPDQQKAYQEIKQALLTAPALGLPDLTKPFELFVDEKQGYAKGVLTQKLGPWRRPVAYLSKKLDPVAAGWPPCLRMVAAIAVLTKDAGKLTMGQPLVILAPHAVEALVKQPPDRWLSNARMTHYQALLLDTDRVQFGPIVALNPATLLPLPEEGLQHDCLDILAEAHGTRPDLTDQPLPDADHTWYTDGSSFLQEGQRKAGAAVTTETEVVWAKALPAGTSAQRAELIALTQALKMAEGKKLNVYTDSRYAFATAHIHGEIYRRRGWLTSEGKEIKNKDEILALLKALFLPKRLSIIHCPGHQKGNRAEARGNRMADQAAREVATRETPETSTLLAGKRTADGSEFEKRTADGSEFESPKKKAKVE

SEQ ID NO: 2490 - protein, 2097 aa, synthetic construct
MPAAKRVKLDGGDKKYSIGLDIGTNSVGWAVITDEYKVPSKKFKVLGNTDRHSIKKNLIGALLFDSGETAEATRLKRTARRRYTRRKNRICYLQEIFSNEMAKVDDSFFHRLEESFLVEEDKKHERHPIFGNIVDEVAYHEKYPTIYHLRKKLVDSTDKADLRLIYLALAHMIKFRGHFLIEGDLNPDNSDVDKLFIQLVQTYNQLFEENPINASGVDAKAILSARLSKSRRLENLIAQLPGEKKNGLFGNLIALSLGLTPNFKSNFDLAEDAKLQLSKDTYDDDLDNLLAQIGDQYADLFLAAKNLSDAILLSDILRVNTEITKAPLSASMIKRYDEHHQDLTLLKALVRQQLPEKYKEIFFDQSKNGYAGYIDGGASQEEFYKFIKPILEKMDGTEELLVKLNREDLLRKQRTFDNGSIPHQIHLGELHAILRRQEDFYPFLKDNREKIEKILTFRIPYYVGPLARGNSRFAWMTRKSEETITPWNFEEVVDKGASAQSFIERMTNFDKNLPNEKVLPKHSLLYEYFTVYNELTKVKYVTEGMRKPAFLSGEQKKAIVDLLFKTNRKVTVKQLKEDYFKKIECFDSVEISGVEDRFNASLGTYHDLLKIIKDKDFLDNEENEDILEDIVLTLTLFEDREMIEERLKTYAHLFDDKVMKQLKRRRYTGWGRLSRKLINGIRDKQSGKTILDFLKSDGFANRNFMQLIHDDSLTFKEDIQKAQVSGQGDSLHEHIANLAGSPAIKKGILQTVKVVDELVKVMGRHKPENIVIEMARENQTTQKGQKNSRERMKRIEEGIKELGSQILKEHPVENTQLQNEKLYLYYLQNGRDMYVDQELDINRLSDYDVDHIVPQSFLKDDSIDNKVLTRSDKARGKSDNVPSEEVVKKMKNYWRQLLNAKLITQRKFDNLTKAERGGLSELDKAGFIKRQLVETRQITKHVAQILDSRMNTKYDENDKLIREVKVITLKSKLVSDFRKDFQFYKVREINNYHHAHDAYLNAVVGTALIKKYPKLESEFVYGDYKVYDVRKMIAKSEQEIGKATAKYFFYSNIMNFFKTEITLANGEIRKRPLIETNGETGEIVWDKGRDFATVRKVLSMPQVNIVKKTEVQTGGFSKESILPKRNSDKLIARKKDWDPKKYGGFDSPTVAYSVLVVAKVEKGKSKKLKSVKELLGITIMERSSFEKNPIDFLEAKGYKEVKKDLIIKLPKYSLFELENGRKRMLASAGELQKGNELALPSKYVNFLYLASHYEKLKGSPEDNEQKQLFVEQHKHYLDEIIEQISEFSKRVILADANLDKVLSAYNKHRDKPIREQAENIIHLFTLTNLGAPAAFKYFDTTIDRKRYTSTKEVLDATLIHQSITGLYETRIDLSQLGGDGGGSAGSAAGSGEFGGTLNIEDEYRLHETSKGPDVPLGSTWLSDFPQAWAETGGMGLAVRQAPLIIPLKATSTPVSIKQYPMSQEARLGIKPHIQRLLDQGILVPCQSPWNTPLLPVKKPGTNDYRPVQDLREVNKRVEDIHPTVPNPYNLLSGLPPSHQWYTVLDLKDAFFCLRLHPTSQSLFAFEWRDPEMGISGQLTWTRLPQGFKNSPTLFNEALHRDLADFRIQHPDLILLQYVDDLLLAATSELDCQQGTRALLQTLGDLGYRASAKKAQICQKQVKYLGYLLKEGQRWLTEARKETVMGQPTPKTPRQLREFLGTAGFCRLWIPGFAEMAAPLYPLTKPGTLFEWGPDQQKAYQEIKQALLTAPALGLPDLTKPFELFVDEKQGYAKGVLTQKLGPWRRPVAYLSKKLDPVAAGWPPCLRMVAAIAVLTKDAGKLTMGQPLVILAPHAVEALVKQPPDRWLSNARMTHYQALLLDTDRVQFGPIVALNPATLLPLPEEGLQHDCLDILAEAHGTRPDLTDQPLPDADHTWYTDGSSFLQEGQRKAGAAVTTETEVVWAKALPAGTSAQRAELIALTQALKMAEGKKLNVYTDSRYAFATAHIHGEIYRRRGWLTSEGKEIKNKDEILALLKALFLPKRLSIIHCPGHQKGNRAEARGNRMADQAAREVATRETPETSTLLAGKRTADGSEFEKRTADGSEFESPKKKAKVE

SEQ ID NO: 2491 - protein, 2094 aa, synthetic construct
MPAAKRVKLDGGDKKYSIGLDIGTNSVGWAVITDEYKVPSKKFKVLGNTDRHSIKKNLIGALLFDSGETAEATRLKRTARRRYTRRKNRICYLQEIFSNEMAKVDDSFFHRLEESFLVEEDKKHERHPIFGNIVDEVAYHEKYPTIYHLRKKLVDSTDKADLRLIYLALAHMIKFRGHFLIEGDLNPDNSDVDKLFIQLVQTYNQLFEENPINASGVDAKAILSARLSKSRRLENLIAQLPGEKKNGLFGNLIALSLGLTPNFKSNFDLAEDAKLQLSKDTYDDDLDNLLAQIGDQYADLFLAAKNLSDAILLSDILRVNTEITKAPLSASMIKRYDEHHQDLTLLKALVRQQLPEKYKEIFFDQSKNGYAGYIDGGASQEEFYKFIKPILEKMDGTEELLVKLNREDLLRKQRTFDNGSIPHQIHLGELHAILRRQEDFYPFLKDNREKIEKILTFRIPYYVGPLARGNSRFAWMTRKSEETITPWNFEEVVDKGASAQSFIERMTNFDKNLPNEKVLPKHSLLYEYFTVYNELTKVKYVTEGMRKPAFLSGEQKKAIVDLLFKTNRKVTVKQLKEDYFKKIECFDSVEISGVEDRFNASLGTYHDLLKIIKDKDFLDNEENEDILEDIVLTLTLFEDREMIEERLKTYAHLFDDKVMKQLKRRRYTGWGRLSRKLINGIRDKQSGKTILDFLKSDGFANRNFMQLIHDDSLTFKEDIQKAQVSGQGDSLHEHIANLAGSPAIKKGILQTVKVVDELVKVMGRHKPENIVIEMARENQTTQKGQKNSRERMKRIEEGIKELGSQILKEHPVENTQLQNEKLYLYYLQNGRDMYVDQELDINRLSDYDVDHIVPQSFLKDDSIDNKVLTRSDKARGKSDNVPSEEVVKKMKNYWRQLLNAKLITQRKFDNLTKAERGGLSELDKAGFIKRQLVETRQITKHVAQILDSRMNTKYDENDKLIREVKVITLKSKLVSDFRKDFQFYKVREINNYHHAHDAYLNAVVGTALIKKYPKLESEFVYGDYKVYDVRKMIAKSEQEIGKATAKYFFYSNIMNFFKTEITLANGEIRKRPLIETNGETGEIVWDKGRDFATVRKVLSMPQVNIVKKTEVQTGGFSKESILPKRNSDKLIARKKDWDPKKYGGFDSPTVAYSVLVVAKVEKGKSKKLKSVKELLGITIMERSSFEKNPIDFLEAKGYKEVKKDLIIKLPKYSLFELENGRKRMLASAGELQKGNELALPSKYVNFLYLASHYEKLKGSPEDNEQKQLFVEQHKHYLDEIIEQISEFSKRVILADANLDKVLSAYNKHRDKPIREQAENIIHLFTLTNLGAPAAFKYFDTTIDRKRYTSTKEVLDATLIHQSITGLYETRIDLSQLGGDGGGSSGGSPAPGGTLNIEDEYRLHETSKGPDVPLGSTWLSDFPQAWAETGGMGLAVRQAPLIIPLKATSTPVSIKQYPMSQEARLGIKPHIQRLLDQGILVPCQSPWNTPLLPVKKPGTNDYRPVQDLREVNKRVEDIHPTVPNPYNLLSGLPPSHQWYTVLDLKDAFFCLRLHPTSQSLFAFEWRDPEMGISGQLTWTRLPQGFKNSPTLFNEALHRDLADFRIQHPDLILLQYVDDLLLAATSELDCQQGTRALLQTLGDLGYRASAKKAQICQKQVKYLGYLLKEGQRWLTEARKETVMGQPTPKTPRQLREFLGTAGFCRLWIPGFAEMAAPLYPLTKPGTLFEWGPDQQKAYQEIKQALLTAPALGLPDLTKPFELFVDEKQGYAKGVLTQKLGPWRRPVAYLSKKLDPVAAGWPPCLRMVAAIAVLTKDAGKLTMGQPLVILAPHAVEALVKQPPDRWLSNARMTHYQALLLDTDRVQFGPIVALNPATLLPLPEEGLQHDCLDILAEAHGTRPDLTDQPLPDADHTWYTDGSSFLQEGQRKAGAAVTTETEVVWAKALPAGTSAQRAELIALTQALKMAEGKKLNVYTDSRYAFATAHIHGEIYRRRGWLTSEGKEIKNKDEILALLKALFLPKRLSIIHCPGHQKGNRAEARGNRMADQAAREVATRETPETSTLLAGKRTADGSEFEKRTADGSEFESPKKKAKVE

SEQ ID NO: 2492 - protein, 2091 aa, synthetic construct
MPAAKRVKLDGGDKKYSIGLDIGTNSVGWAVITDEYKVPSKKFKVLGNTDRHSIKKNLIGALLFDSGETAEATRLKRTARRRYTRRKNRICYLQEIFSNEMAKVDDSFFHRLEESFLVEEDKKHERHPIFGNIVDEVAYHEKYPTIYHLRKKLVDSTDKADLRLIYLALAHMIKFRGHFLIEGDLNPDNSDVDKLFIQLVQTYNQLFEENPINASGVDAKAILSARLSKSRRLENLIAQLPGEKKNGLFGNLIALSLGLTPNFKSNFDLAEDAKLQLSKDTYDDDLDNLLAQIGDQYADLFLAAKNLSDAILLSDILRVNTEITKAPLSASMIKRYDEHHQDLTLLKALVRQQLPEKYKEIFFDQSKNGYAGYIDGGASQEEFYKFIKPILEKMDGTEELLVKLNREDLLRKQRTFDNGSIPHQIHLGELHAILRRQEDFYPFLKDNREKIEKILTFRIPYYVGPLARGNSRFAWMTRKSEETITPWNFEEVVDKGASAQSFIERMTNFDKNLPNEKVLPKHSLLYEYFTVYNELTKVKYVTEGMRKPAFLSGEQKKAIVDLLFKTNRKVTVKQLKEDYFKKIECFDSVEISGVEDRFNASLGTYHDLLKIIKDKDFLDNEENEDILEDIVLTLTLFEDREMIEERLKTYAHLFDDKVMKQLKRRRYTGWGRLSRKLINGIRDKQSGKTILDFLKSDGFANRNFMQLIHDDSLTFKEDIQKAQVSGQGDSLHEHIANLAGSPAIKKGILQTVKVVDELVKVMGRHKPENIVIEMARENQTTQKGQKNSRERMKRIEEGIKELGSQILKEHPVENTQLQNEKLYLYYLQNGRDMYVDQELDINRLSDYDVDHIVPQSFLKDDSIDNKVLTRSDKARGKSDNVPSEEVVKKMKNYWRQLLNAKLITQRKFDNLTKAERGGLSELDKAGFIKRQLVETRQITKHVAQILDSRMNTKYDENDKLIREVKVITLKSKLVSDFRKDFQFYKVREINNYHHAHDAYLNAVVGTALIKKYPKLESEFVYGDYKVYDVRKMIAKSEQEIGKATAKYFFYSNIMNFFKTEITLANGEIRKRPLIETNGETGEIVWDKGRDFATVRKVLSMPQVNIVKKTEVQTGGFSKESILPKRNSDKLIARKKDWDPKKYGGFDSPTVAYSVLVVAKVEKGKSKKLKSVKELLGITIMERSSFEKNPIDFLEAKGYKEVKKDLIIKLPKYSLFELENGRKRMLASAGELQKGNELALPSKYVNFLYLASHYEKLKGSPEDNEQKQLFVEQHKHYLDEIIEQISEFSKRVILADANLDKVLSAYNKHRDKPIREQAENIIHLFTLTNLGAPAAFKYFDTTIDRKRYTSTKEVLDATLIHQSITGLYETRIDLSQLGGDGGPAPGGGGGTLNIEDEYRLHETSKGPDVPLGSTWLSDFPQAWAETGGMGLAVRQAPLIIPLKATSTPVSIKQYPMSQEARLGIKPHIQRLLDQGILVPCQSPWNTPLLPVKKPGTNDYRPVQDLREVNKRVEDIHPTVPNPYNLLSGLPPSHQWYTVLDLKDAFFCLRLHPTSQSLFAFEWRDPEMGISGQLTWTRLPQGFKNSPTLFNEALHRDLADFRIQHPDLILLQYVDDLLLAATSELDCQQGTRALLQTLGDLGYRASAKKAQICQKQVKYLGYLLKEGQRWLTEARKETVMGQPTPKTPRQLREFLGTAGFCRLWIPGFAEMAAPLYPLTKPGTLFEWGPDQQKAYQEIKQALLTAPALGLPDLTKPFELFVDEKQGYAKGVLTQKLGPWRRPVAYLSKKLDPVAAGWPPCLRMVAAIAVLTKDAGKLTMGQPLVILAPHAVEALVKQPPDRWLSNARMTHYQALLLDTDRVQFGPIVALNPATLLPLPEEGLQHDCLDILAEAHGTRPDLTDQPLPDADHTWYTDGSSFLQEGQRKAGAAVTTETEVVWAKALPAGTSAQRAELIALTQALKMAEGKKLNVYTDSRYAFATAHIHGEIYRRRGWLTSEGKEIKNKDEILALLKALFLPKRLSIIHCPGHQKGNRAEARGNRMADQAAREVATRETPETSTLLAGKRTADGSEFEKRTADGSEFESPKKKAKVE

SEQ ID NO: 2493 - protein, 2094 aa, synthetic construct
MPAAKRVKLDGGDKKYSIGLDIGTNSVGWAVITDEYKVPSKKFKVLGNTDRHSIKKNLIGALLFDSGETAEATRLKRTARRRYTRRKNRICYLQEIFSNEMAKVDDSFFHRLEESFLVEEDKKHERHPIFGNIVDEVAYHEKYPTIYHLRKKLVDSTDKADLRLIYLALAHMIKFRGHFLIEGDLNPDNSDVDKLFIQLVQTYNQLFEENPINASGVDAKAILSARLSKSRRLENLIAQLPGEKKNGLFGNLIALSLGLTPNFKSNFDLAEDAKLQLSKDTYDDDLDNLLAQIGDQYADLFLAAKNLSDAILLSDILRVNTEITKAPLSASMIKRYDEHHQDLTLLKALVRQQLPEKYKEIFFDQSKNGYAGYIDGGASQEEFYKFIKPILEKMDGTEELLVKLNREDLLRKQRTFDNGSIPHQIHLGELHAILRRQEDFYPFLKDNREKIEKILTFRIPYYVGPLARGNSRFAWMTRKSEETITPWNFEEVVDKGASAQSFIERMTNFDKNLPNEKVLPKHSLLYEYFTVYNELTKVKYVTEGMRKPAFLSGEQKKAIVDLLFKTNRKVTVKQLKEDYFKKIECFDSVEISGVEDRFNASLGTYHDLLKIIKDKDFLDNEENEDILEDIVLTLTLFEDREMIEERLKTYAHLFDDKVMKQLKRRRYTGWGRLSRKLINGIRDKQSGKTILDFLKSDGFANRNFMQLIHDDSLTFKEDIQKAQVSGQGDSLHEHIANLAGSPAIKKGILQTVKVVDELVKVMGRHKPENIVIEMARENQTTQKGQKNSRERMKRIEEGIKELGSQILKEHPVENTQLQNEKLYLYYLQNGRDMYVDQELDINRLSDYDVDHIVPQSFLKDDSIDNKVLTRSDKARGKSDNVPSEEVVKKMKNYWRQLLNAKLITQRKFDNLTKAERGGLSELDKAGFIKRQLVETRQITKHVAQILDSRMNTKYDENDKLIREVKVITLKSKLVSDFRKDFQFYKVREINNYHHAHDAYLNAVVGTALIKKYPKLESEFVYGDYKVYDVRKMIAKSEQEIGKATAKYFFYSNIMNFFKTEITLANGEIRKRPLIETNGETGEIVWDKGRDFATVRKVLSMPQVNIVKKTEVQTGGFSKESILPKRNSDKLIARKKDWDPKKYGGFDSPTVAYSVLVVAKVEKGKSKKLKSVKELLGITIMERSSFEKNPIDFLEAKGYKEVKKDLIIKLPKYSLFELENGRKRMLASAGELQKGNELALPSKYVNFLYLASHYEKLKGSPEDNEQKQLFVEQHKHYLDEIIEQISEFSKRVILADANLDKVLSAYNKHRDKPIREQAENIIHLFTLTNLGAPAAFKYFDTTIDRKRYTSTKEVLDATLIHQSITGLYETRIDLSQLGGDGGPAPGGSGGGGGTLNIEDEYRLHETSKGPDVPLGSTWLSDFPQAWAETGGMGLAVRQAPLIIPLKATSTPVSIKQYPMSQEARLGIKPHIQRLLDQGILVPCQSPWNTPLLPVKKPGTNDYRPVQDLREVNKRVEDIHPTVPNPYNLLSGLPPSHQWYTVLDLKDAFFCLRLHPTSQSLFAFEWRDPEMGISGQLTWTRLPQGFKNSPTLFNEALHRDLADFRIQHPDLILLQYVDDLLLAATSELDCQQGTRALLQTLGDLGYRASAKKAQICQKQVKYLGYLLKEGQRWLTEARKETVMGQPTPKTPRQLREFLGTAGFCRLWIPGFAEMAAPLYPLTKPGTLFEWGPDQQKAYQEIKQALLTAPALGLPDLTKPFELFVDEKQGYAKGVLTQKLGPWRRPVAYLSKKLDPVAAGWPPCLRMVAAIAVLTKDAGKLTMGQPLVILAPHAVEALVKQPPDRWLSNARMTHYQALLLDTDRVQFGPIVALNPATLLPLPEEGLQHDCLDILAEAHGTRPDLTDQPLPDADHTWYTDGSSFLQEGQRKAGAAVTTETEVVWAKALPAGTSAQRAELIALTQALKMAEGKKLNVYTDSRYAFATAHIHGEIYRRRGWLTSEGKEIKNKDEILALLKALFLPKRLSIIHCPGHQKGNRAEARGNRMADQAAREVATRETPETSTLLAGKRTADGSEFEKRTADGSEFESPKKKAKVE

SEQ ID NO: 2494 - protein, 2096 aa, synthetic construct
MPAAKRVKLDGGDKKYSIGLDIGTNSVGWAVITDEYKVPSKKFKVLGNTDRHSIKKNLIGALLFDSGETAEATRLKRTARRRYTRRKNRICYLQEIFSNEMAKVDDSFFHRLEESFLVEEDKKHERHPIFGNIVDEVAYHEKYPTIYHLRKKLVDSTDKADLRLIYLALAHMIKFRGHFLIEGDLNPDNSDVDKLFIQLVQTYNQLFEENPINASGVDAKAILSARLSKSRRLENLIAQLPGEKKNGLFGNLIALSLGLTPNFKSNFDLAEDAKLQLSKDTYDDDLDNLLAQIGDQYADLFLAAKNLSDAILLSDILRVNTEITKAPLSASMIKRYDEHHQDLTLLKALVRQQLPEKYKEIFFDQSKNGYAGYIDGGASQEEFYKFIKPILEKMDGTEELLVKLNREDLLRKQRTFDNGSIPHQIHLGELHAILRRQEDFYPFLKDNREKIEKILTFRIPYYVGPLARGNSRFAWMTRKSEETITPWNFEEVVDKGASAQSFIERMTNFDKNLPNEKVLPKHSLLYEYFTVYNELTKVKYVTEGMRKPAFLSGEQKKAIVDLLFKTNRKVTVKQLKEDYFKKIECFDSVEISGVEDRFNASLGTYHDLLKIIKDKDFLDNEENEDILEDIVLTLTLFEDREMIEERLKTYAHLFDDKVMKQLKRRRYTGWGRLSRKLINGIRDKQSGKTILDFLKSDGFANRNFMQLIHDDSLTFKEDIQKAQVSGQGDSLHEHIANLAGSPAIKKGILQTVKVVDELVKVMGRHKPENIVIEMARENQTTQKGQKNSRERMKRIEEGIKELGSQILKEHPVENTQLQNEKLYLYYLQNGRDMYVDQELDINRLSDYDVDHIVPQSFLKDDSIDNKVLTRSDKARGKSDNVPSEEVVKKMKNYWRQLLNAKLITQRKFDNLTKAERGGLSELDKAGFIKRQLVETRQITKHVAQILDSRMNTKYDENDKLIREVKVITLKSKLVSDFRKDFQFYKVREINNYHHAHDAYLNAVVGTALIKKYPKLESEFVYGDYKVYDVRKMIAKSEQEIGKATAKYFFYSNIMNFFKTEITLANGEIRKRPLIETNGETGEIVWDKGRDFATVRKVLSMPQVNIVKKTEVQTGGFSKESILPKRNSDKLIARKKDWDPKKYGGFDSPTVAYSVLVVAKVEKGKSKKLKSVKELLGITIMERSSFEKNPIDFLEAKGYKEVKKDLIIKLPKYSLFELENGRKRMLASAGELQKGNELALPSKYVNFLYLASHYEKLKGSPEDNEQKQLFVEQHKHYLDEIIEQISEFSKRVILADANLDKVLSAYNKHRDKPIREQAENIIHLFTLTNLGAPAAFKYFDTTIDRKRYTSTKEVLDATLIHQSITGLYETRIDLSQLGGDGGPAPEAAAKGGGGGTLNIEDEYRLHETSKGPDVPLGSTWLSDFPQAWAETGGMGLAVRQAPLIIPLKATSTPVSIKQYPMSQEARLGIKPHIQRLLDQGILVPCQSPWNTPLLPVKKPGTNDYRPVQDLREVNKRVEDIHPTVPNPYNLLSGLPPSHQWYTVLDLKDAFFCLRLHPTSQSLFAFEWRDPEMGISGQLTWTRLPQGFKNSPTLFNEALHRDLADFRIQHPDLILLQYVDDLLLAATSELDCQQGTRALLQTLGDLGYRASAKKAQICQKQVKYLGYLLKEGQRWLTEARKETVMGQPTPKTPRQLREFLGTAGFCRLWIPGFAEMAAPLYPLTKPGTLFEWGPDQQKAYQEIKQALLTAPALGLPDLTKPFELFVDEKQGYAKGVLTQKLGPWRRPVAYLSKKLDPVAAGWPPCLRMVAAIAVLTKDAGKLTMGQPLVILAPHAVEALVKQPPDRWLSNARMTHYQALLLDTDRVQFGPIVALNPATLLPLPEEGLQHDCLDILAEAHGTRPDLTDQPLPDADHTWYTDGSSFLQEGQRKAGAAVTTETEVVWAKALPAGTSAQRAELIALTQALKMAEGKKLNVYTDSRYAFATAHIHGEIYRRRGWLTSEGKEIKNKDEILALLKALFLPKRLSIIHCPGHQKGNRAEARGNRMADQAAREVATRETPETSTLLAGKRTADGSEFEKRTADGSEFESPKKKAKVE

SEQ ID NO: 2495 - protein, 2096 aa, synthetic construct
MPAAKRVKLDGGDKKYSIGLDIGTNSVGWAVITDEYKVPSKKFKVLGNTDRHSIKKNLIGALLFDSGETAEATRLKRTARRRYTRRKNRICYLQEIFSNEMAKVDDSFFHRLEESFLVEEDKKHERHPIFGNIVDEVAYHEKYPTIYHLRKKLVDSTDKADLRLIYLALAHMIKFRGHFLIEGDLNPDNSDVDKLFIQLVQTYNQLFEENPINASGVDAKAILSARLSKSRRLENLIAQLPGEKKNGLFGNLIALSLGLTPNFKSNFDLAEDAKLQLSKDTYDDDLDNLLAQIGDQYADLFLAAKNLSDAILLSDILRVNTEITKAPLSASMIKRYDEHHQDLTLLKALVRQQLPEKYKEIFFDQSKNGYAGYIDGGASQEEFYKFIKPILEKMDGTEELLVKLNREDLLRKQRTFDNGSIPHQIHLGELHAILRRQEDFYPFLKDNREKIEKILTFRIPYYVGPLARGNSRFAWMTRKSEETITPWNFEEVVDKGASAQSFIERMTNFDKNLPNEKVLPKHSLLYEYFTVYNELTKVKYVTEGMRKPAFLSGEQKKAIVDLLFKTNRKVTVKQLKEDYFKKIECFDSVEISGVEDRFNASLGTYHDLLKIIKDKDFLDNEENEDILEDIVLTLTLFEDREMIEERLKTYAHLFDDKVMKQLKRRRYTGWGRLSRKLINGIRDKQSGKTILDFLKSDGFANRNFMQLIHDDSLTFKEDIQKAQVSGQGDSLHEHIANLAGSPAIKKGILQTVKVVDELVKVMGRHKPENIVIEMARENQTTQKGQKNSRERMKRIEEGIKELGSQILKEHPVENTQLQNEKLYLYYLQNGRDMYVDQELDINRLSDYDVDHIVPQSFLKDDSIDNKVLTRSDKARGKSDNVPSEEVVKKMKNYWRQLLNAKLITQRKFDNLTKAERGGLSELDKAGFIKRQLVETRQITKHVAQILDSRMNTKYDENDKLIREVKVITLKSKLVSDFRKDFQFYKVREINNYHHAHDAYLNAVVGTALIKKYPKLESEFVYGDYKVYDVRKMIAKSEQEIGKATAKYFFYSNIMNFFKTEITLANGEIRKRPLIETNGETGEIVWDKGRDFATVRKVLSMPQVNIVKKTEVQTGGFSKESILPKRNSDKLIARKKDWDPKKYGGFDSPTVAYSVLVVAKVEKGKSKKLKSVKELLGITIMERSSFEKNPIDFLEAKGYKEVKKDLIIKLPKYSLFELENGRKRMLASAGELQKGNELALPSKYVNFLYLASHYEKLKGSPEDNEQKQLFVEQHKHYLDEIIEQISEFSKRVILADANLDKVLSAYNKHRDKPIREQAENIIHLFTLTNLGAPAAFKYFDTTIDRKRYTSTKEVLDATLIHQSITGLYETRIDLSQLGGDGGEAAAKPAPGGSGGTLNIEDEYRLHETSKGPDVPLGSTWLSDFPQAWAETGGMGLAVRQAPLIIPLKATSTPVSIKQYPMSQEARLGIKPHIQRLLDQGILVPCQSPWNTPLLPVKKPGTNDYRPVQDLREVNKRVEDIHPTVPNPYNLLSGLPPSHQWYTVLDLKDAFFCLRLHPTSQSLFAFEWRDPEMGISGQLTWTRLPQGFKNSPTLFNEALHRDLADFRIQHPDLILLQYVDDLLLAATSELDCQQGTRALLQTLGDLGYRASAKKAQICQKQVKYLGYLLKEGQRWLTEARKETVMGQPTPKTPRQLREFLGTAGFCRLWIPGFAEMAAPLYPLTKPGTLFEWGPDQQKAYQEIKQALLTAPALGLPDLTKPFELFVDEKQGYAKGVLTQKLGPWRRPVAYLSKKLDPVAAGWPPCLRMVAAIAVLTKDAGKLTMGQPLVILAPHAVEALVKQPPDRWLSNARMTHYQALLLDTDRVQFGPIVALNPATLLPLPEEGLQHDCLDILAEAHGTRPDLTDQPLPDADHTWYTDGSSFLQEGQRKAGAAVTTETEVVWAKALPAGTSAQRAELIALTQALKMAEGKKLNVYTDSRYAFATAHIHGEIYRRRGWLTSEGKEIKNKDEILALLKALFLPKRLSIIHCPGHQKGNRAEARGNRMADQAAREVATRETPETSTLLAGKRTADGSEFEKRTADGSEFESPKKKAKVE

SEQ ID NO: 2496 - protein, 2094 aa, synthetic construct
MPAAKRVKLDGGDKKYSIGLDIGTNSVGWAVITDEYKVPSKKFKVLGNTDRHSIKKNLIGALLFDSGETAEATRLKRTARRRYTRRKNRICYLQEIFSNEMAKVDDSFFHRLEESFLVEEDKKHERHPIFGNIVDEVAYHEKYPTIYHLRKKLVDSTDKADLRLIYLALAHMIKFRGHFLIEGDLNPDNSDVDKLFIQLVQTYNQLFEENPINASGVDAKAILSARLSKSRRLENLIAQLPGEKKNGLFGNLIALSLGLTPNFKSNFDLAEDAKLQLSKDTYDDDLDNLLAQIGDQYADLFLAAKNLSDAILLSDILRVNTEITKAPLSASMIKRYDEHHQDLTLLKALVRQQLPEKYKEIFFDQSKNGYAGYIDGGASQEEFYKFIKPILEKMDGTEELLVKLNREDLLRKQRTFDNGSIPHQIHLGELHAILRRQEDFYPFLKDNREKIEKILTFRIPYYVGPLARGNSRFAWMTRKSEETITPWNFEEVVDKGASAQSFIERMTNFDKNLPNEKVLPKHSLLYEYFTVYNELTKVKYVTEGMRKPAFLSGEQKKAIVDLLFKTNRKVTVKQLKEDYFKKIECFDSVEISGVEDRFNASLGTYHDLLKIIKDKDFLDNEENEDILEDIVLTLTLFEDREMIEERLKTYAHLFDDKVMKQLKRRRYTGWGRLSRKLINGIRDKQSGKTILDFLKSDGFANRNFMQLIHDDSLTFKEDIQKAQVSGQGDSLHEHIANLAGSPAIKKGILQTVKVVDELVKVMGRHKPENIVIEMARENQTTQKGQKNSRERMKRIEEGIKELGSQILKEHPVENTQLQNEKLYLYYLQNGRDMYVDQELDINRLSDYDVDHIVPQSFLKDDSIDNKVLTRSDKARGKSDNVPSEEVVKKMKNYWRQLLNAKLITQRKFDNLTKAERGGLSELDKAGFIKRQLVETRQITKHVAQILDSRMNTKYDENDKLIREVKVITLKSKLVSDFRKDFQFYKVREINNYHHAHDAYLNAVVGTALIKKYPKLESEFVYGDYKVYDVRKMIAKSEQEIGKATAKYFFYSNIMNFFKTEITLANGEIRKRPLIETNGETGEIVWDKGRDFATVRKVLSMPQVNIVKKTEVQTGGFSKESILPKRNSDKLIARKKDWDPKKYGGFDSPTVAYSVLVVAKVEKGKSKKLKSVKELLGITIMERSSFEKNPIDFLEAKGYKEVKKDLIIKLPKYSLFELENGRKRMLASAGELQKGNELALPSKYVNFLYLASHYEKLKGSPEDNEQKQLFVEQHKHYLDEIIEQISEFSKRVILADANLDKVLSAYNKHRDKPIREQAENIIHLFTLTNLGAPAAFKYFDTTIDRKRYTSTKEVLDATLIHQSITGLYETRIDLSQLGGDGGGGGPAPGGSGGTLNIEDEYRLHETSKGPDVPLGSTWLSDFPQAWAETGGMGLAVRQAPLIIPLKATSTPVSIKQYPMSQEARLGIKPHIQRLLDQGILVPCQSPWNTPLLPVKKPGTNDYRPVQDLREVNKRVEDIHPTVPNPYNLLSGLPPSHQWYTVLDLKDAFFCLRLHPTSQSLFAFEWRDPEMGISGQLTWTRLPQGFKNSPTLFNEALHRDLADFRIQHPDLILLQYVDDLLLAATSELDCQQGTRALLQTLGDLGYRASAKKAQICQKQVKYLGYLLKEGQRWLTEARKETVMGQPTPKTPRQLREFLGTAGFCRLWIPGFAEMAAPLYPLTKPGTLFEWGPDQQKAYQEIKQALLTAPALGLPDLTKPFELFVDEKQGYAKGVLTQKLGPWRRPVAYLSKKLDPVAAGWPPCLRMVAAIAVLTKDAGKLTMGQPLVILAPHAVEALVKQPPDRWLSNARMTHYQALLLDTDRVQFGPIVALNPATLLPLPEEGLQHDCLDILAEAHGTRPDLTDQPLPDADHTWYTDGSSFLQEGQRKAGAAVTTETEVVWAKALPAGTSAQRAELIALTQALKMAEGKKLNVYTDSRYAFATAHIHGEIYRRRGWLTSEGKEIKNKDEILALLKALFLPKRLSIIHCPGHQKGNRAEARGNRMADQAAREVATRETPETSTLLAGKRTADGSEFEKRTADGSEFESPKKKAKVE

SEQ ID NO: 2497 - protein, 2091 aa, synthetic construct
MPAAKRVKLDGGDKKYSIGLDIGTNSVGWAVITDEYKVPSKKFKVLGNTDRHSIKKNLIGALLFDSGETAEATRLKRTARRRYTRRKNRICYLQEIFSNEMAKVDDSFFHRLEESFLVEEDKKHERHPIFGNIVDEVAYHEKYPTIYHLRKKLVDSTDKADLRLIYLALAHMIKFRGHFLIEGDLNPDNSDVDKLFIQLVQTYNQLFEENPINASGVDAKAILSARLSKSRRLENLIAQLPGEKKNGLFGNLIALSLGLTPNFKSNFDLAEDAKLQLSKDTYDDDLDNLLAQIGDQYADLFLAAKNLSDAILLSDILRVNTEITKAPLSASMIKRYDEHHQDLTLLKALVRQQLPEKYKEIFFDQSKNGYAGYIDGGASQEEFYKFIKPILEKMDGTEELLVKLNREDLLRKQRTFDNGSIPHQIHLGELHAILRRQEDFYPFLKDNREKIEKILTFRIPYYVGPLARGNSRFAWMTRKSEETITPWNFEEVVDKGASAQSFIERMTNFDKNLPNEKVLPKHSLLYEYFTVYNELTKVKYVTEGMRKPAFLSGEQKKAIVDLLFKTNRKVTVKQLKEDYFKKIECFDSVEISGVEDRFNASLGTYHDLLKIIKDKDFLDNEENEDILEDIVLTLTLFEDREMIEERLKTYAHLFDDKVMKQLKRRRYTGWGRLSRKLINGIRDKQSGKTILDFLKSDGFANRNFMQLIHDDSLTFKEDIQKAQVSGQGDSLHEHIANLAGSPAIKKGILQTVKVVDELVKVMGRHKPENIVIEMARENQTTQKGQKNSRERMKRIEEGIKELGSQILKEHPVENTQLQNEKLYLYYLQNGRDMYVDQELDINRLSDYDVDHIVPQSFLKDDSIDNKVLTRSDKARGKSDNVPSEEVVKKMKNYWRQLLNAKLITQRKFDNLTKAERGGLSELDKAGFIKRQLVETRQITKHVAQILDSRMNTKYDENDKLIREVKVITLKSKLVSDFRKDFQFYKVREINNYHHAHDAYLNAVVGTALIKKYPKLESEFVYGDYKVYDVRKMIAKSEQEIGKATAKYFFYSNIMNFFKTEITLANGEIRKRPLIETNGETGEIVWDKGRDFATVRKVLSMPQVNIVKKTEVQTGGFSKESILPKRNSDKLIARKKDWDPKKYGGFDSPTVAYSVLVVAKVEKGKSKKLKSVKELLGITIMERSSFEKNPIDFLEAKGYKEVKKDLIIKLPKYSLFELENGRKRMLASAGELQKGNELALPSKYVNFLYLASHYEKLKGSPEDNEQKQLFVEQHKHYLDEIIEQISEFSKRVILADANLDKVLSAYNKHRDKPIREQAENIIHLFTLTNLGAPAAFKYFDTTIDRKRYTSTKEVLDATLIHQSITGLYETRIDLSQLGGDGGPAPGGSGGTLNIEDEYRLHETSKGPDVPLGSTWLSDFPQAWAETGGMGLAVRQAPLIIPLKATSTPVSIKQYPMSQEARLGIKPHIQRLLDQGILVPCQSPWNTPLLPVKKPGTNDYRPVQDLREVNKRVEDIHPTVPNPYNLLSGLPPSHQWYTVLDLKDAFFCLRLHPTSQSLFAFEWRDPEMGISGQLTWTRLPQGFKNSPTLFNEALHRDLADFRIQHPDLILLQYVDDLLLAATSELDCQQGTRALLQTLGDLGYRASAKKAQICQKQVKYLGYLLKEGQRWLTEARKETVMGQPTPKTPRQLREFLGTAGFCRLWIPGFAEMAAPLYPLTKPGTLFEWGPDQQKAYQEIKQALLTAPALGLPDLTKPFELFVDEKQGYAKGVLTQKLGPWRRPVAYLSKKLDPVAAGWPPCLRMVAAIAVLTKDAGKLTMGQPLVILAPHAVEALVKQPPDRWLSNARMTHYQALLLDTDRVQFGPIVALNPATLLPLPEEGLQHDCLDILAEAHGTRPDLTDQPLPDADHTWYTDGSSFLQEGQRKAGAAVTTETEVVWAKALPAGTSAQRAELIALTQALKMAEGKKLNVYTDSRYAFATAHIHGEIYRRRGWLTSEGKEIKNKDEILALLKALFLPKRLSIIHCPGHQKGNRAEARGNRMADQAAREVATRETPETSTLLAGKRTADGSEFEKRTADGSEFESPKKKAKVE

SEQ ID NO: 2498 - protein, 2094 aa, synthetic construct
MPAAKRVKLDGGDKKYSIGLDIGTNSVGWAVITDEYKVPSKKFKVLGNTDRHSIKKNLIGALLFDSGETAEATRLKRTARRRYTRRKNRICYLQEIFSNEMAKVDDSFFHRLEESFLVEEDKKHERHPIFGNIVDEVAYHEKYPTIYHLRKKLVDSTDKADLRLIYLALAHMIKFRGHFLIEGDLNPDNSDVDKLFIQLVQTYNQLFEENPINASGVDAKAILSARLSKSRRLENLIAQLPGEKKNGLFGNLIALSLGLTPNFKSNFDLAEDAKLQLSKDTYDDDLDNLLAQIGDQYADLFLAAKNLSDAILLSDILRVNTEITKAPLSASMIKRYDEHHQDLTLLKALVRQQLPEKYKEIFFDQSKNGYAGYIDGGASQEEFYKFIKPILEKMDGTEELLVKLNREDLLRKQRTFDNGSIPHQIHLGELHAILRRQEDFYPFLKDNREKIEKILTFRIPYYVGPLARGNSRFAWMTRKSEETITPWNFEEVVDKGASAQSFIERMTNFDKNLPNEKVLPKHSLLYEYFTVYNELTKVKYVTEGMRKPAFLSGEQKKAIVDLLFKTNRKVTVKQLKEDYFKKIECFDSVEISGVEDRFNASLGTYHDLLKIIKDKDFLDNEENEDILEDIVLTLTLFEDREMIEERLKTYAHLFDDKVMKQLKRRRYTGWGRLSRKLINGIRDKQSGKTILDFLKSDGFANRNFMQLIHDDSLTFKEDIQKAQVSGQGDSLHEHIANLAGSPAIKKGILQTVKVVDELVKVMGRHKPENIVIEMARENQTTQKGQKNSRERMKRIEEGIKELGSQILKEHPVENTQLQNEKLYLYYLQNGRDMYVDQELDINRLSDYDVDHIVPQSFLKDDSIDNKVLTRSDKARGKSDNVPSEEVVKKMKNYWRQLLNAKLITQRKFDNLTKAERGGLSELDKAGFIKRQLVETRQITKHVAQILDSRMNTKYDENDKLIREVKVITLKSKLVSDFRKDFQFYKVREINNYHHAHDAYLNAVVGTALIKKYPKLESEFVYGDYKVYDVRKMIAKSEQEIGKATAKYFFYSNIMNFFKTEITLANGEIRKRPLIETNGETGEIVWDKGRDFATVRKVLSMPQVNIVKKTEVQTGGFSKESILPKRNSDKLIARKKDWDPKKYGGFDSPTVAYSVLVVAKVEKGKSKKLKSVKELLGITIMERSSFEKNPIDFLEAKGYKEVKKDLIIKLPKYSLFELENGRKRMLASAGELQKGNELALPSKYVNFLYLASHYEKLKGSPEDNEQKQLFVEQHKHYLDEIIEQISEFSKRVILADANLDKVLSAYNKHRDKPIREQAENIIHLFTLTNLGAPAAFKYFDTTIDRKRYTSTKEVLDATLIHQSITGLYETRIDLSQLGGDGGGGGGGSPAPGGTLNIEDEYRLHETSKGPDVPLGSTWLSDFPQAWAETGGMGLAVRQAPLIIPLKATSTPVSIKQYPMSQEARLGIKPHIQRLLDQGILVPCQSPWNTPLLPVKKPGTNDYRPVQDLREVNKRVEDIHPTVPNPYNLLSGLPPSHQWYTVLDLKDAFFCLRLHPTSQSLFAFEWRDPEMGISGQLTWTRLPQGFKNSPTLFNEALHRDLADFRIQHPDLILLQYVDDLLLAATSELDCQQGTRALLQTLGDLGYRASAKKAQICQKQVKYLGYLLKEGQRWLTEARKETVMGQPTPKTPRQLREFLGTAGFCRLWIPGFAEMAAPLYPLTKPGTLFEWGPDQQKAYQEIKQALLTAPALGLPDLTKPFELFVDEKQGYAKGVLTQKLGPWRRPVAYLSKKLDPVAAGWPPCLRMVAAIAVLTKDAGKLTMGQPLVILAPHAVEALVKQPPDRWLSNARMTHYQALLLDTDRVQFGPIVALNPATLLPLPEEGLQHDCLDILAEAHGTRPDLTDQPLPDADHTWYTDGSSFLQEGQRKAGAAVTTETEVVWAKALPAGTSAQRAELIALTQALKMAEGKKLNVYTDSRYAFATAHIHGEIYRRRGWLTSEGKEIKNKDEILALLKALFLPKRLSIIHCPGHQKGNRAEARGNRMADQAAREVATRETPETSTLLAGKRTADGSEFEKRTADGSEFESPKKKAKVE

SEQ ID NO: 2499 - protein, 2094 aa, synthetic construct
MPAAKRVKLDGGDKKYSIGLDIGTNSVGWAVITDEYKVPSKKFKVLGNTDRHSIKKNLIGALLFDSGETAEATRLKRTARRRYTRRKNRICYLQEIFSNEMAKVDDSFFHRLEESFLVEEDKKHERHPIFGNIVDEVAYHEKYPTIYHLRKKLVDSTDKADLRLIYLALAHMIKFRGHFLIEGDLNPDNSDVDKLFIQLVQTYNQLFEENPINASGVDAKAILSARLSKSRRLENLIAQLPGEKKNGLFGNLIALSLGLTPNFKSNFDLAEDAKLQLSKDTYDDDLDNLLAQIGDQYADLFLAAKNLSDAILLSDILRVNTEITKAPLSASMIKRYDEHHQDLTLLKALVRQQLPEKYKEIFFDQSKNGYAGYIDGGASQEEFYKFIKPILEKMDGTEELLVKLNREDLLRKQRTFDNGSIPHQIHLGELHAILRRQEDFYPFLKDNREKIEKILTFRIPYYVGPLARGNSRFAWMTRKSEETITPWNFEEVVDKGASAQSFIERMTNFDKNLPNEKVLPKHSLLYEYFTVYNELTKVKYVTEGMRKPAFLSGEQKKAIVDLLFKTNRKVTVKQLKEDYFKKIECFDSVEISGVEDRFNASLGTYHDLLKIIKDKDFLDNEENEDILEDIVLTLTLFEDREMIEERLKTYAHLFDDKVMKQLKRRRYTGWGRLSRKLINGIRDKQSGKTILDFLKSDGFANRNFMQLIHDDSLTFKEDIQKAQVSGQGDSLHEHIANLAGSPAIKKGILQTVKVVDELVKVMGRHKPENIVIEMARENQTTQKGQKNSRERMKRIEEGIKELGSQILKEHPVENTQLQNEKLYLYYLQNGRDMYVDQELDINRLSDYDVDHIVPQSFLKDDSIDNKVLTRSDKARGKSDNVPSEEVVKKMKNYWRQLLNAKLITQRKFDNLTKAERGGLSELDKAGFIKRQLVETRQITKHVAQILDSRMNTKYDENDKLIREVKVITLKSKLVSDFRKDFQFYKVREINNYHHAHDAYLNAVVGTALIKKYPKLESEFVYGDYKVYDVRKMIAKSEQEIGKATAKYFFYSNIMNFFKTEITLANGEIRKRPLIETNGETGEIVWDKGRDFATVRKVLSMPQVNIVKKTEVQTGGFSKESILPKRNSDKLIARKKDWDPKKYGGFDSPTVAYSVLVVAKVEKGKSKKLKSVKELLGITIMERSSFEKNPIDFLEAKGYKEVKKDLIIKLPKYSLFELENGRKRMLASAGELQKGNELALPSKYVNFLYLASHYEKLKGSPEDNEQKQLFVEQHKHYLDEIIEQISEFSKRVILADANLDKVLSAYNKHRDKPIREQAENIIHLFTLTNLGAPAAFKYFDTTIDRKRYTSTKEVLDATLIHQSITGLYETRIDLSQLGGDGGGGSGGSGGSGGTLNIEDEYRLHETSKGPDVPLGSTWLSDFPQAWAETGGMGLAVRQAPLIIPLKATSTPVSIKQYPMSQEARLGIKPHIQRLLDQGILVPCQSPWNTPLLPVKKPGTNDYRPVQDLREVNKRVEDIHPTVPNPYNLLSGLPPSHQWYTVLDLKDAFFCLRLHPTSQSLFAFEWRDPEMGISGQLTWTRLPQGFKNSPTLFNEALHRDLADFRIQHPDLILLQYVDDLLLAATSELDCQQGTRALLQTLGDLGYRASAKKAQICQKQVKYLGYLLKEGQRWLTEARKETVMGQPTPKTPRQLREFLGTAGFCRLWIPGFAEMAAPLYPLTKPGTLFEWGPDQQKAYQEIKQALLTAPALGLPDLTKPFELFVDEKQGYAKGVLTQKLGPWRRPVAYLSKKLDPVAAGWPPCLRMVAAIAVLTKDAGKLTMGQPLVILAPHAVEALVKQPPDRWLSNARMTHYQALLLDTDRVQFGPIVALNPATLLPLPEEGLQHDCLDILAEAHGTRPDLTDQPLPDADHTWYTDGSSFLQEGQRKAGAAVTTETEVVWAKALPAGTSAQRAELIALTQALKMAEGKKLNVYTDSRYAFATAHIHGEIYRRRGWLTSEGKEIKNKDEILALLKALFLPKRLSIIHCPGHQKGNRAEARGNRMADQAAREVATRETPETSTLLAGKRTADGSEFEKRTADGSEFESPKKKAKVE

SEQ ID NO: 2500 - protein, 2093 aa, synthetic construct
MPAAKRVKLDGGDKKYSIGLDIGTNSVGWAVITDEYKVPSKKFKVLGNTDRHSIKKNLIGALLFDSGETAEATRLKRTARRRYTRRKNRICYLQEIFSNEMAKVDDSFFHRLEESFLVEEDKKHERHPIFGNIVDEVAYHEKYPTIYHLRKKLVDSTDKADLRLIYLALAHMIKFRGHFLIEGDLNPDNSDVDKLFIQLVQTYNQLFEENPINASGVDAKAILSARLSKSRRLENLIAQLPGEKKNGLFGNLIALSLGLTPNFKSNFDLAEDAKLQLSKDTYDDDLDNLLAQIGDQYADLFLAAKNLSDAILLSDILRVNTEITKAPLSASMIKRYDEHHQDLTLLKALVRQQLPEKYKEIFFDQSKNGYAGYIDGGASQEEFYKFIKPILEKMDGTEELLVKLNREDLLRKQRTFDNGSIPHQIHLGELHAILRRQEDFYPFLKDNREKIEKILTFRIPYYVGPLARGNSRFAWMTRKSEETITPWNFEEVVDKGASAQSFIERMTNFDKNLPNEKVLPKHSLLYEYFTVYNELTKVKYVTEGMRKPAFLSGEQKKAIVDLLFKTNRKVTVKQLKEDYFKKIECFDSVEISGVEDRFNASLGTYHDLLKIIKDKDFLDNEENEDILEDIVLTLTLFEDREMIEERLKTYAHLFDDKVMKQLKRRRYTGWGRLSRKLINGIRDKQSGKTILDFLKSDGFANRNFMQLIHDDSLTFKEDIQKAQVSGQGDSLHEHIANLAGSPAIKKGILQTVKVVDELVKVMGRHKPENIVIEMARENQTTQKGQKNSRERMKRIEEGIKELGSQILKEHPVENTQLQNEKLYLYYLQNGRDMYVDQELDINRLSDYDVDHIVPQSFLKDDSIDNKVLTRSDKARGKSDNVPSEEVVKKMKNYWRQLLNAKLITQRKFDNLTKAERGGLSELDKAGFIKRQLVETRQITKHVAQILDSRMNTKYDENDKLIREVKVITLKSKLVSDFRKDFQFYKVREINNYHHAHDAYLNAVVGTALIKKYPKLESEFVYGDYKVYDVRKMIAKSEQEIGKATAKYFFYSNIMNFFKTEITLANGEIRKRPLIETNGETGEIVWDKGRDFATVRKVLSMPQVNIVKKTEVQTGGFSKESILPKRNSDKLIARKKDWDPKKYGGFDSPTVAYSVLVVAKVEKGKSKKLKSVKELLGITIMERSSFEKNPIDFLEAKGYKEVKKDLIIKLPKYSLFELENGRKRMLASAGELQKGNELALPSKYVNFLYLASHYEKLKGSPEDNEQKQLFVEQHKHYLDEIIEQISEFSKRVILADANLDKVLSAYNKHRDKPIREQAENIIHLFTLTNLGAPAAFKYFDTTIDRKRYTSTKEVLDATLIHQSITGLYETRIDLSQLGGDGGGGGGGGGGGGTLNIEDEYRLHETSKGPDVPLGSTWLSDFPQAWAETGGMGLAVRQAPLIIPLKATSTPVSIKQYPMSQEARLGIKPHIQRLLDQGILVPCQSPWNTPLLPVKKPGTNDYRPVQDLREVNKRVEDIHPTVPNPYNLLSGLPPSHQWYTVLDLKDAFFCLRLHPTSQSLFAFEWRDPEMGISGQLTWTRLPQGFKNSPTLFNEALHRDLADFRIQHPDLILLQYVDDLLLAATSELDCQQGTRALLQTLGDLGYRASAKKAQICQKQVKYLGYLLKEGQRWLTEARKETVMGQPTPKTPRQLREFLGTAGFCRLWIPGFAEMAAPLYPLTKPGTLFEWGPDQQKAYQEIKQALLTAPALGLPDLTKPFELFVDEKQGYAKGVLTQKLGPWRRPVAYLSKKLDPVAAGWPPCLRMVAAIAVLTKDAGKLTMGQPLVILAPHAVEALVKQPPDRWLSNARMTHYQALLLDTDRVQFGPIVALNPATLLPLPEEGLQHDCLDILAEAHGTRPDLTDQPLPDADHTWYTDGSSFLQEGQRKAGAAVTTETEVVWAKALPAGTSAQRAELIALTQALKMAEGKKLNVYTDSRYAFATAHIHGEIYRRRGWLTSEGKEIKNKDEILALLKALFLPKRLSIIHCPGHQKGNRAEARGNRMADQAAREVATRETPETSTLLAGKRTADGSEFEKRTADGSEFESPKKKAKVE

SEQ ID NO: 2501 - protein, 2094 aa, synthetic construct
MPAAKRVKLDGGDKKYSIGLDIGTNSVGWAVITDEYKVPSKKFKVLGNTDRHSIKKNLIGALLFDSGETAEATRLKRTARRRYTRRKNRICYLQEIFSNEMAKVDDSFFHRLEESFLVEEDKKHERHPIFGNIVDEVAYHEKYPTIYHLRKKLVDSTDKADLRLIYLALAHMIKFRGHFLIEGDLNPDNSDVDKLFIQLVQTYNQLFEENPINASGVDAKAILSARLSKSRRLENLIAQLPGEKKNGLFGNLIALSLGLTPNFKSNFDLAEDAKLQLSKDTYDDDLDNLLAQIGDQYADLFLAAKNLSDAILLSDILRVNTEITKAPLSASMIKRYDEHHQDLTLLKALVRQQLPEKYKEIFFDQSKNGYAGYIDGGASQEEFYKFIKPILEKMDGTEELLVKLNREDLLRKQRTFDNGSIPHQIHLGELHAILRRQEDFYPFLKDNREKIEKILTFRIPYYVGPLARGNSRFAWMTRKSEETITPWNFEEVVDKGASAQSFIERMTNFDKNLPNEKVLPKHSLLYEYFTVYNELTKVKYVTEGMRKPAFLSGEQKKAIVDLLFKTNRKVTVKQLKEDYFKKIECFDSVEISGVEDRFNASLGTYHDLLKIIKDKDFLDNEENEDILEDIVLTLTLFEDREMIEERLKTYAHLFDDKVMKQLKRRRYTGWGRLSRKLINGIRDKQSGKTILDFLKSDGFANRNFMQLIHDDSLTFKEDIQKAQVSGQGDSLHEHIANLAGSPAIKKGILQTVKVVDELVKVMGRHKPENIVIEMARENQTTQKGQKNSRERMKRIEEGIKELGSQILKEHPVENTQLQNEKLYLYYLQNGRDMYVDQELDINRLSDYDVDHIVPQSFLKDDSIDNKVLTRSDKARGKSDNVPSEEVVKKMKNYWRQLLNAKLITQRKFDNLTKAERGGLSELDKAGFIKRQLVETRQITKHVAQILDSRMNTKYDENDKLIREVKVITLKSKLVSDFRKDFQFYKVREINNYHHAHDAYLNAVVGTALIKKYPKLESEFVYGDYKVYDVRKMIAKSEQEIGKATAKYFFYSNIMNFFKTEITLANGEIRKRPLIETNGETGEIVWDKGRDFATVRKVLSMPQVNIVKKTEVQTGGFSKESILPKRNSDKLIARKKDWDPKKYGGFDSPTVAYSVLVVAKVEKGKSKKLKSVKELLGITIMERSSFEKNPIDFLEAKGYKEVKKDLIIKLPKYSLFELENGRKRMLASAGELQKGNELALPSKYVNFLYLASHYEKLKGSPEDNEQKQLFVEQHKHYLDEIIEQISEFSKRVILADANLDKVLSAYNKHRDKPIREQAENIIHLFTLTNLGAPAAFKYFDTTIDRKRYTSTKEVLDATLIHQSITGLYETRIDLSQLGGDGGGSSPAPGGSGGTLNIEDEYRLHETSKGPDVPLGSTWLSDFPQAWAETGGMGLAVRQAPLIIPLKATSTPVSIKQYPMSQEARLGIKPHIQRLLDQGILVPCQSPWNTPLLPVKKPGTNDYRPVQDLREVNKRVEDIHPTVPNPYNLLSGLPPSHQWYTVLDLKDAFFCLRLHPTSQSLFAFEWRDPEMGISGQLTWTRLPQGFKNSPTLFNEALHRDLADFRIQHPDLILLQYVDDLLLAATSELDCQQGTRALLQTLGDLGYRASAKKAQICQKQVKYLGYLLKEGQRWLTEARKETVMGQPTPKTPRQLREFLGTAGFCRLWIPGFAEMAAPLYPLTKPGTLFEWGPDQQKAYQEIKQALLTAPALGLPDLTKPFELFVDEKQGYAKGVLTQKLGPWRRPVAYLSKKLDPVAAGWPPCLRMVAAIAVLTKDAGKLTMGQPLVILAPHAVEALVKQPPDRWLSNARMTHYQALLLDTDRVQFGPIVALNPATLLPLPEEGLQHDCLDILAEAHGTRPDLTDQPLPDADHTWYTDGSSFLQEGQRKAGAAVTTETEVVWAKALPAGTSAQRAELIALTQALKMAEGKKLNVYTDSRYAFATAHIHGEIYRRRGWLTSEGKEIKNKDEILALLKALFLPKRLSIIHCPGHQKGNRAEARGNRMADQAAREVATRETPETSTLLAGKRTADGSEFEKRTADGSEFESPKKKAKVE

SEQ ID NO: 2502 - protein, 2094 aa, synthetic construct
MPAAKRVKLDGGDKKYSIGLDIGTNSVGWAVITDEYKVPSKKFKVLGNTDRHSIKKNLIGALLFDSGETAEATRLKRTARRRYTRRKNRICYLQEIFSNEMAKVDDSFFHRLEESFLVEEDKKHERHPIFGNIVDEVAYHEKYPTIYHLRKKLVDSTDKADLRLIYLALAHMIKFRGHFLIEGDLNPDNSDVDKLFIQLVQTYNQLFEENPINASGVDAKAILSARLSKSRRLENLIAQLPGEKKNGLFGNLIALSLGLTPNFKSNFDLAEDAKLQLSKDTYDDDLDNLLAQIGDQYADLFLAAKNLSDAILLSDILRVNTEITKAPLSASMIKRYDEHHQDLTLLKALVRQQLPEKYKEIFFDQSKNGYAGYIDGGASQEEFYKFIKPILEKMDGTEELLVKLNREDLLRKQRTFDNGSIPHQIHLGELHAILRRQEDFYPFLKDNREKIEKILTFRIPYYVGPLARGNSRFAWMTRKSEETITPWNFEEVVDKGASAQSFIERMTNFDKNLPNEKVLPKHSLLYEYFTVYNELTKVKYVTEGMRKPAFLSGEQKKAIVDLLFKTNRKVTVKQLKEDYFKKIECFDSVEISGVEDRFNASLGTYHDLLKIIKDKDFLDNEENEDILEDIVLTLTLFEDREMIEERLKTYAHLFDDKVMKQLKRRRYTGWGRLSRKLINGIRDKQSGKTILDFLKSDGFANRNFMQLIHDDSLTFKEDIQKAQVSGQGDSLHEHIANLAGSPAIKKGILQTVKVVDELVKVMGRHKPENIVIEMARENQTTQKGQKNSRERMKRIEEGIKELGSQILKEHPVENTQLQNEKLYLYYLQNGRDMYVDQELDINRLSDYDVDHIVPQSFLKDDSIDNKVLTRSDKARGKSDNVPSEEVVKKMKNYWRQLLNAKLITQRKFDNLTKAERGGLSELDKAGFIKRQLVETRQITKHVAQILDSRMNTKYDENDKLIREVKVITLKSKLVSDFRKDFQFYKVREINNYHHAHDAYLNAVVGTALIKKYPKLESEFVYGDYKVYDVRKMIAKSEQEIGKATAKYFFYSNIMNFFKTEITLANGEIRKRPLIETNGETGEIVWDKGRDFATVRKVLSMPQVNIVKKTEVQTGGFSKESILPKRNSDKLIARKKDWDPKKYGGFDSPTVAYSVLVVAKVEKGKSKKLKSVKELLGITIMERSSFEKNPIDFLEAKGYKEVKKDLIIKLPKYSLFELENGRKRMLASAGELQKGNELALPSKYVNFLYLASHYEKLKGSPEDNEQKQLFVEQHKHYLDEIIEQISEFSKRVILADANLDKVLSAYNKHRDKPIREQAENIIHLFTLTNLGAPAAFKYFDTTIDRKRYTSTKEVLDATLIHQSITGLYETRIDLSQLGGDGGPAPGGGGGSGGTLNIEDEYRLHETSKGPDVPLGSTWLSDFPQAWAETGGMGLAVRQAPLIIPLKATSTPVSIKQYPMSQEARLGIKPHIQRLLDQGILVPCQSPWNTPLLPVKKPGTNDYRPVQDLREVNKRVEDIHPTVPNPYNLLSGLPPSHQWYTVLDLKDAFFCLRLHPTSQSLFAFEWRDPEMGISGQLTWTRLPQGFKNSPTLFNEALHRDLADFRIQHPDLILLQYVDDLLLAATSELDCQQGTRALLQTLGDLGYRASAKKAQICQKQVKYLGYLLKEGQRWLTEARKETVMGQPTPKTPRQLREFLGTAGFCRLWIPGFAEMAAPLYPLTKPGTLFEWGPDQQKAYQEIKQALLTAPALGLPDLTKPFELFVDEKQGYAKGVLTQKLGPWRRPVAYLSKKLDPVAAGWPPCLRMVAAIAVLTKDAGKLTMGQPLVILAPHAVEALVKQPPDRWLSNARMTHYQALLLDTDRVQFGPIVALNPATLLPLPEEGLQHDCLDILAEAHGTRPDLTDQPLPDADHTWYTDGSSFLQEGQRKAGAAVTTETEVVWAKALPAGTSAQRAELIALTQALKMAEGKKLNVYTDSRYAFATAHIHGEIYRRRGWLTSEGKEIKNKDEILALLKALFLPKRLSIIHCPGHQKGNRAEARGNRMADQAAREVATRETPETSTLLAGKRTADGSEFEKRTADGSEFESPKKKAKVE

SEQ ID NO: 2503 - protein, 2093 aa, synthetic construct
MPAAKRVKLDGGDKKYSIGLDIGTNSVGWAVITDEYKVPSKKFKVLGNTDRHSIKKNLIGALLFDSGETAEATRLKRTARRRYTRRKNRICYLQEIFSNEMAKVDDSFFHRLEESFLVEEDKKHERHPIFGNIVDEVAYHEKYPTIYHLRKKLVDSTDKADLRLIYLALAHMIKFRGHFLIEGDLNPDNSDVDKLFIQLVQTYNQLFEENPINASGVDAKAILSARLSKSRRLENLIAQLPGEKKNGLFGNLIALSLGLTPNFKSNFDLAEDAKLQLSKDTYDDDLDNLLAQIGDQYADLFLAAKNLSDAILLSDILRVNTEITKAPLSASMIKRYDEHHQDLTLLKALVRQQLPEKYKEIFFDQSKNGYAGYIDGGASQEEFYKFIKPILEKMDGTEELLVKLNREDLLRKQRTFDNGSIPHQIHLGELHAILRRQEDFYPFLKDNREKIEKILTFRIPYYVGPLARGNSRFAWMTRKSEETITPWNFEEVVDKGASAQSFIERMTNFDKNLPNEKVLPKHSLLYEYFTVYNELTKVKYVTEGMRKPAFLSGEQKKAIVDLLFKTNRKVTVKQLKEDYFKKIECFDSVEISGVEDRFNASLGTYHDLLKIIKDKDFLDNEENEDILEDIVLTLTLFEDREMIEERLKTYAHLFDDKVMKQLKRRRYTGWGRLSRKLINGIRDKQSGKTILDFLKSDGFANRNFMQLIHDDSLTFKEDIQKAQVSGQGDSLHEHIANLAGSPAIKKGILQTVKVVDELVKVMGRHKPENIVIEMARENQTTQKGQKNSRERMKRIEEGIKELGSQILKEHPVENTQLQNEKLYLYYLQNGRDMYVDQELDINRLSDYDVDHIVPQSFLKDDSIDNKVLTRSDKARGKSDNVPSEEVVKKMKNYWRQLLNAKLITQRKFDNLTKAERGGLSELDKAGFIKRQLVETRQITKHVAQILDSRMNTKYDENDKLIREVKVITLKSKLVSDFRKDFQFYKVREINNYHHAHDAYLNAVVGTALIKKYPKLESEFVYGDYKVYDVRKMIAKSEQEIGKATAKYFFYSNIMNFFKTEITLANGEIRKRPLIETNGETGEIVWDKGRDFATVRKVLSMPQVNIVKKTEVQTGGFSKESILPKRNSDKLIARKKDWDPKKYGGFDSPTVAYSVLVVAKVEKGKSKKLKSVKELLGITIMERSSFEKNPIDFLEAKGYKEVKKDLIIKLPKYSLFELENGRKRMLASAGELQKGNELALPSKYVNFLYLASHYEKLKGSPEDNEQKQLFVEQHKHYLDEIIEQISEFSKRVILADANLDKVLSAYNKHRDKPIREQAENIIHLFTLTNLGAPAAFKYFDTTIDRKRYTSTKEVLDATLIHQSITGLYETRIDLSQLGGDGGGSSEAAAKGGTLNIEDEYRLHETSKGPDVPLGSTWLSDFPQAWAETGGMGLAVRQAPLIIPLKATSTPVSIKQYPMSQEARLGIKPHIQRLLDQGILVPCQSPWNTPLLPVKKPGTNDYRPVQDLREVNKRVEDIHPTVPNPYNLLSGLPPSHQWYTVLDLKDAFFCLRLHPTSQSLFAFEWRDPEMGISGQLTWTRLPQGFKNSPTLFNEALHRDLADFRIQHPDLILLQYVDDLLLAATSELDCQQGTRALLQTLGDLGYRASAKKAQICQKQVKYLGYLLKEGQRWLTEARKETVMGQPTPKTPRQLREFLGKAGFCRLFIPGFAEMAAPLYPLTKPGTLFEWGPDQQKAYQEIKQALLTAPALGLPDLTKPFELFVDEKQGYAKGVLTQKLGPWRRPVAYLSKKLDPVAAGWPPCLRMVAAIAVLTKDAGKLTMGQPLVILAPHAVEALVKQPPDRWLSNARMTHYQALLLDTDRVQFGPIVALNPATLLPLPEEGLQHDCLDILAEAHGTRPDLTDQPLPDADHTWYTDGSSFLQEGQRKAGAAVTTETEVVWAKALPAGTSAQRAELIALTQALKMAEGKKLNVYTDSRYAFATAHIHGEIYRRRGWLTSEGKEIKNKDEILALLKALFLPKRLSIIHCPGHQKGNRAEARGNRMADQAAREVATRETPETSTLLAGKRTADGSEFEKRTADGSEFESPKKKAKVE

SEQ ID NO: 2504 - protein, 2090 aa, synthetic construct
MPAAKRVKLDGGDKKYSIGLDIGTNSVGWAVITDEYKVPSKKFKVLGNTDRHSIKKNLIGALLFDSGETAEATRLKRTARRRYTRRKNRICYLQEIFSNEMAKVDDSFFHRLEESFLVEEDKKHERHPIFGNIVDEVAYHEKYPTIYHLRKKLVDSTDKADLRLIYLALAHMIKFRGHFLIEGDLNPDNSDVDKLFIQLVQTYNQLFEENPINASGVDAKAILSARLSKSRRLENLIAQLPGEKKNGLFGNLIALSLGLTPNFKSNFDLAEDAKLQLSKDTYDDDLDNLLAQIGDQYADLFLAAKNLSDAILLSDILRVNTEITKAPLSASMIKRYDEHHQDLTLLKALVRQQLPEKYKEIFFDQSKNGYAGYIDGGASQEEFYKFIKPILEKMDGTEELLVKLNREDLLRKQRTFDNGSIPHQIHLGELHAILRRQEDFYPFLKDNREKIEKILTFRIPYYVGPLARGNSRFAWMTRKSEETITPWNFEEVVDKGASAQSFIERMTNFDKNLPNEKVLPKHSLLYEYFTVYNELTKVKYVTEGMRKPAFLSGEQKKAIVDLLFKTNRKVTVKQLKEDYFKKIECFDSVEISGVEDRFNASLGTYHDLLKIIKDKDFLDNEENEDILEDIVLTLTLFEDREMIEERLKTYAHLFDDKVMKQLKRRRYTGWGRLSRKLINGIRDKQSGKTILDFLKSDGFANRNFMQLIHDDSLTFKEDIQKAQVSGQGDSLHEHIANLAGSPAIKKGILQTVKVVDELVKVMGRHKPENIVIEMARENQTTQKGQKNSRERMKRIEEGIKELGSQILKEHPVENTQLQNEKLYLYYLQNGRDMYVDQELDINRLSDYDVDHIVPQSFLKDDSIDNKVLTRSDKARGKSDNVPSEEVVKKMKNYWRQLLNAKLITQRKFDNLTKAERGGLSELDKAGFIKRQLVETRQITKHVAQILDSRMNTKYDENDKLIREVKVITLKSKLVSDFRKDFQFYKVREINNYHHAHDAYLNAVVGTALIKKYPKLESEFVYGDYKVYDVRKMIAKSEQEIGKATAKYFFYSNIMNFFKTEITLANGEIRKRPLIETNGETGEIVWDKGRDFATVRKVLSMPQVNIVKKTEVQTGGFSKESILPKRNSDKLIARKKDWDPKKYGGFDSPTVAYSVLVVAKVEKGKSKKLKSVKELLGITIMERSSFEKNPIDFLEAKGYKEVKKDLIIKLPKYSLFELENGRKRMLASAGELQKGNELALPSKYVNFLYLASHYEKLKGSPEDNEQKQLFVEQHKHYLDEIIEQISEFSKRVILADANLDKVLSAYNKHRDKPIREQAENIIHLFTLTNLGAPAAFKYFDTTIDRKRYTSTKEVLDATLIHQSITGLYETRIDLSQLGGDGGGGGGSGGTLNIEDEYRLHETSKGPDVPLGSTWLSDFPQAWAETGGMGLAVRQAPLIIPLKATSTPVSIKQYPMSQEARLGIKPHIQRLLDQGILVPCQSPWNTPLLPVKKPGTNDYRPVQDLREVNKRVEDIHPTVPNPYNLLSGLPPSHQWYTVLDLKDAFFCLRLHPTSQSLFAFEWRDPEMGISGQLTWTRLPQGFKNSPTLFNEALHRDLADFRIQHPDLILLQYVDDLLLAATSELDCQQGTRALLQTLGDLGYRASAKKAQICQKQVKYLGYLLKEGQRWLTEARKETVMGQPTPKTPRQLREFLGKAGFCRLFIPGFAEMAAPLYPLTKPGTLFEWGPDQQKAYQEIKQALLTAPALGLPDLTKPFELFVDEKQGYAKGVLTQKLGPWRRPVAYLSKKLDPVAAGWPPCLRMVAAIAVLTKDAGKLTMGQPLVILAPHAVEALVKQPPDRWLSNARMTHYQALLLDTDRVQFGPIVALNPATLLPLPEEGLQHDCLDILAEAHGTRPDLTDQPLPDADHTWYTDGSSFLQEGQRKAGAAVTTETEVVWAKALPAGTSAQRAELIALTQALKMAEGKKLNVYTDSRYAFATAHIHGEIYRRRGWLTSEGKEIKNKDEILALLKALFLPKRLSIIHCPGHQKGNRAEARGNRMADQAAREVATRETPETSTLLAGKRTADGSEFEKRTADGSEFESPKKKAKVE

SEQ ID NO: 2505 - protein, 2093 aa, synthetic construct
MPAAKRVKLDGGDKKYSIGLDIGTNSVGWAVITDEYKVPSKKFKVLGNTDRHSIKKNLIGALLFDSGETAEATRLKRTARRRYTRRKNRICYLQEIFSNEMAKVDDSFFHRLEESFLVEEDKKHERHPIFGNIVDEVAYHEKYPTIYHLRKKLVDSTDKADLRLIYLALAHMIKFRGHFLIEGDLNPDNSDVDKLFIQLVQTYNQLFEENPINASGVDAKAILSARLSKSRRLENLIAQLPGEKKNGLFGNLIALSLGLTPNFKSNFDLAEDAKLQLSKDTYDDDLDNLLAQIGDQYADLFLAAKNLSDAILLSDILRVNTEITKAPLSASMIKRYDEHHQDLTLLKALVRQQLPEKYKEIFFDQSKNGYAGYIDGGASQEEFYKFIKPILEKMDGTEELLVKLNREDLLRKQRTFDNGSIPHQIHLGELHAILRRQEDFYPFLKDNREKIEKILTFRIPYYVGPLARGNSRFAWMTRKSEETITPWNFEEVVDKGASAQSFIERMTNFDKNLPNEKVLPKHSLLYEYFTVYNELTKVKYVTEGMRKPAFLSGEQKKAIVDLLFKTNRKVTVKQLKEDYFKKIECFDSVEISGVEDRFNASLGTYHDLLKIIKDKDFLDNEENEDILEDIVLTLTLFEDREMIEERLKTYAHLFDDKVMKQLKRRRYTGWGRLSRKLINGIRDKQSGKTILDFLKSDGFANRNFMQLIHDDSLTFKEDIQKAQVSGQGDSLHEHIANLAGSPAIKKGILQTVKVVDELVKVMGRHKPENIVIEMARENQTTQKGQKNSRERMKRIEEGIKELGSQILKEHPVENTQLQNEKLYLYYLQNGRDMYVDQELDINRLSDYDVDHIVPQSFLKDDSIDNKVLTRSDKARGKSDNVPSEEVVKKMKNYWRQLLNAKLITQRKFDNLTKAERGGLSELDKAGFIKRQLVETRQITKHVAQILDSRMNTKYDENDKLIREVKVITLKSKLVSDFRKDFQFYKVREINNYHHAHDAYLNAVVGTALIKKYPKLESEFVYGDYKVYDVRKMIAKSEQEIGKATAKYFFYSNIMNFFKTEITLANGEIRKRPLIETNGETGEIVWDKGRDFATVRKVLSMPQVNIVKKTEVQTGGFSKESILPKRNSDKLIARKKDWDPKKYGGFDSPTVAYSVLVVAKVEKGKSKKLKSVKELLGITIMERSSFEKNPIDFLEAKGYKEVKKDLIIKLPKYSLFELENGRKRMLASAGELQKGNELALPSKYVNFLYLASHYEKLKGSPEDNEQKQLFVEQHKHYLDEIIEQISEFSKRVILADANLDKVLSAYNKHRDKPIREQAENIIHLFTLTNLGAPAAFKYFDTTIDRKRYTSTKEVLDATLIHQSITGLYETRIDLSQLGGDGGPAPEAAAKGGTLNIEDEYRLHETSKGPDVPLGSTWLSDFPQAWAETGGMGLAVRQAPLIIPLKATSTPVSIKQYPMSQEARLGIKPHIQRLLDQGILVPCQSPWNTPLLPVKKPGTNDYRPVQDLREVNKRVEDIHPTVPNPYNLLSGLPPSHQWYTVLDLKDAFFCLRLHPTSQSLFAFEWRDPEMGISGQLTWTRLPQGFKNSPTLFNEALHRDLADFRIQHPDLILLQYVDDLLLAATSELDCQQGTRALLQTLGDLGYRASAKKAQICQKQVKYLGYLLKEGQRWLTEARKETVMGQPTPKTPRQLREFLGKAGFCRLFIPGFAEMAAPLYPLTKPGTLFEWGPDQQKAYQEIKQALLTAPALGLPDLTKPFELFVDEKQGYAKGVLTQKLGPWRRPVAYLSKKLDPVAAGWPPCLRMVAAIAVLTKDAGKLTMGQPLVILAPHAVEALVKQPPDRWLSNARMTHYQALLLDTDRVQFGPIVALNPATLLPLPEEGLQHDCLDILAEAHGTRPDLTDQPLPDADHTWYTDGSSFLQEGQRKAGAAVTTETEVVWAKALPAGTSAQRAELIALTQALKMAEGKKLNVYTDSRYAFATAHIHGEIYRRRGWLTSEGKEIKNKDEILALLKALFLPKRLSIIHCPGHQKGNRAEARGNRMADQAAREVATRETPETSTLLAGKRTADGSEFEKRTADGSEFESPKKKAKVE

SEQ ID NO: 2506 - protein, 2096 aa, synthetic construct
MPAAKRVKLDGGDKKYSIGLDIGTNSVGWAVITDEYKVPSKKFKVLGNTDRHSIKKNLIGALLFDSGETAEATRLKRTARRRYTRRKNRICYLQEIFSNEMAKVDDSFFHRLEESFLVEEDKKHERHPIFGNIVDEVAYHEKYPTIYHLRKKLVDSTDKADLRLIYLALAHMIKFRGHFLIEGDLNPDNSDVDKLFIQLVQTYNQLFEENPINASGVDAKAILSARLSKSRRLENLIAQLPGEKKNGLFGNLIALSLGLTPNFKSNFDLAEDAKLQLSKDTYDDDLDNLLAQIGDQYADLFLAAKNLSDAILLSDILRVNTEITKAPLSASMIKRYDEHHQDLTLLKALVRQQLPEKYKEIFFDQSKNGYAGYIDGGASQEEFYKFIKPILEKMDGTEELLVKLNREDLLRKQRTFDNGSIPHQIHLGELHAILRRQEDFYPFLKDNREKIEKILTFRIPYYVGPLARGNSRFAWMTRKSEETITPWNFEEVVDKGASAQSFIERMTNFDKNLPNEKVLPKHSLLYEYFTVYNELTKVKYVTEGMRKPAFLSGEQKKAIVDLLFKTNRKVTVKQLKEDYFKKIECFDSVEISGVEDRFNASLGTYHDLLKIIKDKDFLDNEENEDILEDIVLTLTLFEDREMIEERLKTYAHLFDDKVMKQLKRRRYTGWGRLSRKLINGIRDKQSGKTILDFLKSDGFANRNFMQLIHDDSLTFKEDIQKAQVSGQGDSLHEHIANLAGSPAIKKGILQTVKVVDELVKVMGRHKPENIVIEMARENQTTQKGQKNSRERMKRIEEGIKELGSQILKEHPVENTQLQNEKLYLYYLQNGRDMYVDQELDINRLSDYDVDHIVPQSFLKDDSIDNKVLTRSDKARGKSDNVPSEEVVKKMKNYWRQLLNAKLITQRKFDNLTKAERGGLSELDKAGFIKRQLVETRQITKHVAQILDSRMNTKYDENDKLIREVKVITLKSKLVSDFRKDFQFYKVREINNYHHAHDAYLNAVVGTALIKKYPKLESEFVYGDYKVYDVRKMIAKSEQEIGKATAKYFFYSNIMNFFKTEITLANGEIRKRPLIETNGETGEIVWDKGRDFATVRKVLSMPQVNIVKKTEVQTGGFSKESILPKRNSDKLIARKKDWDPKKYGGFDSPTVAYSVLVVAKVEKGKSKKLKSVKELLGITIMERSSFEKNPIDFLEAKGYKEVKKDLIIKLPKYSLFELENGRKRMLASAGELQKGNELALPSKYVNFLYLASHYEKLKGSPEDNEQKQLFVEQHKHYLDEIIEQISEFSKRVILADANLDKVLSAYNKHRDKPIREQAENIIHLFTLTNLGAPAAFKYFDTTIDRKRYTSTKEVLDATLIHQSITGLYETRIDLSQLGGDGGEAAAKPAPGGGGGTLNIEDEYRLHETSKGPDVPLGSTWLSDFPQAWAETGGMGLAVRQAPLIIPLKATSTPVSIKQYPMSQEARLGIKPHIQRLLDQGILVPCQSPWNTPLLPVKKPGTNDYRPVQDLREVNKRVEDIHPTVPNPYNLLSGLPPSHQWYTVLDLKDAFFCLRLHPTSQSLFAFEWRDPEMGISGQLTWTRLPQGFKNSPTLFNEALHRDLADFRIQHPDLILLQYVDDLLLAATSELDCQQGTRALLQTLGDLGYRASAKKAQICQKQVKYLGYLLKEGQRWLTEARKETVMGQPTPKTPRQLREFLGKAGFCRLFIPGFAEMAAPLYPLTKPGTLFEWGPDQQKAYQEIKQALLTAPALGLPDLTKPFELFVDEKQGYAKGVLTQKLGPWRRPVAYLSKKLDPVAAGWPPCLRMVAAIAVLTKDAGKLTMGQPLVILAPHAVEALVKQPPDRWLSNARMTHYQALLLDTDRVQFGPIVALNPATLLPLPEEGLQHDCLDILAEAHGTRPDLTDQPLPDADHTWYTDGSSFLQEGQRKAGAAVTTETEVVWAKALPAGTSAQRAELIALTQALKMAEGKKLNVYTDSRYAFATAHIHGEIYRRRGWLTSEGKEIKNKDEILALLKALFLPKRLSIIHCPGHQKGNRAEARGNRMADQAAREVATRETPETSTLLAGKRTADGSEFEKRTADGSEFESPKKKAKVE

SEQ ID NO: 2507 - protein, 2100 aa, synthetic construct
MPAAKRVKLDGGDKKYSIGLDIGTNSVGWAVITDEYKVPSKKFKVLGNTDRHSIKKNLIGALLFDSGETAEATRLKRTARRRYTRRKNRICYLQEIFSNEMAKVDDSFFHRLEESFLVEEDKKHERHPIFGNIVDEVAYHEKYPTIYHLRKKLVDSTDKADLRLIYLALAHMIKFRGHFLIEGDLNPDNSDVDKLFIQLVQTYNQLFEENPINASGVDAKAILSARLSKSRRLENLIAQLPGEKKNGLFGNLIALSLGLTPNFKSNFDLAEDAKLQLSKDTYDDDLDNLLAQIGDQYADLFLAAKNLSDAILLSDILRVNTEITKAPLSASMIKRYDEHHQDLTLLKALVRQQLPEKYKEIFFDQSKNGYAGYIDGGASQEEFYKFIKPILEKMDGTEELLVKLNREDLLRKQRTFDNGSIPHQIHLGELHAILRRQEDFYPFLKDNREKIEKILTFRIPYYVGPLARGNSRFAWMTRKSEETITPWNFEEVVDKGASAQSFIERMTNFDKNLPNEKVLPKHSLLYEYFTVYNELTKVKYVTEGMRKPAFLSGEQKKAIVDLLFKTNRKVTVKQLKEDYFKKIECFDSVEISGVEDRFNASLGTYHDLLKIIKDKDFLDNEENEDILEDIVLTLTLFEDREMIEERLKTYAHLFDDKVMKQLKRRRYTGWGRLSRKLINGIRDKQSGKTILDFLKSDGFANRNFMQLIHDDSLTFKEDIQKAQVSGQGDSLHEHIANLAGSPAIKKGILQTVKVVDELVKVMGRHKPENIVIEMARENQTTQKGQKNSRERMKRIEEGIKELGSQILKEHPVENTQLQNEKLYLYYLQNGRDMYVDQELDINRLSDYDVDHIVPQSFLKDDSIDNKVLTRSDKARGKSDNVPSEEVVKKMKNYWRQLLNAKLITQRKFDNLTKAERGGLSELDKAGFIKRQLVETRQITKHVAQILDSRMNTKYDENDKLIREVKVITLKSKLVSDFRKDFQFYKVREINNYHHAHDAYLNAVVGTALIKKYPKLESEFVYGDYKVYDVRKMIAKSEQEIGKATAKYFFYSNIMNFFKTEITLANGEIRKRPLIETNGETGEIVWDKGRDFATVRKVLSMPQVNIVKKTEVQTGGFSKESILPKRNSDKLIARKKDWDPKKYGGFDSPTVAYSVLVVAKVEKGKSKKLKSVKELLGITIMERSSFEKNPIDFLEAKGYKEVKKDLIIKLPKYSLFELENGRKRMLASAGELQKGNELALPSKYVNFLYLASHYEKLKGSPEDNEQKQLFVEQHKHYLDEIIEQISEFSKRVILADANLDKVLSAYNKHRDKPIREQAENIIHLFTLTNLGAPAAFKYFDTTIDRKRYTSTKEVLDATLIHQSITGLYETRIDLSQLGGDGGEAAAKEAAAKEAAAKGGTLNIEDEYRLHETSKGPDVPLGSTWLSDFPQAWAETGGMGLAVRQAPLIIPLKATSTPVSIKQYPMSQEARLGIKPHIQRLLDQGILVPCQSPWNTPLLPVKKPGTNDYRPVQDLREVNKRVEDIHPTVPNPYNLLSGLPPSHQWYTVLDLKDAFFCLRLHPTSQSLFAFEWRDPEMGISGQLTWTRLPQGFKNSPTLFNEALHRDLADFRIQHPDLILLQYVDDLLLAATSELDCQQGTRALLQTLGDLGYRASAKKAQICQKQVKYLGYLLKEGQRWLTEARKETVMGQPTPKTPRQLREFLGKAGFCRLFIPGFAEMAAPLYPLTKPGTLFEWGPDQQKAYQEIKQALLTAPALGLPDLTKPFELFVDEKQGYAKGVLTQKLGPWRRPVAYLSKKLDPVAAGWPPCLRMVAAIAVLTKDAGKLTMGQPLVILAPHAVEALVKQPPDRWLSNARMTHYQALLLDTDRVQFGPIVALNPATLLPLPEEGLQHDCLDILAEAHGTRPDLTDQPLPDADHTWYTDGSSFLQEGQRKAGAAVTTETEVVWAKALPAGTSAQRAELIALTQALKMAEGKKLNVYTDSRYAFATAHIHGEIYRRRGWLTSEGKEIKNKDEILALLKALFLPKRLSIIHCPGHQKGNRAEARGNRMADQAAREVATRETPETSTLLAGKRTADGSEFEKRTADGSEFESPKKKAKVE

SEQ ID NO: 2508 - protein, 2088 aa, synthetic construct
MPAAKRVKLDGGDKKYSIGLDIGTNSVGWAVITDEYKVPSKKFKVLGNTDRHSIKKNLIGALLFDSGETAEATRLKRTARRRYTRRKNRICYLQEIFSNEMAKVDDSFFHRLEESFLVEEDKKHERHPIFGNIVDEVAYHEKYPTIYHLRKKLVDSTDKADLRLIYLALAHMIKFRGHFLIEGDLNPDNSDVDKLFIQLVQTYNQLFEENPINASGVDAKAILSARLSKSRRLENLIAQLPGEKKNGLFGNLIALSLGLTPNFKSNFDLAEDAKLQLSKDTYDDDLDNLLAQIGDQYADLFLAAKNLSDAILLSDILRVNTEITKAPLSASMIKRYDEHHQDLTLLKALVRQQLPEKYKEIFFDQSKNGYAGYIDGGASQEEFYKFIKPILEKMDGTEELLVKLNREDLLRKQRTFDNGSIPHQIHLGELHAILRRQEDFYPFLKDNREKIEKILTFRIPYYVGPLARGNSRFAWMTRKSEETITPWNFEEVVDKGASAQSFIERMTNFDKNLPNEKVLPKHSLLYEYFTVYNELTKVKYVTEGMRKPAFLSGEQKKAIVDLLFKTNRKVTVKQLKEDYFKKIECFDSVEISGVEDRFNASLGTYHDLLKIIKDKDFLDNEENEDILEDIVLTLTLFEDREMIEERLKTYAHLFDDKVMKQLKRRRYTGWGRLSRKLINGIRDKQSGKTILDFLKSDGFANRNFMQLIHDDSLTFKEDIQKAQVSGQGDSLHEHIANLAGSPAIKKGILQTVKVVDELVKVMGRHKPENIVIEMARENQTTQKGQKNSRERMKRIEEGIKELGSQILKEHPVENTQLQNEKLYLYYLQNGRDMYVDQELDINRLSDYDVDHIVPQSFLKDDSIDNKVLTRSDKARGKSDNVPSEEVVKKMKNYWRQLLNAKLITQRKFDNLTKAERGGLSELDKAGFIKRQLVETRQITKHVAQILDSRMNTKYDENDKLIREVKVITLKSKLVSDFRKDFQFYKVREINNYHHAHDAYLNAVVGTALIKKYPKLESEFVYGDYKVYDVRKMIAKSEQEIGKATAKYFFYSNIMNFFKTEITLANGEIRKRPLIETNGETGEIVWDKGRDFATVRKVLSMPQVNIVKKTEVQTGGFSKESILPKRNSDKLIARKKDWDPKKYGGFDSPTVAYSVLVVAKVEKGKSKKLKSVKELLGITIMERSSFEKNPIDFLEAKGYKEVKKDLIIKLPKYSLFELENGRKRMLASAGELQKGNELALPSKYVNFLYLASHYEKLKGSPEDNEQKQLFVEQHKHYLDEIIEQISEFSKRVILADANLDKVLSAYNKHRDKPIREQAENIIHLFTLTNLGAPAAFKYFDTTIDRKRYTSTKEVLDATLIHQSITGLYETRIDLSQLGGDGGGSSGGTLNIEDEYRLHETSKGPDVPLGSTWLSDFPQAWAETGGMGLAVRQAPLIIPLKATSTPVSIKQYPMSQEARLGIKPHIQRLLDQGILVPCQSPWNTPLLPVKKPGTNDYRPVQDLREVNKRVEDIHPTVPNPYNLLSGLPPSHQWYTVLDLKDAFFCLRLHPTSQSLFAFEWRDPEMGISGQLTWTRLPQGFKNSPTLFNEALHRDLADFRIQHPDLILLQYVDDLLLAATSELDCQQGTRALLQTLGDLGYRASAKKAQICQKQVKYLGYLLKEGQRWLTEARKETVMGQPTPKTPRQLREFLGKAGFCRLFIPGFAEMAAPLYPLTKPGTLFEWGPDQQKAYQEIKQALLTAPALGLPDLTKPFELFVDEKQGYAKGVLTQKLGPWRRPVAYLSKKLDPVAAGWPPCLRMVAAIAVLTKDAGKLTMGQPLVILAPHAVEALVKQPPDRWLSNARMTHYQALLLDTDRVQFGPIVALNPATLLPLPEEGLQHDCLDILAEAHGTRPDLTDQPLPDADHTWYTDGSSFLQEGQRKAGAAVTTETEVVWAKALPAGTSAQRAELIALTQALKMAEGKKLNVYTDSRYAFATAHIHGEIYRRRGWLTSEGKEIKNKDEILALLKALFLPKRLSIIHCPGHQKGNRAEARGNRMADQAAREVATRETPETSTLLAGKRTADGSEFEKRTADGSEFESPKKKAKVE

SEQ ID NO: 2509 - protein, 2096 aa, synthetic construct
MPAAKRVKLDGGDKKYSIGLDIGTNSVGWAVITDEYKVPSKKFKVLGNTDRHSIKKNLIGALLFDSGETAEATRLKRTARRRYTRRKNRICYLQEIFSNEMAKVDDSFFHRLEESFLVEEDKKHERHPIFGNIVDEVAYHEKYPTIYHLRKKLVDSTDKADLRLIYLALAHMIKFRGHFLIEGDLNPDNSDVDKLFIQLVQTYNQLFEENPINASGVDAKAILSARLSKSRRLENLIAQLPGEKKNGLFGNLIALSLGLTPNFKSNFDLAEDAKLQLSKDTYDDDLDNLLAQIGDQYADLFLAAKNLSDAILLSDILRVNTEITKAPLSASMIKRYDEHHQDLTLLKALVRQQLPEKYKEIFFDQSKNGYAGYIDGGASQEEFYKFIKPILEKMDGTEELLVKLNREDLLRKQRTFDNGSIPHQIHLGELHAILRRQEDFYPFLKDNREKIEKILTFRIPYYVGPLARGNSRFAWMTRKSEETITPWNFEEVVDKGASAQSFIERMTNFDKNLPNEKVLPKHSLLYEYFTVYNELTKVKYVTEGMRKPAFLSGEQKKAIVDLLFKTNRKVTVKQLKEDYFKKIECFDSVEISGVEDRFNASLGTYHDLLKIIKDKDFLDNEENEDILEDIVLTLTLFEDREMIEERLKTYAHLFDDKVMKQLKRRRYTGWGRLSRKLINGIRDKQSGKTILDFLKSDGFANRNFMQLIHDDSLTFKEDIQKAQVSGQGDSLHEHIANLAGSPAIKKGILQTVKVVDELVKVMGRHKPENIVIEMARENQTTQKGQKNSRERMKRIEEGIKELGSQILKEHPVENTQLQNEKLYLYYLQNGRDMYVDQELDINRLSDYDVDHIVPQSFLKDDSIDNKVLTRSDKARGKSDNVPSEEVVKKMKNYWRQLLNAKLITQRKFDNLTKAERGGLSELDKAGFIKRQLVETRQITKHVAQILDSRMNTKYDENDKLIREVKVITLKSKLVSDFRKDFQFYKVREINNYHHAHDAYLNAVVGTALIKKYPKLESEFVYGDYKVYDVRKMIAKSEQEIGKATAKYFFYSNIMNFFKTEITLANGEIRKRPLIETNGETGEIVWDKGRDFATVRKVLSMPQVNIVKKTEVQTGGFSKESILPKRNSDKLIARKKDWDPKKYGGFDSPTVAYSVLVVAKVEKGKSKKLKSVKELLGITIMERSSFEKNPIDFLEAKGYKEVKKDLIIKLPKYSLFELENGRKRMLASAGELQKGNELALPSKYVNFLYLASHYEKLKGSPEDNEQKQLFVEQHKHYLDEIIEQISEFSKRVILADANLDKVLSAYNKHRDKPIREQAENIIHLFTLTNLGAPAAFKYFDTTIDRKRYTSTKEVLDATLIHQSITGLYETRIDLSQLGGDGGEAAAKGSSPAPGGTLNIEDEYRLHETSKGPDVPLGSTWLSDFPQAWAETGGMGLAVRQAPLIIPLKATSTPVSIKQYPMSQEARLGIKPHIQRLLDQGILVPCQSPWNTPLLPVKKPGTNDYRPVQDLREVNKRVEDIHPTVPNPYNLLSGLPPSHQWYTVLDLKDAFFCLRLHPTSQSLFAFEWRDPEMGISGQLTWTRLPQGFKNSPTLFNEALHRDLADFRIQHPDLILLQYVDDLLLAATSELDCQQGTRALLQTLGDLGYRASAKKAQICQKQVKYLGYLLKEGQRWLTEARKETVMGQPTPKTPRQLREFLGKAGFCRLFIPGFAEMAAPLYPLTKPGTLFEWGPDQQKAYQEIKQALLTAPALGLPDLTKPFELFVDEKQGYAKGVLTQKLGPWRRPVAYLSKKLDPVAAGWPPCLRMVAAIAVLTKDAGKLTMGQPLVILAPHAVEALVKQPPDRWLSNARMTHYQALLLDTDRVQFGPIVALNPATLLPLPEEGLQHDCLDILAEAHGTRPDLTDQPLPDADHTWYTDGSSFLQEGQRKAGAAVTTETEVVWAKALPAGTSAQRAELIALTQALKMAEGKKLNVYTDSRYAFATAHIHGEIYRRRGWLTSEGKEIKNKDEILALLKALFLPKRLSIIHCPGHQKGNRAEARGNRMADQAAREVATRETPETSTLLAGKRTADGSEFEKRTADGSEFESPKKKAKVE

SEQ ID NO: 2510 - protein, 2096 aa, synthetic construct
MPAAKRVKLDGGDKKYSIGLDIGTNSVGWAVITDEYKVPSKKFKVLGNTDRHSIKKNLIGALLFDSGETAEATRLKRTARRRYTRRKNRICYLQEIFSNEMAKVDDSFFHRLEESFLVEEDKKHERHPIFGNIVDEVAYHEKYPTIYHLRKKLVDSTDKADLRLIYLALAHMIKFRGHFLIEGDLNPDNSDVDKLFIQLVQTYNQLFEENPINASGVDAKAILSARLSKSRRLENLIAQLPGEKKNGLFGNLIALSLGLTPNFKSNFDLAEDAKLQLSKDTYDDDLDNLLAQIGDQYADLFLAAKNLSDAILLSDILRVNTEITKAPLSASMIKRYDEHHQDLTLLKALVRQQLPEKYKEIFFDQSKNGYAGYIDGGASQEEFYKFIKPILEKMDGTEELLVKLNREDLLRKQRTFDNGSIPHQIHLGELHAILRRQEDFYPFLKDNREKIEKILTFRIPYYVGPLARGNSRFAWMTRKSEETITPWNFEEVVDKGASAQSFIERMTNFDKNLPNEKVLPKHSLLYEYFTVYNELTKVKYVTEGMRKPAFLSGEQKKAIVDLLFKTNRKVTVKQLKEDYFKKIECFDSVEISGVEDRFNASLGTYHDLLKIIKDKDFLDNEENEDILEDIVLTLTLFEDREMIEERLKTYAHLFDDKVMKQLKRRRYTGWGRLSRKLINGIRDKQSGKTILDFLKSDGFANRNFMQLIHDDSLTFKEDIQKAQVSGQGDSLHEHIANLAGSPAIKKGILQTVKVVDELVKVMGRHKPENIVIEMARENQTTQKGQKNSRERMKRIEEGIKELGSQILKEHPVENTQLQNEKLYLYYLQNGRDMYVDQELDINRLSDYDVDHIVPQSFLKDDSIDNKVLTRSDKARGKSDNVPSEEVVKKMKNYWRQLLNAKLITQRKFDNLTKAERGGLSELDKAGFIKRQLVETRQITKHVAQILDSRMNTKYDENDKLIREVKVITLKSKLVSDFRKDFQFYKVREINNYHHAHDAYLNAVVGTALIKKYPKLESEFVYGDYKVYDVRKMIAKSEQEIGKATAKYFFYSNIMNFFKTEITLANGEIRKRPLIETNGETGEIVWDKGRDFATVRKVLSMPQVNIVKKTEVQTGGFSKESILPKRNSDKLIARKKDWDPKKYGGFDSPTVAYSVLVVAKVEKGKSKKLKSVKELLGITIMERSSFEKNPIDFLEAKGYKEVKKDLIIKLPKYSLFELENGRKRMLASAGELQKGNELALPSKYVNFLYLASHYEKLKGSPEDNEQKQLFVEQHKHYLDEIIEQISEFSKRVILADANLDKVLSAYNKHRDKPIREQAENIIHLFTLTNLGAPAAFKYFDTTIDRKRYTSTKEVLDATLIHQSITGLYETRIDLSQLGGDGGPAPAPAPAPAPGGTLNIEDEYRLHETSKGPDVPLGSTWLSDFPQAWAETGGMGLAVRQAPLIIPLKATSTPVSIKQYPMSQEARLGIKPHIQRLLDQGILVPCQSPWNTPLLPVKKPGTNDYRPVQDLREVNKRVEDIHPTVPNPYNLLSGLPPSHQWYTVLDLKDAFFCLRLHPTSQSLFAFEWRDPEMGISGQLTWTRLPQGFKNSPTLFNEALHRDLADFRIQHPDLILLQYVDDLLLAATSELDCQQGTRALLQTLGDLGYRASAKKAQICQKQVKYLGYLLKEGQRWLTEARKETVMGQPTPKTPRQLREFLGKAGFCRLFIPGFAEMAAPLYPLTKPGTLFEWGPDQQKAYQEIKQALLTAPALGLPDLTKPFELFVDEKQGYAKGVLTQKLGPWRRPVAYLSKKLDPVAAGWPPCLRMVAAIAVLTKDAGKLTMGQPLVILAPHAVEALVKQPPDRWLSNARMTHYQALLLDTDRVQFGPIVALNPATLLPLPEEGLQHDCLDILAEAHGTRPDLTDQPLPDADHTWYTDGSSFLQEGQRKAGAAVTTETEVVWAKALPAGTSAQRAELIALTQALKMAEGKKLNVYTDSRYAFATAHIHGEIYRRRGWLTSEGKEIKNKDEILALLKALFLPKRLSIIHCPGHQKGNRAEARGNRMADQAAREVATRETPETSTLLAGKRTADGSEFEKRTADGSEFESPKKKAKVE

SEQ ID NO: 2511 - protein, 2095 aa, synthetic construct
MPAAKRVKLDGGDKKYSIGLDIGTNSVGWAVITDEYKVPSKKFKVLGNTDRHSIKKNLIGALLFDSGETAEATRLKRTARRRYTRRKNRICYLQEIFSNEMAKVDDSFFHRLEESFLVEEDKKHERHPIFGNIVDEVAYHEKYPTIYHLRKKLVDSTDKADLRLIYLALAHMIKFRGHFLIEGDLNPDNSDVDKLFIQLVQTYNQLFEENPINASGVDAKAILSARLSKSRRLENLIAQLPGEKKNGLFGNLIALSLGLTPNFKSNFDLAEDAKLQLSKDTYDDDLDNLLAQIGDQYADLFLAAKNLSDAILLSDILRVNTEITKAPLSASMIKRYDEHHQDLTLLKALVRQQLPEKYKEIFFDQSKNGYAGYIDGGASQEEFYKFIKPILEKMDGTEELLVKLNREDLLRKQRTFDNGSIPHQIHLGELHAILRRQEDFYPFLKDNREKIEKILTFRIPYYVGPLARGNSRFAWMTRKSEETITPWNFEEVVDKGASAQSFIERMTNFDKNLPNEKVLPKHSLLYEYFTVYNELTKVKYVTEGMRKPAFLSGEQKKAIVDLLFKTNRKVTVKQLKEDYFKKIECFDSVEISGVEDRFNASLGTYHDLLKIIKDKDFLDNEENEDILEDIVLTLTLFEDREMIEERLKTYAHLFDDKVMKQLKRRRYTGWGRLSRKLINGIRDKQSGKTILDFLKSDGFANRNFMQLIHDDSLTFKEDIQKAQVSGQGDSLHEHIANLAGSPAIKKGILQTVKVVDELVKVMGRHKPENIVIEMARENQTTQKGQKNSRERMKRIEEGIKELGSQILKEHPVENTQLQNEKLYLYYLQNGRDMYVDQELDINRLSDYDVDHIVPQSFLKDDSIDNKVLTRSDKARGKSDNVPSEEVVKKMKNYWRQLLNAKLITQRKFDNLTKAERGGLSELDKAGFIKRQLVETRQITKHVAQILDSRMNTKYDENDKLIREVKVITLKSKLVSDFRKDFQFYKVREINNYHHAHDAYLNAVVGTALIKKYPKLESEFVYGDYKVYDVRKMIAKSEQEIGKATAKYFFYSNIMNFFKTEITLANGEIRKRPLIETNGETGEIVWDKGRDFATVRKVLSMPQVNIVKKTEVQTGGFSKESILPKRNSDKLIARKKDWDPKKYGGFDSPTVAYSVLVVAKVEKGKSKKLKSVKELLGITIMERSSFEKNPIDFLEAKGYKEVKKDLIIKLPKYSLFELENGRKRMLASAGELQKGNELALPSKYVNFLYLASHYEKLKGSPEDNEQKQLFVEQHKHYLDEIIEQISEFSKRVILADANLDKVLSAYNKHRDKPIREQAENIIHLFTLTNLGAPAAFKYFDTTIDRKRYTSTKEVLDATLIHQSITGLYETRIDLSQLGGDGGGGGGSGGGGSGGTLNIEDEYRLHETSKGPDVPLGSTWLSDFPQAWAETGGMGLAVRQAPLIIPLKATSTPVSIKQYPMSQEARLGIKPHIQRLLDQGILVPCQSPWNTPLLPVKKPGTNDYRPVQDLREVNKRVEDIHPTVPNPYNLLSGLPPSHQWYTVLDLKDAFFCLRLHPTSQSLFAFEWRDPEMGISGQLTWTRLPQGFKNSPTLFNEALHRDLADFRIQHPDLILLQYVDDLLLAATSELDCQQGTRALLQTLGDLGYRASAKKAQICQKQVKYLGYLLKEGQRWLTEARKETVMGQPTPKTPRQLREFLGKAGFCRLFIPGFAEMAAPLYPLTKPGTLFEWGPDQQKAYQEIKQALLTAPALGLPDLTKPFELFVDEKQGYAKGVLTQKLGPWRRPVAYLSKKLDPVAAGWPPCLRMVAAIAVLTKDAGKLTMGQPLVILAPHAVEALVKQPPDRWLSNARMTHYQALLLDTDRVQFGPIVALNPATLLPLPEEGLQHDCLDILAEAHGTRPDLTDQPLPDADHTWYTDGSSFLQEGQRKAGAAVTTETEVVWAKALPAGTSAQRAELIALTQALKMAEGKKLNVYTDSRYAFATAHIHGEIYRRRGWLTSEGKEIKNKDEILALLKALFLPKRLSIIHCPGHQKGNRAEARGNRMADQAAREVATRETPETSTLLAGKRTADGSEFEKRTADGSEFESPKKKAKVE

SEQ ID NO: 2512 - protein, 2096 aa, synthetic construct
MPAAKRVKLDGGDKKYSIGLDIGTNSVGWAVITDEYKVPSKKFKVLGNTDRHSIKKNLIGALLFDSGETAEATRLKRTARRRYTRRKNRICYLQEIFSNEMAKVDDSFFHRLEESFLVEEDKKHERHPIFGNIVDEVAYHEKYPTIYHLRKKLVDSTDKADLRLIYLALAHMIKFRGHFLIEGDLNPDNSDVDKLFIQLVQTYNQLFEENPINASGVDAKAILSARLSKSRRLENLIAQLPGEKKNGLFGNLIALSLGLTPNFKSNFDLAEDAKLQLSKDTYDDDLDNLLAQIGDQYADLFLAAKNLSDAILLSDILRVNTEITKAPLSASMIKRYDEHHQDLTLLKALVRQQLPEKYKEIFFDQSKNGYAGYIDGGASQEEFYKFIKPILEKMDGTEELLVKLNREDLLRKQRTFDNGSIPHQIHLGELHAILRRQEDFYPFLKDNREKIEKILTFRIPYYVGPLARGNSRFAWMTRKSEETITPWNFEEVVDKGASAQSFIERMTNFDKNLPNEKVLPKHSLLYEYFTVYNELTKVKYVTEGMRKPAFLSGEQKKAIVDLLFKTNRKVTVKQLKEDYFKKIECFDSVEISGVEDRFNASLGTYHDLLKIIKDKDFLDNEENEDILEDIVLTLTLFEDREMIEERLKTYAHLFDDKVMKQLKRRRYTGWGRLSRKLINGIRDKQSGKTILDFLKSDGFANRNFMQLIHDDSLTFKEDIQKAQVSGQGDSLHEHIANLAGSPAIKKGILQTVKVVDELVKVMGRHKPENIVIEMARENQTTQKGQKNSRERMKRIEEGIKELGSQILKEHPVENTQLQNEKLYLYYLQNGRDMYVDQELDINRLSDYDVDHIVPQSFLKDDSIDNKVLTRSDKARGKSDNVPSEEVVKKMKNYWRQLLNAKLITQRKFDNLTKAERGGLSELDKAGFIKRQLVETRQITKHVAQILDSRMNTKYDENDKLIREVKVITLKSKLVSDFRKDFQFYKVREINNYHHAHDAYLNAVVGTALIKKYPKLESEFVYGDYKVYDVRKMIAKSEQEIGKATAKYFFYSNIMNFFKTEITLANGEIRKRPLIETNGETGEIVWDKGRDFATVRKVLSMPQVNIVKKTEVQTGGFSKESILPKRNSDKLIARKKDWDPKKYGGFDSPTVAYSVLVVAKVEKGKSKKLKSVKELLGITIMERSSFEKNPIDFLEAKGYKEVKKDLIIKLPKYSLFELENGRKRMLASAGELQKGNELALPSKYVNFLYLASHYEKLKGSPEDNEQKQLFVEQHKHYLDEIIEQISEFSKRVILADANLDKVLSAYNKHRDKPIREQAENIIHLFTLTNLGAPAAFKYFDTTIDRKRYTSTKEVLDATLIHQSITGLYETRIDLSQLGGDGGEAAAKPAPGGSGGTLNIEDEYRLHETSKGPDVPLGSTWLSDFPQAWAETGGMGLAVRQAPLIIPLKATSTPVSIKQYPMSQEARLGIKPHIQRLLDQGILVPCQSPWNTPLLPVKKPGTNDYRPVQDLREVNKRVEDIHPTVPNPYNLLSGLPPSHQWYTVLDLKDAFFCLRLHPTSQSLFAFEWRDPEMGISGQLTWTRLPQGFKNSPTLFNEALHRDLADFRIQHPDLILLQYVDDLLLAATSELDCQQGTRALLQTLGDLGYRASAKKAQICQKQVKYLGYLLKEGQRWLTEARKETVMGQPTPKTPRQLREFLGKAGFCRLFIPGFAEMAAPLYPLTKPGTLFEWGPDQQKAYQEIKQALLTAPALGLPDLTKPFELFVDEKQGYAKGVLTQKLGPWRRPVAYLSKKLDPVAAGWPPCLRMVAAIAVLTKDAGKLTMGQPLVILAPHAVEALVKQPPDRWLSNARMTHYQALLLDTDRVQFGPIVALNPATLLPLPEEGLQHDCLDILAEAHGTRPDLTDQPLPDADHTWYTDGSSFLQEGQRKAGAAVTTETEVVWAKALPAGTSAQRAELIALTQALKMAEGKKLNVYTDSRYAFATAHIHGEIYRRRGWLTSEGKEIKNKDEILALLKALFLPKRLSIIHCPGHQKGNRAEARGNRMADQAAREVATRETPETSTLLAGKRTADGSEFEKRTADGSEFESPKKKAKVE

SEQ ID NO: 2513 - protein, 2103 aa, synthetic construct
MPAAKRVKLDGGDKKYSIGLDIGTNSVGWAVITDEYKVPSKKFKVLGNTDRHSIKKNLIGALLFDSGETAEATRLKRTARRRYTRRKNRICYLQEIFSNEMAKVDDSFFHRLEESFLVEEDKKHERHPIFGNIVDEVAYHEKYPTIYHLRKKLVDSTDKADLRLIYLALAHMIKFRGHFLIEGDLNPDNSDVDKLFIQLVQTYNQLFEENPINASGVDAKAILSARLSKSRRLENLIAQLPGEKKNGLFGNLIALSLGLTPNFKSNFDLAEDAKLQLSKDTYDDDLDNLLAQIGDQYADLFLAAKNLSDAILLSDILRVNTEITKAPLSASMIKRYDEHHQDLTLLKALVRQQLPEKYKEIFFDQSKNGYAGYIDGGASQEEFYKFIKPILEKMDGTEELLVKLNREDLLRKQRTFDNGSIPHQIHLGELHAILRRQEDFYPFLKDNREKIEKILTFRIPYYVGPLARGNSRFAWMTRKSEETITPWNFEEVVDKGASAQSFIERMTNFDKNLPNEKVLPKHSLLYEYFTVYNELTKVKYVTEGMRKPAFLSGEQKKAIVDLLFKTNRKVTVKQLKEDYFKKIECFDSVEISGVEDRFNASLGTYHDLLKIIKDKDFLDNEENEDILEDIVLTLTLFEDREMIEERLKTYAHLFDDKVMKQLKRRRYTGWGRLSRKLINGIRDKQSGKTILDFLKSDGFANRNFMQLIHDDSLTFKEDIQKAQVSGQGDSLHEHIANLAGSPAIKKGILQTVKVVDELVKVMGRHKPENIVIEMARENQTTQKGQKNSRERMKRIEEGIKELGSQILKEHPVENTQLQNEKLYLYYLQNGRDMYVDQELDINRLSDYDVDHIVPQSFLKDDSIDNKVLTRSDKARGKSDNVPSEEVVKKMKNYWRQLLNAKLITQRKFDNLTKAERGGLSELDKAGFIKRQLVETRQITKHVAQILDSRMNTKYDENDKLIREVKVITLKSKLVSDFRKDFQFYKVREINNYHHAHDAYLNAVVGTALIKKYPKLESEFVYGDYKVYDVRKMIAKSEQEIGKATAKYFFYSNIMNFFKTEITLANGEIRKRPLIETNGETGEIVWDKGRDFATVRKVLSMPQVNIVKKTEVQTGGFSKESILPKRNSDKLIARKKDWDPKKYGGFDSPTVAYSVLVVAKVEKGKSKKLKSVKELLGITIMERSSFEKNPIDFLEAKGYKEVKKDLIIKLPKYSLFELENGRKRMLASAGELQKGNELALPSKYVNFLYLASHYEKLKGSPEDNEQKQLFVEQHKHYLDEIIEQISEFSKRVILADANLDKVLSAYNKHRDKPIREQAENIIHLFTLTNLGAPAAFKYFDTTIDRKRYTSTKEVLDATLIHQSITGLYETRIDLSQLGGDGGGGSGGSGGSGGSGGSGGSGGTLNIEDEYRLHETSKGPDVPLGSTWLSDFPQAWAETGGMGLAVRQAPLIIPLKATSTPVSIKQYPMSQEARLGIKPHIQRLLDQGILVPCQSPWNTPLLPVKKPGTNDYRPVQDLREVNKRVEDIHPTVPNPYNLLSGLPPSHQWYTVLDLKDAFFCLRLHPTSQSLFAFEWRDPEMGISGQLTWTRLPQGFKNSPTLFNEALHRDLADFRIQHPDLILLQYVDDLLLAATSELDCQQGTRALLQTLGDLGYRASAKKAQICQKQVKYLGYLLKEGQRWLTEARKETVMGQPTPKTPRQLREFLGKAGFCRLFIPGFAEMAAPLYPLTKPGTLFEWGPDQQKAYQEIKQALLTAPALGLPDLTKPFELFVDEKQGYAKGVLTQKLGPWRRPVAYLSKKLDPVAAGWPPCLRMVAAIAVLTKDAGKLTMGQPLVILAPHAVEALVKQPPDRWLSNARMTHYQALLLDTDRVQFGPIVALNPATLLPLPEEGLQHDCLDILAEAHGTRPDLTDQPLPDADHTWYTDGSSFLQEGQRKAGAAVTTETEVVWAKALPAGTSAQRAELIALTQALKMAEGKKLNVYTDSRYAFATAHIHGEIYRRRGWLTSEGKEIKNKDEILALLKALFLPKRLSIIHCPGHQKGNRAEARGNRMADQAAREVATRETPETSTLLAGKRTADGSEFEKRTADGSEFESPKKKAKVE

SEQ ID NO: 2514 - protein, 2096 aa, synthetic construct
MPAAKRVKLDGGDKKYSIGLDIGTNSVGWAVITDEYKVPSKKFKVLGNTDRHSIKKNLIGALLFDSGETAEATRLKRTARRRYTRRKNRICYLQEIFSNEMAKVDDSFFHRLEESFLVEEDKKHERHPIFGNIVDEVAYHEKYPTIYHLRKKLVDSTDKADLRLIYLALAHMIKFRGHFLIEGDLNPDNSDVDKLFIQLVQTYNQLFEENPINASGVDAKAILSARLSKSRRLENLIAQLPGEKKNGLFGNLIALSLGLTPNFKSNFDLAEDAKLQLSKDTYDDDLDNLLAQIGDQYADLFLAAKNLSDAILLSDILRVNTEITKAPLSASMIKRYDEHHQDLTLLKALVRQQLPEKYKEIFFDQSKNGYAGYIDGGASQEEFYKFIKPILEKMDGTEELLVKLNREDLLRKQRTFDNGSIPHQIHLGELHAILRRQEDFYPFLKDNREKIEKILTFRIPYYVGPLARGNSRFAWMTRKSEETITPWNFEEVVDKGASAQSFIERMTNFDKNLPNEKVLPKHSLLYEYFTVYNELTKVKYVTEGMRKPAFLSGEQKKAIVDLLFKTNRKVTVKQLKEDYFKKIECFDSVEISGVEDRFNASLGTYHDLLKIIKDKDFLDNEENEDILEDIVLTLTLFEDREMIEERLKTYAHLFDDKVMKQLKRRRYTGWGRLSRKLINGIRDKQSGKTILDFLKSDGFANRNFMQLIHDDSLTFKEDIQKAQVSGQGDSLHEHIANLAGSPAIKKGILQTVKVVDELVKVMGRHKPENIVIEMARENQTTQKGQKNSRERMKRIEEGIKELGSQILKEHPVENTQLQNEKLYLYYLQNGRDMYVDQELDINRLSDYDVDHIVPQSFLKDDSIDNKVLTRSDKARGKSDNVPSEEVVKKMKNYWRQLLNAKLITQRKFDNLTKAERGGLSELDKAGFIKRQLVETRQITKHVAQILDSRMNTKYDENDKLIREVKVITLKSKLVSDFRKDFQFYKVREINNYHHAHDAYLNAVVGTALIKKYPKLESEFVYGDYKVYDVRKMIAKSEQEIGKATAKYFFYSNIMNFFKTEITLANGEIRKRPLIETNGETGEIVWDKGRDFATVRKVLSMPQVNIVKKTEVQTGGFSKESILPKRNSDKLIARKKDWDPKKYGGFDSPTVAYSVLVVAKVEKGKSKKLKSVKELLGITIMERSSFEKNPIDFLEAKGYKEVKKDLIIKLPKYSLFELENGRKRMLASAGELQKGNELALPSKYVNFLYLASHYEKLKGSPEDNEQKQLFVEQHKHYLDEIIEQISEFSKRVILADANLDKVLSAYNKHRDKPIREQAENIIHLFTLTNLGAPAAFKYFDTTIDRKRYTSTKEVLDATLIHQSITGLYETRIDLSQLGGDGGPAPEAAAKGSSGGTLNIEDEYRLHETSKGPDVPLGSTWLSDFPQAWAETGGMGLAVRQAPLIIPLKATSTPVSIKQYPMSQEARLGIKPHIQRLLDQGILVPCQSPWNTPLLPVKKPGTNDYRPVQDLREVNKRVEDIHPTVPNPYNLLSGLPPSHQWYTVLDLKDAFFCLRLHPTSQSLFAFEWRDPEMGISGQLTWTRLPQGFKNSPTLFNEALHRDLADFRIQHPDLILLQYVDDLLLAATSELDCQQGTRALLQTLGDLGYRASAKKAQICQKQVKYLGYLLKEGQRWLTEARKETVMGQPTPKTPRQLREFLGKAGFCRLFIPGFAEMAAPLYPLTKPGTLFEWGPDQQKAYQEIKQALLTAPALGLPDLTKPFELFVDEKQGYAKGVLTQKLGPWRRPVAYLSKKLDPVAAGWPPCLRMVAAIAVLTKDAGKLTMGQPLVILAPHAVEALVKQPPDRWLSNARMTHYQALLLDTDRVQFGPIVALNPATLLPLPEEGLQHDCLDILAEAHGTRPDLTDQPLPDADHTWYTDGSSFLQEGQRKAGAAVTTETEVVWAKALPAGTSAQRAELIALTQALKMAEGKKLNVYTDSRYAFATAHIHGEIYRRRGWLTSEGKEIKNKDEILALLKALFLPKRLSIIHCPGHQKGNRAEARGNRMADQAAREVATRETPETSTLLAGKRTADGSEFEKRTADGSEFESPKKKAKVE

SEQ ID NO: 2515 - protein, 2096 aa, synthetic construct
MPAAKRVKLDGGDKKYSIGLDIGTNSVGWAVITDEYKVPSKKFKVLGNTDRHSIKKNLIGALLFDSGETAEATRLKRTARRRYTRRKNRICYLQEIFSNEMAKVDDSFFHRLEESFLVEEDKKHERHPIFGNIVDEVAYHEKYPTIYHLRKKLVDSTDKADLRLIYLALAHMIKFRGHFLIEGDLNPDNSDVDKLFIQLVQTYNQLFEENPINASGVDAKAILSARLSKSRRLENLIAQLPGEKKNGLFGNLIALSLGLTPNFKSNFDLAEDAKLQLSKDTYDDDLDNLLAQIGDQYADLFLAAKNLSDAILLSDILRVNTEITKAPLSASMIKRYDEHHQDLTLLKALVRQQLPEKYKEIFFDQSKNGYAGYIDGGASQEEFYKFIKPILEKMDGTEELLVKLNREDLLRKQRTFDNGSIPHQIHLGELHAILRRQEDFYPFLKDNREKIEKILTFRIPYYVGPLARGNSRFAWMTRKSEETITPWNFEEVVDKGASAQSFIERMTNFDKNLPNEKVLPKHSLLYEYFTVYNELTKVKYVTEGMRKPAFLSGEQKKAIVDLLFKTNRKVTVKQLKEDYFKKIECFDSVEISGVEDRFNASLGTYHDLLKIIKDKDFLDNEENEDILEDIVLTLTLFEDREMIEERLKTYAHLFDDKVMKQLKRRRYTGWGRLSRKLINGIRDKQSGKTILDFLKSDGFANRNFMQLIHDDSLTFKEDIQKAQVSGQGDSLHEHIANLAGSPAIKKGILQTVKVVDELVKVMGRHKPENIVIEMARENQTTQKGQKNSRERMKRIEEGIKELGSQILKEHPVENTQLQNEKLYLYYLQNGRDMYVDQELDINRLSDYDVDHIVPQSFLKDDSIDNKVLTRSDKARGKSDNVPSEEVVKKMKNYWRQLLNAKLITQRKFDNLTKAERGGLSELDKAGFIKRQLVETRQITKHVAQILDSRMNTKYDENDKLIREVKVITLKSKLVSDFRKDFQFYKVREINNYHHAHDAYLNAVVGTALIKKYPKLESEFVYGDYKVYDVRKMIAKSEQEIGKATAKYFFYSNIMNFFKTEITLANGEIRKRPLIETNGETGEIVWDKGRDFATVRKVLSMPQVNIVKKTEVQTGGFSKESILPKRNSDKLIARKKDWDPKKYGGFDSPTVAYSVLVVAKVEKGKSKKLKSVKELLGITIMERSSFEKNPIDFLEAKGYKEVKKDLIIKLPKYSLFELENGRKRMLASAGELQKGNELALPSKYVNFLYLASHYEKLKGSPEDNEQKQLFVEQHKHYLDEIIEQISEFSKRVILADANLDKVLSAYNKHRDKPIREQAENIIHLFTLTNLGAPAAFKYFDTTIDRKRYTSTKEVLDATLIHQSITGLYETRIDLSQLGGDGGGSSGGGEAAAKGGTLNIEDEYRLHETSKGPDVPLGSTWLSDFPQAWAETGGMGLAVRQAPLIIPLKATSTPVSIKQYPMSQEARLGIKPHIQRLLDQGILVPCQSPWNTPLLPVKKPGTNDYRPVQDLREVNKRVEDIHPTVPNPYNLLSGLPPSHQWYTVLDLKDAFFCLRLHPTSQSLFAFEWRDPEMGISGQLTWTRLPQGFKNSPTLFNEALHRDLADFRIQHPDLILLQYVDDLLLAATSELDCQQGTRALLQTLGDLGYRASAKKAQICQKQVKYLGYLLKEGQRWLTEARKETVMGQPTPKTPRQLREFLGKAGFCRLFIPGFAEMAAPLYPLTKPGTLFEWGPDQQKAYQEIKQALLTAPALGLPDLTKPFELFVDEKQGYAKGVLTQKLGPWRRPVAYLSKKLDPVAAGWPPCLRMVAAIAVLTKDAGKLTMGQPLVILAPHAVEALVKQPPDRWLSNARMTHYQALLLDTDRVQFGPIVALNPATLLPLPEEGLQHDCLDILAEAHGTRPDLTDQPLPDADHTWYTDGSSFLQEGQRKAGAAVTTETEVVWAKALPAGTSAQRAELIALTQALKMAEGKKLNVYTDSRYAFATAHIHGEIYRRRGWLTSEGKEIKNKDEILALLKALFLPKRLSIIHCPGHQKGNRAEARGNRMADQAAREVATRETPETSTLLAGKRTADGSEFEKRTADGSEFESPKKKAKVE

SEQ ID NO: 2516 - protein, 2100 aa, synthetic construct
MPAAKRVKLDGGDKKYSIGLDIGTNSVGWAVITDEYKVPSKKFKVLGNTDRHSIKKNLIGALLFDSGETAEATRLKRTARRRYTRRKNRICYLQEIFSNEMAKVDDSFFHRLEESFLVEEDKKHERHPIFGNIVDEVAYHEKYPTIYHLRKKLVDSTDKADLRLIYLALAHMIKFRGHFLIEGDLNPDNSDVDKLFIQLVQTYNQLFEENPINASGVDAKAILSARLSKSRRLENLIAQLPGEKKNGLFGNLIALSLGLTPNFKSNFDLAEDAKLQLSKDTYDDDLDNLLAQIGDQYADLFLAAKNLSDAILLSDILRVNTEITKAPLSASMIKRYDEHHQDLTLLKALVRQQLPEKYKEIFFDQSKNGYAGYIDGGASQEEFYKFIKPILEKMDGTEELLVKLNREDLLRKQRTFDNGSIPHQIHLGELHAILRRQEDFYPFLKDNREKIEKILTFRIPYYVGPLARGNSRFAWMTRKSEETITPWNFEEVVDKGASAQSFIERMTNFDKNLPNEKVLPKHSLLYEYFTVYNELTKVKYVTEGMRKPAFLSGEQKKAIVDLLFKTNRKVTVKQLKEDYFKKIECFDSVEISGVEDRFNASLGTYHDLLKIIKDKDFLDNEENEDILEDIVLTLTLFEDREMIEERLKTYAHLFDDKVMKQLKRRRYTGWGRLSRKLINGIRDKQSGKTILDFLKSDGFANRNFMQLIHDDSLTFKEDIQKAQVSGQGDSLHEHIANLAGSPAIKKGILQTVKVVDELVKVMGRHKPENIVIEMARENQTTQKGQKNSRERMKRIEEGIKELGSQILKEHPVENTQLQNEKLYLYYLQNGRDMYVDQELDINRLSDYDVDHIVPQSFLKDDSIDNKVLTRSDKARGKSDNVPSEEVVKKMKNYWRQLLNAKLITQRKFDNLTKAERGGLSELDKAGFIKRQLVETRQITKHVAQILDSRMNTKYDENDKLIREVKVITLKSKLVSDFRKDFQFYKVREINNYHHAHDAYLNAVVGTALIKKYPKLESEFVYGDYKVYDVRKMIAKSEQEIGKATAKYFFYSNIMNFFKTEITLANGEIRKRPLIETNGETGEIVWDKGRDFATVRKVLSMPQVNIVKKTEVQTGGFSKESILPKRNSDKLIARKKDWDPKKYGGFDSPTVAYSVLVVAKVEKGKSKKLKSVKELLGITIMERSSFEKNPIDFLEAKGYKEVKKDLIIKLPKYSLFELENGRKRMLASAGELQKGNELALPSKYVNFLYLASHYEKLKGSPEDNEQKQLFVEQHKHYLDEIIEQISEFSKRVILADANLDKVLSAYNKHRDKPIREQAENIIHLFTLTNLGAPAAFKYFDTTIDRKRYTSTKEVLDATLIHQSITGLYETRIDLSQLGGDGGGGGGSGGGGSGGGGSGGTLNIEDEYRLHETSKGPDVPLGSTWLSDFPQAWAETGGMGLAVRQAPLIIPLKATSTPVSIKQYPMSQEARLGIKPHIQRLLDQGILVPCQSPWNTPLLPVKKPGTNDYRPVQDLREVNKRVEDIHPTVPNPYNLLSGLPPSHQWYTVLDLKDAFFCLRLHPTSQSLFAFEWRDPEMGISGQLTWTRLPQGFKNSPTLFNEALHRDLADFRIQHPDLILLQYVDDLLLAATSELDCQQGTRALLQTLGDLGYRASAKKAQICQKQVKYLGYLLKEGQRWLTEARKETVMGQPTPKTPRQLREFLGKAGFCRLFIPGFAEMAAPLYPLTKPGTLFEWGPDQQKAYQEIKQALLTAPALGLPDLTKPFELFVDEKQGYAKGVLTQKLGPWRRPVAYLSKKLDPVAAGWPPCLRMVAAIAVLTKDAGKLTMGQPLVILAPHAVEALVKQPPDRWLSNARMTHYQALLLDTDRVQFGPIVALNPATLLPLPEEGLQHDCLDILAEAHGTRPDLTDQPLPDADHTWYTDGSSFLQEGQRKAGAAVTTETEVVWAKALPAGTSAQRAELIALTQALKMAEGKKLNVYTDSRYAFATAHIHGEIYRRRGWLTSEGKEIKNKDEILALLKALFLPKRLSIIHCPGHQKGNRAEARGNRMADQAAREVATRETPETSTLLAGKRTADGSEFEKRTADGSEFESPKKKAKVE

SEQ ID NO: 2517 - protein, 2093 aa, synthetic construct
MPAAKRVKLDGGDKKYSIGLDIGTNSVGWAVITDEYKVPSKKFKVLGNTDRHSIKKNLIGALLFDSGETAEATRLKRTARRRYTRRKNRICYLQEIFSNEMAKVDDSFFHRLEESFLVEEDKKHERHPIFGNIVDEVAYHEKYPTIYHLRKKLVDSTDKADLRLIYLALAHMIKFRGHFLIEGDLNPDNSDVDKLFIQLVQTYNQLFEENPINASGVDAKAILSARLSKSRRLENLIAQLPGEKKNGLFGNLIALSLGLTPNFKSNFDLAEDAKLQLSKDTYDDDLDNLLAQIGDQYADLFLAAKNLSDAILLSDILRVNTEITKAPLSASMIKRYDEHHQDLTLLKALVRQQLPEKYKEIFFDQSKNGYAGYIDGGASQEEFYKFIKPILEKMDGTEELLVKLNREDLLRKQRTFDNGSIPHQIHLGELHAILRRQEDFYPFLKDNREKIEKILTFRIPYYVGPLARGNSRFAWMTRKSEETITPWNFEEVVDKGASAQSFIERMTNFDKNLPNEKVLPKHSLLYEYFTVYNELTKVKYVTEGMRKPAFLSGEQKKAIVDLLFKTNRKVTVKQLKEDYFKKIECFDSVEISGVEDRFNASLGTYHDLLKIIKDKDFLDNEENEDILEDIVLTLTLFEDREMIEERLKTYAHLFDDKVMKQLKRRRYTGWGRLSRKLINGIRDKQSGKTILDFLKSDGFANRNFMQLIHDDSLTFKEDIQKAQVSGQGDSLHEHIANLAGSPAIKKGILQTVKVVDELVKVMGRHKPENIVIEMARENQTTQKGQKNSRERMKRIEEGIKELGSQILKEHPVENTQLQNEKLYLYYLQNGRDMYVDQELDINRLSDYDVDHIVPQSFLKDDSIDNKVLTRSDKARGKSDNVPSEEVVKKMKNYWRQLLNAKLITQRKFDNLTKAERGGLSELDKAGFIKRQLVETRQITKHVAQILDSRMNTKYDENDKLIREVKVITLKSKLVSDFRKDFQFYKVREINNYHHAHDAYLNAVVGTALIKKYPKLESEFVYGDYKVYDVRKMIAKSEQEIGKATAKYFFYSNIMNFFKTEITLANGEIRKRPLIETNGETGEIVWDKGRDFATVRKVLSMPQVNIVKKTEVQTGGFSKESILPKRNSDKLIARKKDWDPKKYGGFDSPTVAYSVLVVAKVEKGKSKKLKSVKELLGITIMERSSFEKNPIDFLEAKGYKEVKKDLIIKLPKYSLFELENGRKRMLASAGELQKGNELALPSKYVNFLYLASHYEKLKGSPEDNEQKQLFVEQHKHYLDEIIEQISEFSKRVILADANLDKVLSAYNKHRDKPIREQAENIIHLFTLTNLGAPAAFKYFDTTIDRKRYTSTKEVLDATLIHQSITGLYETRIDLSQLGGDGGEAAAKGGGGGTLNIEDEYRLHETSKGPDVPLGSTWLSDFPQAWAETGGMGLAVRQAPLIIPLKATSTPVSIKQYPMSQEARLGIKPHIQRLLDQGILVPCQSPWNTPLLPVKKPGTNDYRPVQDLREVNKRVEDIHPTVPNPYNLLSGLPPSHQWYTVLDLKDAFFCLRLHPTSQSLFAFEWRDPEMGISGQLTWTRLPQGFKNSPTLFNEALHRDLADFRIQHPDLILLQYVDDLLLAATSELDCQQGTRALLQTLGDLGYRASAKKAQICQKQVKYLGYLLKEGQRWLTEARKETVMGQPTPKTPRQLREFLGKAGFCRLFIPGFAEMAAPLYPLTKPGTLFEWGPDQQKAYQEIKQALLTAPALGLPDLTKPFELFVDEKQGYAKGVLTQKLGPWRRPVAYLSKKLDPVAAGWPPCLRMVAAIAVLTKDAGKLTMGQPLVILAPHAVEALVKQPPDRWLSNARMTHYQALLLDTDRVQFGPIVALNPATLLPLPEEGLQHDCLDILAEAHGTRPDLTDQPLPDADHTWYTDGSSFLQEGQRKAGAAVTTETEVVWAKALPAGTSAQRAELIALTQALKMAEGKKLNVYTDSRYAFATAHIHGEIYRRRGWLTSEGKEIKNKDEILALLKALFLPKRLSIIHCPGHQKGNRAEARGNRMADQAAREVATRETPETSTLLAGKRTADGSEFEKRTADGSEFESPKKKAKVE

SEQ ID NO: 2518 - protein, 2101 aa, synthetic construct
MPAAKRVKLDGGDKKYSIGLDIGTNSVGWAVITDEYKVPSKKFKVLGNTDRHSIKKNLIGALLFDSGETAEATRLKRTARRRYTRRKNRICYLQEIFSNEMAKVDDSFFHRLEESFLVEEDKKHERHPIFGNIVDEVAYHEKYPTIYHLRKKLVDSTDKADLRLIYLALAHMIKFRGHFLIEGDLNPDNSDVDKLFIQLVQTYNQLFEENPINASGVDAKAILSARLSKSRRLENLIAQLPGEKKNGLFGNLIALSLGLTPNFKSNFDLAEDAKLQLSKDTYDDDLDNLLAQIGDQYADLFLAAKNLSDAILLSDILRVNTEITKAPLSASMIKRYDEHHQDLTLLKALVRQQLPEKYKEIFFDQSKNGYAGYIDGGASQEEFYKFIKPILEKMDGTEELLVKLNREDLLRKQRTFDNGSIPHQIHLGELHAILRRQEDFYPFLKDNREKIEKILTFRIPYYVGPLARGNSRFAWMTRKSEETITPWNFEEVVDKGASAQSFIERMTNFDKNLPNEKVLPKHSLLYEYFTVYNELTKVKYVTEGMRKPAFLSGEQKKAIVDLLFKTNRKVTVKQLKEDYFKKIECFDSVEISGVEDRFNASLGTYHDLLKIIKDKDFLDNEENEDILEDIVLTLTLFEDREMIEERLKTYAHLFDDKVMKQLKRRRYTGWGRLSRKLINGIRDKQSGKTILDFLKSDGFANRNFMQLIHDDSLTFKEDIQKAQVSGQGDSLHEHIANLAGSPAIKKGILQTVKVVDELVKVMGRHKPENIVIEMARENQTTQKGQKNSRERMKRIEEGIKELGSQILKEHPVENTQLQNEKLYLYYLQNGRDMYVDQELDINRLSDYDVDHIVPQSFLKDDSIDNKVLTRSDKARGKSDNVPSEEVVKKMKNYWRQLLNAKLITQRKFDNLTKAERGGLSELDKAGFIKRQLVETRQITKHVAQILDSRMNTKYDENDKLIREVKVITLKSKLVSDFRKDFQFYKVREINNYHHAHDAYLNAVVGTALIKKYPKLESEFVYGDYKVYDVRKMIAKSEQEIGKATAKYFFYSNIMNFFKTEITLANGEIRKRPLIETNGETGEIVWDKGRDFATVRKVLSMPQVNIVKKTEVQTGGFSKESILPKRNSDKLIARKKDWDPKKYGGFDSPTVAYSVLVVAKVEKGKSKKLKSVKELLGITIMERSSFEKNPIDFLEAKGYKEVKKDLIIKLPKYSLFELENGRKRMLASAGELQKGNELALPSKYVNFLYLASHYEKLKGSPEDNEQKQLFVEQHKHYLDEIIEQISEFSKRVILADANLDKVLSAYNKHRDKPIREQAENIIHLFTLTNLGAPAAFKYFDTTIDRKRYTSTKEVLDATLIHQSITGLYETRIDLSQLGGDGGSGSETPGTSESATPESGGTLNIEDEYRLHETSKGPDVPLGSTWLSDFPQAWAETGGMGLAVRQAPLIIPLKATSTPVSIKQYPMSQEARLGIKPHIQRLLDQGILVPCQSPWNTPLLPVKKPGTNDYRPVQDLREVNKRVEDIHPTVPNPYNLLSGLPPSHQWYTVLDLKDAFFCLRLHPTSQSLFAFEWRDPEMGISGQLTWTRLPQGFKNSPTLFNEALHRDLADFRIQHPDLILLQYVDDLLLAATSELDCQQGTRALLQTLGDLGYRASAKKAQICQKQVKYLGYLLKEGQRWLTEARKETVMGQPTPKTPRQLREFLGKAGFCRLFIPGFAEMAAPLYPLTKPGTLFEWGPDQQKAYQEIKQALLTAPALGLPDLTKPFELFVDEKQGYAKGVLTQKLGPWRRPVAYLSKKLDPVAAGWPPCLRMVAAIAVLTKDAGKLTMGQPLVILAPHAVEALVKQPPDRWLSNARMTHYQALLLDTDRVQFGPIVALNPATLLPLPEEGLQHDCLDILAEAHGTRPDLTDQPLPDADHTWYTDGSSFLQEGQRKAGAAVTTETEVVWAKALPAGTSAQRAELIALTQALKMAEGKKLNVYTDSRYAFATAHIHGEIYRRRGWLTSEGKEIKNKDEILALLKALFLPKRLSIIHCPGHQKGNRAEARGNRMADQAAREVATRETPETSTLLAGKRTADGSEFEKRTADGSEFESPKKKAKVE

SEQ ID NO: 2519 - protein, 2096 aa, synthetic construct
MPAAKRVKLDGGDKKYSIGLDIGTNSVGWAVITDEYKVPSKKFKVLGNTDRHSIKKNLIGALLFDSGETAEATRLKRTARRRYTRRKNRICYLQEIFSNEMAKVDDSFFHRLEESFLVEEDKKHERHPIFGNIVDEVAYHEKYPTIYHLRKKLVDSTDKADLRLIYLALAHMIKFRGHFLIEGDLNPDNSDVDKLFIQLVQTYNQLFEENPINASGVDAKAILSARLSKSRRLENLIAQLPGEKKNGLFGNLIALSLGLTPNFKSNFDLAEDAKLQLSKDTYDDDLDNLLAQIGDQYADLFLAAKNLSDAILLSDILRVNTEITKAPLSASMIKRYDEHHQDLTLLKALVRQQLPEKYKEIFFDQSKNGYAGYIDGGASQEEFYKFIKPILEKMDGTEELLVKLNREDLLRKQRTFDNGSIPHQIHLGELHAILRRQEDFYPFLKDNREKIEKILTFRIPYYVGPLARGNSRFAWMTRKSEETITPWNFEEVVDKGASAQSFIERMTNFDKNLPNEKVLPKHSLLYEYFTVYNELTKVKYVTEGMRKPAFLSGEQKKAIVDLLFKTNRKVTVKQLKEDYFKKIECFDSVEISGVEDRFNASLGTYHDLLKIIKDKDFLDNEENEDILEDIVLTLTLFEDREMIEERLKTYAHLFDDKVMKQLKRRRYTGWGRLSRKLINGIRDKQSGKTILDFLKSDGFANRNFMQLIHDDSLTFKEDIQKAQVSGQGDSLHEHIANLAGSPAIKKGILQTVKVVDELVKVMGRHKPENIVIEMARENQTTQKGQKNSRERMKRIEEGIKELGSQILKEHPVENTQLQNEKLYLYYLQNGRDMYVDQELDINRLSDYDVDHIVPQSFLKDDSIDNKVLTRSDKARGKSDNVPSEEVVKKMKNYWRQLLNAKLITQRKFDNLTKAERGGLSELDKAGFIKRQLVETRQITKHVAQILDSRMNTKYDENDKLIREVKVITLKSKLVSDFRKDFQFYKVREINNYHHAHDAYLNAVVGTALIKKYPKLESEFVYGDYKVYDVRKMIAKSEQEIGKATAKYFFYSNIMNFFKTEITLANGEIRKRPLIETNGETGEIVWDKGRDFATVRKVLSMPQVNIVKKTEVQTGGFSKESILPKRNSDKLIARKKDWDPKKYGGFDSPTVAYSVLVVAKVEKGKSKKLKSVKELLGITIMERSSFEKNPIDFLEAKGYKEVKKDLIIKLPKYSLFELENGRKRMLASAGELQKGNELALPSKYVNFLYLASHYEKLKGSPEDNEQKQLFVEQHKHYLDEIIEQISEFSKRVILADANLDKVLSAYNKHRDKPIREQAENIIHLFTLTNLGAPAAFKYFDTTIDRKRYTSTKEVLDATLIHQSITGLYETRIDLSQLGGDGGEAAAKPAPGSSGGTLNIEDEYRLHETSKGPDVPLGSTWLSDFPQAWAETGGMGLAVRQAPLIIPLKATSTPVSIKQYPMSQEARLGIKPHIQRLLDQGILVPCQSPWNTPLLPVKKPGTNDYRPVQDLREVNKRVEDIHPTVPNPYNLLSGLPPSHQWYTVLDLKDAFFCLRLHPTSQSLFAFEWRDPEMGISGQLTWTRLPQGFKNSPTLFNEALHRDLADFRIQHPDLILLQYVDDLLLAATSELDCQQGTRALLQTLGDLGYRASAKKAQICQKQVKYLGYLLKEGQRWLTEARKETVMGQPTPKTPRQLREFLGKAGFCRLFIPGFAEMAAPLYPLTKPGTLFEWGPDQQKAYQEIKQALLTAPALGLPDLTKPFELFVDEKQGYAKGVLTQKLGPWRRPVAYLSKKLDPVAAGWPPCLRMVAAIAVLTKDAGKLTMGQPLVILAPHAVEALVKQPPDRWLSNARMTHYQALLLDTDRVQFGPIVALNPATLLPLPEEGLQHDCLDILAEAHGTRPDLTDQPLPDADHTWYTDGSSFLQEGQRKAGAAVTTETEVVWAKALPAGTSAQRAELIALTQALKMAEGKKLNVYTDSRYAFATAHIHGEIYRRRGWLTSEGKEIKNKDEILALLKALFLPKRLSIIHCPGHQKGNRAEARGNRMADQAAREVATRETPETSTLLAGKRTADGSEFEKRTADGSEFESPKKKAKVE

SEQ ID NO: 2520 - protein, 2091 aa, synthetic construct
MPAAKRVKLDGGDKKYSIGLDIGTNSVGWAVITDEYKVPSKKFKVLGNTDRHSIKKNLIGALLFDSGETAEATRLKRTARRRYTRRKNRICYLQEIFSNEMAKVDDSFFHRLEESFLVEEDKKHERHPIFGNIVDEVAYHEKYPTIYHLRKKLVDSTDKADLRLIYLALAHMIKFRGHFLIEGDLNPDNSDVDKLFIQLVQTYNQLFEENPINASGVDAKAILSARLSKSRRLENLIAQLPGEKKNGLFGNLIALSLGLTPNFKSNFDLAEDAKLQLSKDTYDDDLDNLLAQIGDQYADLFLAAKNLSDAILLSDILRVNTEITKAPLSASMIKRYDEHHQDLTLLKALVRQQLPEKYKEIFFDQSKNGYAGYIDGGASQEEFYKFIKPILEKMDGTEELLVKLNREDLLRKQRTFDNGSIPHQIHLGELHAILRRQEDFYPFLKDNREKIEKILTFRIPYYVGPLARGNSRFAWMTRKSEETITPWNFEEVVDKGASAQSFIERMTNFDKNLPNEKVLPKHSLLYEYFTVYNELTKVKYVTEGMRKPAFLSGEQKKAIVDLLFKTNRKVTVKQLKEDYFKKIECFDSVEISGVEDRFNASLGTYHDLLKIIKDKDFLDNEENEDILEDIVLTLTLFEDREMIEERLKTYAHLFDDKVMKQLKRRRYTGWGRLSRKLINGIRDKQSGKTILDFLKSDGFANRNFMQLIHDDSLTFKEDIQKAQVSGQGDSLHEHIANLAGSPAIKKGILQTVKVVDELVKVMGRHKPENIVIEMARENQTTQKGQKNSRERMKRIEEGIKELGSQILKEHPVENTQLQNEKLYLYYLQNGRDMYVDQELDINRLSDYDVDHIVPQSFLKDDSIDNKVLTRSDKARGKSDNVPSEEVVKKMKNYWRQLLNAKLITQRKFDNLTKAERGGLSELDKAGFIKRQLVETRQITKHVAQILDSRMNTKYDENDKLIREVKVITLKSKLVSDFRKDFQFYKVREINNYHHAHDAYLNAVVGTALIKKYPKLESEFVYGDYKVYDVRKMIAKSEQEIGKATAKYFFYSNIMNFFKTEITLANGEIRKRPLIETNGETGEIVWDKGRDFATVRKVLSMPQVNIVKKTEVQTGGFSKESILPKRNSDKLIARKKDWDPKKYGGFDSPTVAYSVLVVAKVEKGKSKKLKSVKELLGITIMERSSFEKNPIDFLEAKGYKEVKKDLIIKLPKYSLFELENGRKRMLASAGELQKGNELALPSKYVNFLYLASHYEKLKGSPEDNEQKQLFVEQHKHYLDEIIEQISEFSKRVILADANLDKVLSAYNKHRDKPIREQAENIIHLFTLTNLGAPAAFKYFDTTIDRKRYTSTKEVLDATLIHQSITGLYETRIDLSQLGGDGGGSSGSSGGTLNIEDEYRLHETSKGPDVPLGSTWLSDFPQAWAETGGMGLAVRQAPLIIPLKATSTPVSIKQYPMSQEARLGIKPHIQRLLDQGILVPCQSPWNTPLLPVKKPGTNDYRPVQDLREVNKRVEDIHPTVPNPYNLLSGLPPSHQWYTVLDLKDAFFCLRLHPTSQSLFAFEWRDPEMGISGQLTWTRLPQGFKNSPTLFNEALHRDLADFRIQHPDLILLQYVDDLLLAATSELDCQQGTRALLQTLGDLGYRASAKKAQICQKQVKYLGYLLKEGQRWLTEARKETVMGQPTPKTPRQLREFLGKAGFCRLFIPGFAEMAAPLYPLTKPGTLFEWGPDQQKAYQEIKQALLTAPALGLPDLTKPFELFVDEKQGYAKGVLTQKLGPWRRPVAYLSKKLDPVAAGWPPCLRMVAAIAVLTKDAGKLTMGQPLVILAPHAVEALVKQPPDRWLSNARMTHYQALLLDTDRVQFGPIVALNPATLLPLPEEGLQHDCLDILAEAHGTRPDLTDQPLPDADHTWYTDGSSFLQEGQRKAGAAVTTETEVVWAKALPAGTSAQRAELIALTQALKMAEGKKLNVYTDSRYAFATAHIHGEIYRRRGWLTSEGKEIKNKDEILALLKALFLPKRLSIIHCPGHQKGNRAEARGNRMADQAAREVATRETPETSTLLAGKRTADGSEFEKRTADGSEFESPKKKAKVE

SEQ ID NO: 2521 - protein, 2096 aa, synthetic construct
MPAAKRVKLDGGDKKYSIGLDIGTNSVGWAVITDEYKVPSKKFKVLGNTDRHSIKKNLIGALLFDSGETAEATRLKRTARRRYTRRKNRICYLQEIFSNEMAKVDDSFFHRLEESFLVEEDKKHERHPIFGNIVDEVAYHEKYPTIYHLRKKLVDSTDKADLRLIYLALAHMIKFRGHFLIEGDLNPDNSDVDKLFIQLVQTYNQLFEENPINASGVDAKAILSARLSKSRRLENLIAQLPGEKKNGLFGNLIALSLGLTPNFKSNFDLAEDAKLQLSKDTYDDDLDNLLAQIGDQYADLFLAAKNLSDAILLSDILRVNTEITKAPLSASMIKRYDEHHQDLTLLKALVRQQLPEKYKEIFFDQSKNGYAGYIDGGASQEEFYKFIKPILEKMDGTEELLVKLNREDLLRKQRTFDNGSIPHQIHLGELHAILRRQEDFYPFLKDNREKIEKILTFRIPYYVGPLARGNSRFAWMTRKSEETITPWNFEEVVDKGASAQSFIERMTNFDKNLPNEKVLPKHSLLYEYFTVYNELTKVKYVTEGMRKPAFLSGEQKKAIVDLLFKTNRKVTVKQLKEDYFKKIECFDSVEISGVEDRFNASLGTYHDLLKIIKDKDFLDNEENEDILEDIVLTLTLFEDREMIEERLKTYAHLFDDKVMKQLKRRRYTGWGRLSRKLINGIRDKQSGKTILDFLKSDGFANRNFMQLIHDDSLTFKEDIQKAQVSGQGDSLHEHIANLAGSPAIKKGILQTVKVVDELVKVMGRHKPENIVIEMARENQTTQKGQKNSRERMKRIEEGIKELGSQILKEHPVENTQLQNEKLYLYYLQNGRDMYVDQELDINRLSDYDVDHIVPQSFLKDDSIDNKVLTRSDKARGKSDNVPSEEVVKKMKNYWRQLLNAKLITQRKFDNLTKAERGGLSELDKAGFIKRQLVETRQITKHVAQILDSRMNTKYDENDKLIREVKVITLKSKLVSDFRKDFQFYKVREINNYHHAHDAYLNAVVGTALIKKYPKLESEFVYGDYKVYDVRKMIAKSEQEIGKATAKYFFYSNIMNFFKTEITLANGEIRKRPLIETNGETGEIVWDKGRDFATVRKVLSMPQVNIVKKTEVQTGGFSKESILPKRNSDKLIARKKDWDPKKYGGFDSPTVAYSVLVVAKVEKGKSKKLKSVKELLGITIMERSSFEKNPIDFLEAKGYKEVKKDLIIKLPKYSLFELENGRKRMLASAGELQKGNELALPSKYVNFLYLASHYEKLKGSPEDNEQKQLFVEQHKHYLDEIIEQISEFSKRVILADANLDKVLSAYNKHRDKPIREQAENIIHLFTLTNLGAPAAFKYFDTTIDRKRYTSTKEVLDATLIHQSITGLYETRIDLSQLGGDGGGGGEAAAKGGSGGTLNIEDEYRLHETSKGPDVPLGSTWLSDFPQAWAETGGMGLAVRQAPLIIPLKATSTPVSIKQYPMSQEARLGIKPHIQRLLDQGILVPCQSPWNTPLLPVKKPGTNDYRPVQDLREVNKRVEDIHPTVPNPYNLLSGLPPSHQWYTVLDLKDAFFCLRLHPTSQSLFAFEWRDPEMGISGQLTWTRLPQGFKNSPTLFNEALHRDLADFRIQHPDLILLQYVDDLLLAATSELDCQQGTRALLQTLGDLGYRASAKKAQICQKQVKYLGYLLKEGQRWLTEARKETVMGQPTPKTPRQLREFLGKAGFCRLFIPGFAEMAAPLYPLTKPGTLFEWGPDQQKAYQEIKQALLTAPALGLPDLTKPFELFVDEKQGYAKGVLTQKLGPWRRPVAYLSKKLDPVAAGWPPCLRMVAAIAVLTKDAGKLTMGQPLVILAPHAVEALVKQPPDRWLSNARMTHYQALLLDTDRVQFGPIVALNPATLLPLPEEGLQHDCLDILAEAHGTRPDLTDQPLPDADHTWYTDGSSFLQEGQRKAGAAVTTETEVVWAKALPAGTSAQRAELIALTQALKMAEGKKLNVYTDSRYAFATAHIHGEIYRRRGWLTSEGKEIKNKDEILALLKALFLPKRLSIIHCPGHQKGNRAEARGNRMADQAAREVATRETPETSTLLAGKRTADGSEFEKRTADGSEFESPKKKAKVE

SEQ ID NO: 2522 - protein, 2105 aa, synthetic construct
MPAAKRVKLDGGDKKYSIGLDIGTNSVGWAVITDEYKVPSKKFKVLGNTDRHSIKKNLIGALLFDSGETAEATRLKRTARRRYTRRKNRICYLQEIFSNEMAKVDDSFFHRLEESFLVEEDKKHERHPIFGNIVDEVAYHEKYPTIYHLRKKLVDSTDKADLRLIYLALAHMIKFRGHFLIEGDLNPDNSDVDKLFIQLVQTYNQLFEENPINASGVDAKAILSARLSKSRRLENLIAQLPGEKKNGLFGNLIALSLGLTPNFKSNFDLAEDAKLQLSKDTYDDDLDNLLAQIGDQYADLFLAAKNLSDAILLSDILRVNTEITKAPLSASMIKRYDEHHQDLTLLKALVRQQLPEKYKEIFFDQSKNGYAGYIDGGASQEEFYKFIKPILEKMDGTEELLVKLNREDLLRKQRTFDNGSIPHQIHLGELHAILRRQEDFYPFLKDNREKIEKILTFRIPYYVGPLARGNSRFAWMTRKSEETITPWNFEEVVDKGASAQSFIERMTNFDKNLPNEKVLPKHSLLYEYFTVYNELTKVKYVTEGMRKPAFLSGEQKKAIVDLLFKTNRKVTVKQLKEDYFKKIECFDSVEISGVEDRFNASLGTYHDLLKIIKDKDFLDNEENEDILEDIVLTLTLFEDREMIEERLKTYAHLFDDKVMKQLKRRRYTGWGRLSRKLINGIRDKQSGKTILDFLKSDGFANRNFMQLIHDDSLTFKEDIQKAQVSGQGDSLHEHIANLAGSPAIKKGILQTVKVVDELVKVMGRHKPENIVIEMARENQTTQKGQKNSRERMKRIEEGIKELGSQILKEHPVENTQLQNEKLYLYYLQNGRDMYVDQELDINRLSDYDVDHIVPQSFLKDDSIDNKVLTRSDKARGKSDNVPSEEVVKKMKNYWRQLLNAKLITQRKFDNLTKAERGGLSELDKAGFIKRQLVETRQITKHVAQILDSRMNTKYDENDKLIREVKVITLKSKLVSDFRKDFQFYKVREINNYHHAHDAYLNAVVGTALIKKYPKLESEFVYGDYKVYDVRKMIAKSEQEIGKATAKYFFYSNIMNFFKTEITLANGEIRKRPLIETNGETGEIVWDKGRDFATVRKVLSMPQVNIVKKTEVQTGGFSKESILPKRNSDKLIARKKDWDPKKYGGFDSPTVAYSVLVVAKVEKGKSKKLKSVKELLGITIMERSSFEKNPIDFLEAKGYKEVKKDLIIKLPKYSLFELENGRKRMLASAGELQKGNELALPSKYVNFLYLASHYEKLKGSPEDNEQKQLFVEQHKHYLDEIIEQISEFSKRVILADANLDKVLSAYNKHRDKPIREQAENIIHLFTLTNLGAPAAFKYFDTTIDRKRYTSTKEVLDATLIHQSITGLYETRIDLSQLGGDGGEAAAKEAAAKEAAAKEAAAKGGTLNIEDEYRLHETSKGPDVPLGSTWLSDFPQAWAETGGMGLAVRQAPLIIPLKATSTPVSIKQYPMSQEARLGIKPHIQRLLDQGILVPCQSPWNTPLLPVKKPGTNDYRPVQDLREVNKRVEDIHPTVPNPYNLLSGLPPSHQWYTVLDLKDAFFCLRLHPTSQSLFAFEWRDPEMGISGQLTWTRLPQGFKNSPTLFNEALHRDLADFRIQHPDLILLQYVDDLLLAATSELDCQQGTRALLQTLGDLGYRASAKKAQICQKQVKYLGYLLKEGQRWLTEARKETVMGQPTPKTPRQLREFLGKAGFCRLFIPGFAEMAAPLYPLTKPGTLFEWGPDQQKAYQEIKQALLTAPALGLPDLTKPFELFVDEKQGYAKGVLTQKLGPWRRPVAYLSKKLDPVAAGWPPCLRMVAAIAVLTKDAGKLTMGQPLVILAPHAVEALVKQPPDRWLSNARMTHYQALLLDTDRVQFGPIVALNPATLLPLPEEGLQHDCLDILAEAHGTRPDLTDQPLPDADHTWYTDGSSFLQEGQRKAGAAVTTETEVVWAKALPAGTSAQRAELIALTQALKMAEGKKLNVYTDSRYAFATAHIHGEIYRRRGWLTSEGKEIKNKDEILALLKALFLPKRLSIIHCPGHQKGNRAEARGNRMADQAAREVATRETPETSTLLAGKRTADGSEFEKRTADGSEFESPKKKAKVE

SEQ ID NO: 2523 - protein, 2094 aa, synthetic construct
MPAAKRVKLDGGDKKYSIGLDIGTNSVGWAVITDEYKVPSKKFKVLGNTDRHSIKKNLIGALLFDSGETAEATRLKRTARRRYTRRKNRICYLQEIFSNEMAKVDDSFFHRLEESFLVEEDKKHERHPIFGNIVDEVAYHEKYPTIYHLRKKLVDSTDKADLRLIYLALAHMIKFRGHFLIEGDLNPDNSDVDKLFIQLVQTYNQLFEENPINASGVDAKAILSARLSKSRRLENLIAQLPGEKKNGLFGNLIALSLGLTPNFKSNFDLAEDAKLQLSKDTYDDDLDNLLAQIGDQYADLFLAAKNLSDAILLSDILRVNTEITKAPLSASMIKRYDEHHQDLTLLKALVRQQLPEKYKEIFFDQSKNGYAGYIDGGASQEEFYKFIKPILEKMDGTEELLVKLNREDLLRKQRTFDNGSIPHQIHLGELHAILRRQEDFYPFLKDNREKIEKILTFRIPYYVGPLARGNSRFAWMTRKSEETITPWNFEEVVDKGASAQSFIERMTNFDKNLPNEKVLPKHSLLYEYFTVYNELTKVKYVTEGMRKPAFLSGEQKKAIVDLLFKTNRKVTVKQLKEDYFKKIECFDSVEISGVEDRFNASLGTYHDLLKIIKDKDFLDNEENEDILEDIVLTLTLFEDREMIEERLKTYAHLFDDKVMKQLKRRRYTGWGRLSRKLINGIRDKQSGKTILDFLKSDGFANRNFMQLIHDDSLTFKEDIQKAQVSGQGDSLHEHIANLAGSPAIKKGILQTVKVVDELVKVMGRHKPENIVIEMARENQTTQKGQKNSRERMKRIEEGIKELGSQILKEHPVENTQLQNEKLYLYYLQNGRDMYVDQELDINRLSDYDVDHIVPQSFLKDDSIDNKVLTRSDKARGKSDNVPSEEVVKKMKNYWRQLLNAKLITQRKFDNLTKAERGGLSELDKAGFIKRQLVETRQITKHVAQILDSRMNTKYDENDKLIREVKVITLKSKLVSDFRKDFQFYKVREINNYHHAHDAYLNAVVGTALIKKYPKLESEFVYGDYKVYDVRKMIAKSEQEIGKATAKYFFYSNIMNFFKTEITLANGEIRKRPLIETNGETGEIVWDKGRDFATVRKVLSMPQVNIVKKTEVQTGGFSKESILPKRNSDKLIARKKDWDPKKYGGFDSPTVAYSVLVVAKVEKGKSKKLKSVKELLGITIMERSSFEKNPIDFLEAKGYKEVKKDLIIKLPKYSLFELENGRKRMLASAGELQKGNELALPSKYVNFLYLASHYEKLKGSPEDNEQKQLFVEQHKHYLDEIIEQISEFSKRVILADANLDKVLSAYNKHRDKPIREQAENIIHLFTLTNLGAPAAFKYFDTTIDRKRYTSTKEVLDATLIHQSITGLYETRIDLSQLGGDGGGGSGGSGGSGGTLNIEDEYRLHETSKGPDVPLGSTWLSDFPQAWAETGGMGLAVRQAPLIIPLKATSTPVSIKQYPMSQEARLGIKPHIQRLLDQGILVPCQSPWNTPLLPVKKPGTNDYRPVQDLREVNKRVEDIHPTVPNPYNLLSGLPPSHQWYTVLDLKDAFFCLRLHPTSQSLFAFEWRDPEMGISGQLTWTRLPQGFKNSPTLFNEALHRDLADFRIQHPDLILLQYVDDLLLAATSELDCQQGTRALLQTLGDLGYRASAKKAQICQKQVKYLGYLLKEGQRWLTEARKETVMGQPTPKTPRQLREFLGKAGFCRLFIPGFAEMAAPLYPLTKPGTLFEWGPDQQKAYQEIKQALLTAPALGLPDLTKPFELFVDEKQGYAKGVLTQKLGPWRRPVAYLSKKLDPVAAGWPPCLRMVAAIAVLTKDAGKLTMGQPLVILAPHAVEALVKQPPDRWLSNARMTHYQALLLDTDRVQFGPIVALNPATLLPLPEEGLQHDCLDILAEAHGTRPDLTDQPLPDADHTWYTDGSSFLQEGQRKAGAAVTTETEVVWAKALPAGTSAQRAELIALTQALKMAEGKKLNVYTDSRYAFATAHIHGEIYRRRGWLTSEGKEIKNKDEILALLKALFLPKRLSIIHCPGHQKGNRAEARGNRMADQAAREVATRETPETSTLLAGKRTADGSEFEKRTADGSEFESPKKKAKVE

SEQ ID NO: 2524 - protein, 2088 aa, synthetic construct
MPAAKRVKLDGGDKKYSIGLDIGTNSVGWAVITDEYKVPSKKFKVLGNTDRHSIKKNLIGALLFDSGETAEATRLKRTARRRYTRRKNRICYLQEIFSNEMAKVDDSFFHRLEESFLVEEDKKHERHPIFGNIVDEVAYHEKYPTIYHLRKKLVDSTDKADLRLIYLALAHMIKFRGHFLIEGDLNPDNSDVDKLFIQLVQTYNQLFEENPINASGVDAKAILSARLSKSRRLENLIAQLPGEKKNGLFGNLIALSLGLTPNFKSNFDLAEDAKLQLSKDTYDDDLDNLLAQIGDQYADLFLAAKNLSDAILLSDILRVNTEITKAPLSASMIKRYDEHHQDLTLLKALVRQQLPEKYKEIFFDQSKNGYAGYIDGGASQEEFYKFIKPILEKMDGTEELLVKLNREDLLRKQRTFDNGSIPHQIHLGELHAILRRQEDFYPFLKDNREKIEKILTFRIPYYVGPLARGNSRFAWMTRKSEETITPWNFEEVVDKGASAQSFIERMTNFDKNLPNEKVLPKHSLLYEYFTVYNELTKVKYVTEGMRKPAFLSGEQKKAIVDLLFKTNRKVTVKQLKEDYFKKIECFDSVEISGVEDRFNASLGTYHDLLKIIKDKDFLDNEENEDILEDIVLTLTLFEDREMIEERLKTYAHLFDDKVMKQLKRRRYTGWGRLSRKLINGIRDKQSGKTILDFLKSDGFANRNFMQLIHDDSLTFKEDIQKAQVSGQGDSLHEHIANLAGSPAIKKGILQTVKVVDELVKVMGRHKPENIVIEMARENQTTQKGQKNSRERMKRIEEGIKELGSQILKEHPVENTQLQNEKLYLYYLQNGRDMYVDQELDINRLSDYDVDHIVPQSFLKDDSIDNKVLTRSDKARGKSDNVPSEEVVKKMKNYWRQLLNAKLITQRKFDNLTKAERGGLSELDKAGFIKRQLVETRQITKHVAQILDSRMNTKYDENDKLIREVKVITLKSKLVSDFRKDFQFYKVREINNYHHAHDAYLNAVVGTALIKKYPKLESEFVYGDYKVYDVRKMIAKSEQEIGKATAKYFFYSNIMNFFKTEITLANGEIRKRPLIETNGETGEIVWDKGRDFATVRKVLSMPQVNIVKKTEVQTGGFSKESILPKRNSDKLIARKKDWDPKKYGGFDSPTVAYSVLVVAKVEKGKSKKLKSVKELLGITIMERSSFEKNPIDFLEAKGYKEVKKDLIIKLPKYSLFELENGRKRMLASAGELQKGNELALPSKYVNFLYLASHYEKLKGSPEDNEQKQLFVEQHKHYLDEIIEQISEFSKRVILADANLDKVLSAYNKHRDKPIREQAENIIHLFTLTNLGAPAAFKYFDTTIDRKRYTSTKEVLDATLIHQSITGLYETRIDLSQLGGDGGPAPGGTLNIEDEYRLHETSKGPDVPLGSTWLSDFPQAWAETGGMGLAVRQAPLIIPLKATSTPVSIKQYPMSQEARLGIKPHIQRLLDQGILVPCQSPWNTPLLPVKKPGTNDYRPVQDLREVNKRVEDIHPTVPNPYNLLSGLPPSHQWYTVLDLKDAFFCLRLHPTSQSLFAFEWRDPEMGISGQLTWTRLPQGFKNSPTLFNEALHRDLADFRIQHPDLILLQYVDDLLLAATSELDCQQGTRALLQTLGDLGYRASAKKAQICQKQVKYLGYLLKEGQRWLTEARKETVMGQPTPKTPRQLREFLGKAGFCRLFIPGFAEMAAPLYPLTKPGTLFEWGPDQQKAYQEIKQALLTAPALGLPDLTKPFELFVDEKQGYAKGVLTQKLGPWRRPVAYLSKKLDPVAAGWPPCLRMVAAIAVLTKDAGKLTMGQPLVILAPHAVEALVKQPPDRWLSNARMTHYQALLLDTDRVQFGPIVALNPATLLPLPEEGLQHDCLDILAEAHGTRPDLTDQPLPDADHTWYTDGSSFLQEGQRKAGAAVTTETEVVWAKALPAGTSAQRAELIALTQALKMAEGKKLNVYTDSRYAFATAHIHGEIYRRRGWLTSEGKEIKNKDEILALLKALFLPKRLSIIHCPGHQKGNRAEARGNRMADQAAREVATRETPETSTLLAGKRTADGSEFEKRTADGSEFESPKKKAKVE

SEQ ID NO: 2525 - protein, 2094 aa, synthetic construct
MPAAKRVKLDGGDKKYSIGLDIGTNSVGWAVITDEYKVPSKKFKVLGNTDRHSIKKNLIGALLFDSGETAEATRLKRTARRRYTRRKNRICYLQEIFSNEMAKVDDSFFHRLEESFLVEEDKKHERHPIFGNIVDEVAYHEKYPTIYHLRKKLVDSTDKADLRLIYLALAHMIKFRGHFLIEGDLNPDNSDVDKLFIQLVQTYNQLFEENPINASGVDAKAILSARLSKSRRLENLIAQLPGEKKNGLFGNLIALSLGLTPNFKSNFDLAEDAKLQLSKDTYDDDLDNLLAQIGDQYADLFLAAKNLSDAILLSDILRVNTEITKAPLSASMIKRYDEHHQDLTLLKALVRQQLPEKYKEIFFDQSKNGYAGYIDGGASQEEFYKFIKPILEKMDGTEELLVKLNREDLLRKQRTFDNGSIPHQIHLGELHAILRRQEDFYPFLKDNREKIEKILTFRIPYYVGPLARGNSRFAWMTRKSEETITPWNFEEVVDKGASAQSFIERMTNFDKNLPNEKVLPKHSLLYEYFTVYNELTKVKYVTEGMRKPAFLSGEQKKAIVDLLFKTNRKVTVKQLKEDYFKKIECFDSVEISGVEDRFNASLGTYHDLLKIIKDKDFLDNEENEDILEDIVLTLTLFEDREMIEERLKTYAHLFDDKVMKQLKRRRYTGWGRLSRKLINGIRDKQSGKTILDFLKSDGFANRNFMQLIHDDSLTFKEDIQKAQVSGQGDSLHEHIANLAGSPAIKKGILQTVKVVDELVKVMGRHKPENIVIEMARENQTTQKGQKNSRERMKRIEEGIKELGSQILKEHPVENTQLQNEKLYLYYLQNGRDMYVDQELDINRLSDYDVDHIVPQSFLKDDSIDNKVLTRSDKARGKSDNVPSEEVVKKMKNYWRQLLNAKLITQRKFDNLTKAERGGLSELDKAGFIKRQLVETRQITKHVAQILDSRMNTKYDENDKLIREVKVITLKSKLVSDFRKDFQFYKVREINNYHHAHDAYLNAVVGTALIKKYPKLESEFVYGDYKVYDVRKMIAKSEQEIGKATAKYFFYSNIMNFFKTEITLANGEIRKRPLIETNGETGEIVWDKGRDFATVRKVLSMPQVNIVKKTEVQTGGFSKESILPKRNSDKLIARKKDWDPKKYGGFDSPTVAYSVLVVAKVEKGKSKKLKSVKELLGITIMERSSFEKNPIDFLEAKGYKEVKKDLIIKLPKYSLFELENGRKRMLASAGELQKGNELALPSKYVNFLYLASHYEKLKGSPEDNEQKQLFVEQHKHYLDEIIEQISEFSKRVILADANLDKVLSAYNKHRDKPIREQAENIIHLFTLTNLGAPAAFKYFDTTIDRKRYTSTKEVLDATLIHQSITGLYETRIDLSQLGGDGGPAPAPAPAPGGTLNIEDEYRLHETSKGPDVPLGSTWLSDFPQAWAETGGMGLAVRQAPLIIPLKATSTPVSIKQYPMSQEARLGIKPHIQRLLDQGILVPCQSPWNTPLLPVKKPGTNDYRPVQDLREVNKRVEDIHPTVPNPYNLLSGLPPSHQWYTVLDLKDAFFCLRLHPTSQSLFAFEWRDPEMGISGQLTWTRLPQGFKNSPTLFNEALHRDLADFRIQHPDLILLQYVDDLLLAATSELDCQQGTRALLQTLGDLGYRASAKKAQICQKQVKYLGYLLKEGQRWLTEARKETVMGQPTPKTPRQLREFLGKAGFCRLFIPGFAEMAAPLYPLTKPGTLFEWGPDQQKAYQEIKQALLTAPALGLPDLTKPFELFVDEKQGYAKGVLTQKLGPWRRPVAYLSKKLDPVAAGWPPCLRMVAAIAVLTKDAGKLTMGQPLVILAPHAVEALVKQPPDRWLSNARMTHYQALLLDTDRVQFGPIVALNPATLLPLPEEGLQHDCLDILAEAHGTRPDLTDQPLPDADHTWYTDGSSFLQEGQRKAGAAVTTETEVVWAKALPAGTSAQRAELIALTQALKMAEGKKLNVYTDSRYAFATAHIHGEIYRRRGWLTSEGKEIKNKDEILALLKALFLPKRLSIIHCPGHQKGNRAEARGNRMADQAAREVATRETPETSTLLAGKRTADGSEFEKRTADGSEFESPKKKAKVE

SEQ ID NO: 2526 - protein, 2096 aa, synthetic construct
MPAAKRVKLDGGDKKYSIGLDIGTNSVGWAVITDEYKVPSKKFKVLGNTDRHSIKKNLIGALLFDSGETAEATRLKRTARRRYTRRKNRICYLQEIFSNEMAKVDDSFFHRLEESFLVEEDKKHERHPIFGNIVDEVAYHEKYPTIYHLRKKLVDSTDKADLRLIYLALAHMIKFRGHFLIEGDLNPDNSDVDKLFIQLVQTYNQLFEENPINASGVDAKAILSARLSKSRRLENLIAQLPGEKKNGLFGNLIALSLGLTPNFKSNFDLAEDAKLQLSKDTYDDDLDNLLAQIGDQYADLFLAAKNLSDAILLSDILRVNTEITKAPLSASMIKRYDEHHQDLTLLKALVRQQLPEKYKEIFFDQSKNGYAGYIDGGASQEEFYKFIKPILEKMDGTEELLVKLNREDLLRKQRTFDNGSIPHQIHLGELHAILRRQEDFYPFLKDNREKIEKILTFRIPYYVGPLARGNSRFAWMTRKSEETITPWNFEEVVDKGASAQSFIERMTNFDKNLPNEKVLPKHSLLYEYFTVYNELTKVKYVTEGMRKPAFLSGEQKKAIVDLLFKTNRKVTVKQLKEDYFKKIECFDSVEISGVEDRFNASLGTYHDLLKIIKDKDFLDNEENEDILEDIVLTLTLFEDREMIEERLKTYAHLFDDKVMKQLKRRRYTGWGRLSRKLINGIRDKQSGKTILDFLKSDGFANRNFMQLIHDDSLTFKEDIQKAQVSGQGDSLHEHIANLAGSPAIKKGILQTVKVVDELVKVMGRHKPENIVIEMARENQTTQKGQKNSRERMKRIEEGIKELGSQILKEHPVENTQLQNEKLYLYYLQNGRDMYVDQELDINRLSDYDVDHIVPQSFLKDDSIDNKVLTRSDKARGKSDNVPSEEVVKKMKNYWRQLLNAKLITQRKFDNLTKAERGGLSELDKAGFIKRQLVETRQITKHVAQILDSRMNTKYDENDKLIREVKVITLKSKLVSDFRKDFQFYKVREINNYHHAHDAYLNAVVGTALIKKYPKLESEFVYGDYKVYDVRKMIAKSEQEIGKATAKYFFYSNIMNFFKTEITLANGEIRKRPLIETNGETGEIVWDKGRDFATVRKVLSMPQVNIVKKTEVQTGGFSKESILPKRNSDKLIARKKDWDPKKYGGFDSPTVAYSVLVVAKVEKGKSKKLKSVKELLGITIMERSSFEKNPIDFLEAKGYKEVKKDLIIKLPKYSLFELENGRKRMLASAGELQKGNELALPSKYVNFLYLASHYEKLKGSPEDNEQKQLFVEQHKHYLDEIIEQISEFSKRVILADANLDKVLSAYNKHRDKPIREQAENIIHLFTLTNLGAPAAFKYFDTTIDRKRYTSTKEVLDATLIHQSITGLYETRIDLSQLGGDGGGGGEAAAKPAPGGTLNIEDEYRLHETSKGPDVPLGSTWLSDFPQAWAETGGMGLAVRQAPLIIPLKATSTPVSIKQYPMSQEARLGIKPHIQRLLDQGILVPCQSPWNTPLLPVKKPGTNDYRPVQDLREVNKRVEDIHPTVPNPYNLLSGLPPSHQWYTVLDLKDAFFCLRLHPTSQSLFAFEWRDPEMGISGQLTWTRLPQGFKNSPTLFNEALHRDLADFRIQHPDLILLQYVDDLLLAATSELDCQQGTRALLQTLGDLGYRASAKKAQICQKQVKYLGYLLKEGQRWLTEARKETVMGQPTPKTPRQLREFLGKAGFCRLFIPGFAEMAAPLYPLTKPGTLFEWGPDQQKAYQEIKQALLTAPALGLPDLTKPFELFVDEKQGYAKGVLTQKLGPWRRPVAYLSKKLDPVAAGWPPCLRMVAAIAVLTKDAGKLTMGQPLVILAPHAVEALVKQPPDRWLSNARMTHYQALLLDTDRVQFGPIVALNPATLLPLPEEGLQHDCLDILAEAHGTRPDLTDQPLPDADHTWYTDGSSFLQEGQRKAGAAVTTETEVVWAKALPAGTSAQRAELIALTQALKMAEGKKLNVYTDSRYAFATAHIHGEIYRRRGWLTSEGKEIKNKDEILALLKALFLPKRLSIIHCPGHQKGNRAEARGNRMADQAAREVATRETPETSTLLAGKRTADGSEFEKRTADGSEFESPKKKAKVE

SEQ ID NO: 2527 - protein, 2096 aa, synthetic construct
MPAAKRVKLDGGDKKYSIGLDIGTNSVGWAVITDEYKVPSKKFKVLGNTDRHSIKKNLIGALLFDSGETAEATRLKRTARRRYTRRKNRICYLQEIFSNEMAKVDDSFFHRLEESFLVEEDKKHERHPIFGNIVDEVAYHEKYPTIYHLRKKLVDSTDKADLRLIYLALAHMIKFRGHFLIEGDLNPDNSDVDKLFIQLVQTYNQLFEENPINASGVDAKAILSARLSKSRRLENLIAQLPGEKKNGLFGNLIALSLGLTPNFKSNFDLAEDAKLQLSKDTYDDDLDNLLAQIGDQYADLFLAAKNLSDAILLSDILRVNTEITKAPLSASMIKRYDEHHQDLTLLKALVRQQLPEKYKEIFFDQSKNGYAGYIDGGASQEEFYKFIKPILEKMDGTEELLVKLNREDLLRKQRTFDNGSIPHQIHLGELHAILRRQEDFYPFLKDNREKIEKILTFRIPYYVGPLARGNSRFAWMTRKSEETITPWNFEEVVDKGASAQSFIERMTNFDKNLPNEKVLPKHSLLYEYFTVYNELTKVKYVTEGMRKPAFLSGEQKKAIVDLLFKTNRKVTVKQLKEDYFKKIECFDSVEISGVEDRFNASLGTYHDLLKIIKDKDFLDNEENEDILEDIVLTLTLFEDREMIEERLKTYAHLFDDKVMKQLKRRRYTGWGRLSRKLINGIRDKQSGKTILDFLKSDGFANRNFMQLIHDDSLTFKEDIQKAQVSGQGDSLHEHIANLAGSPAIKKGILQTVKVVDELVKVMGRHKPENIVIEMARENQTTQKGQKNSRERMKRIEEGIKELGSQILKEHPVENTQLQNEKLYLYYLQNGRDMYVDQELDINRLSDYDVDHIVPQSFLKDDSIDNKVLTRSDKARGKSDNVPSEEVVKKMKNYWRQLLNAKLITQRKFDNLTKAERGGLSELDKAGFIKRQLVETRQITKHVAQILDSRMNTKYDENDKLIREVKVITLKSKLVSDFRKDFQFYKVREINNYHHAHDAYLNAVVGTALIKKYPKLESEFVYGDYKVYDVRKMIAKSEQEIGKATAKYFFYSNIMNFFKTEITLANGEIRKRPLIETNGETGEIVWDKGRDFATVRKVLSMPQVNIVKKTEVQTGGFSKESILPKRNSDKLIARKKDWDPKKYGGFDSPTVAYSVLVVAKVEKGKSKKLKSVKELLGITIMERSSFEKNPIDFLEAKGYKEVKKDLIIKLPKYSLFELENGRKRMLASAGELQKGNELALPSKYVNFLYLASHYEKLKGSPEDNEQKQLFVEQHKHYLDEIIEQISEFSKRVILADANLDKVLSAYNKHRDKPIREQAENIIHLFTLTNLGAPAAFKYFDTTIDRKRYTSTKEVLDATLIHQSITGLYETRIDLSQLGGDGGGGSPAPEAAAKGGTLNIEDEYRLHETSKGPDVPLGSTWLSDFPQAWAETGGMGLAVRQAPLIIPLKATSTPVSIKQYPMSQEARLGIKPHIQRLLDQGILVPCQSPWNTPLLPVKKPGTNDYRPVQDLREVNKRVEDIHPTVPNPYNLLSGLPPSHQWYTVLDLKDAFFCLRLHPTSQSLFAFEWRDPEMGISGQLTWTRLPQGFKNSPTLFNEALHRDLADFRIQHPDLILLQYVDDLLLAATSELDCQQGTRALLQTLGDLGYRASAKKAQICQKQVKYLGYLLKEGQRWLTEARKETVMGQPTPKTPRQLREFLGKAGFCRLFIPGFAEMAAPLYPLTKPGTLFEWGPDQQKAYQEIKQALLTAPALGLPDLTKPFELFVDEKQGYAKGVLTQKLGPWRRPVAYLSKKLDPVAAGWPPCLRMVAAIAVLTKDAGKLTMGQPLVILAPHAVEALVKQPPDRWLSNARMTHYQALLLDTDRVQFGPIVALNPATLLPLPEEGLQHDCLDILAEAHGTRPDLTDQPLPDADHTWYTDGSSFLQEGQRKAGAAVTTETEVVWAKALPAGTSAQRAELIALTQALKMAEGKKLNVYTDSRYAFATAHIHGEIYRRRGWLTSEGKEIKNKDEILALLKALFLPKRLSIIHCPGHQKGNRAEARGNRMADQAAREVATRETPETSTLLAGKRTADGSEFEKRTADGSEFESPKKKAKVE

SEQ ID NO: 2528 - protein, 2100 aa, synthetic construct
MPAAKRVKLDGGDKKYSIGLDIGTNSVGWAVITDEYKVPSKKFKVLGNTDRHSIKKNLIGALLFDSGETAEATRLKRTARRRYTRRKNRICYLQEIFSNEMAKVDDSFFHRLEESFLVEEDKKHERHPIFGNIVDEVAYHEKYPTIYHLRKKLVDSTDKADLRLIYLALAHMIKFRGHFLIEGDLNPDNSDVDKLFIQLVQTYNQLFEENPINASGVDAKAILSARLSKSRRLENLIAQLPGEKKNGLFGNLIALSLGLTPNFKSNFDLAEDAKLQLSKDTYDDDLDNLLAQIGDQYADLFLAAKNLSDAILLSDILRVNTEITKAPLSASMIKRYDEHHQDLTLLKALVRQQLPEKYKEIFFDQSKNGYAGYIDGGASQEEFYKFIKPILEKMDGTEELLVKLNREDLLRKQRTFDNGSIPHQIHLGELHAILRRQEDFYPFLKDNREKIEKILTFRIPYYVGPLARGNSRFAWMTRKSEETITPWNFEEVVDKGASAQSFIERMTNFDKNLPNEKVLPKHSLLYEYFTVYNELTKVKYVTEGMRKPAFLSGEQKKAIVDLLFKTNRKVTVKQLKEDYFKKIECFDSVEISGVEDRFNASLGTYHDLLKIIKDKDFLDNEENEDILEDIVLTLTLFEDREMIEERLKTYAHLFDDKVMKQLKRRRYTGWGRLSRKLINGIRDKQSGKTILDFLKSDGFANRNFMQLIHDDSLTFKEDIQKAQVSGQGDSLHEHIANLAGSPAIKKGILQTVKVVDELVKVMGRHKPENIVIEMARENQTTQKGQKNSRERMKRIEEGIKELGSQILKEHPVENTQLQNEKLYLYYLQNGRDMYVDQELDINRLSDYDVDHIVPQSFLKDDSIDNKVLTRSDKARGKSDNVPSEEVVKKMKNYWRQLLNAKLITQRKFDNLTKAERGGLSELDKAGFIKRQLVETRQITKHVAQILDSRMNTKYDENDKLIREVKVITLKSKLVSDFRKDFQFYKVREINNYHHAHDAYLNAVVGTALIKKYPKLESEFVYGDYKVYDVRKMIAKSEQEIGKATAKYFFYSNIMNFFKTEITLANGEIRKRPLIETNGETGEIVWDKGRDFATVRKVLSMPQVNIVKKTEVQTGGFSKESILPKRNSDKLIARKKDWDPKKYGGFDSPTVAYSVLVVAKVEKGKSKKLKSVKELLGITIMERSSFEKNPIDFLEAKGYKEVKKDLIIKLPKYSLFELENGRKRMLASAGELQKGNELALPSKYVNFLYLASHYEKLKGSPEDNEQKQLFVEQHKHYLDEIIEQISEFSKRVILADANLDKVLSAYNKHRDKPIREQAENIIHLFTLTNLGAPAAFKYFDTTIDRKRYTSTKEVLDATLIHQSITGLYETRIDLSQLGGDGGGGGGSEAAAKGGGGSGGTLNIEDEYRLHETSKGPDVPLGSTWLSDFPQAWAETGGMGLAVRQAPLIIPLKATSTPVSIKQYPMSQEARLGIKPHIQRLLDQGILVPCQSPWNTPLLPVKKPGTNDYRPVQDLREVNKRVEDIHPTVPNPYNLLSGLPPSHQWYTVLDLKDAFFCLRLHPTSQSLFAFEWRDPEMGISGQLTWTRLPQGFKNSPTLFNEALHRDLADFRIQHPDLILLQYVDDLLLAATSELDCQQGTRALLQTLGDLGYRASAKKAQICQKQVKYLGYLLKEGQRWLTEARKETVMGQPTPKTPRQLREFLGKAGFCRLFIPGFAEMAAPLYPLTKPGTLFEWGPDQQKAYQEIKQALLTAPALGLPDLTKPFELFVDEKQGYAKGVLTQKLGPWRRPVAYLSKKLDPVAAGWPPCLRMVAAIAVLTKDAGKLTMGQPLVILAPHAVEALVKQPPDRWLSNARMTHYQALLLDTDRVQFGPIVALNPATLLPLPEEGLQHDCLDILAEAHGTRPDLTDQPLPDADHTWYTDGSSFLQEGQRKAGAAVTTETEVVWAKALPAGTSAQRAELIALTQALKMAEGKKLNVYTDSRYAFATAHIHGEIYRRRGWLTSEGKEIKNKDEILALLKALFLPKRLSIIHCPGHQKGNRAEARGNRMADQAAREVATRETPETSTLLAGKRTADGSEFEKRTADGSEFESPKKKAKVE

SEQ ID NO: 2529 - protein, 2131 aa, synthetic construct
MPAAKRVKLDGGDKKYSIGLDIGTNSVGWAVITDEYKVPSKKFKVLGNTDRHSIKKNLIGALLFDSGETAEATRLKRTARRRYTRRKNRICYLQEIFSNEMAKVDDSFFHRLEESFLVEEDKKHERHPIFGNIVDEVAYHEKYPTIYHLRKKLVDSTDKADLRLIYLALAHMIKFRGHFLIEGDLNPDNSDVDKLFIQLVQTYNQLFEENPINASGVDAKAILSARLSKSRRLENLIAQLPGEKKNGLFGNLIALSLGLTPNFKSNFDLAEDAKLQLSKDTYDDDLDNLLAQIGDQYADLFLAAKNLSDAILLSDILRVNTEITKAPLSASMIKRYDEHHQDLTLLKALVRQQLPEKYKEIFFDQSKNGYAGYIDGGASQEEFYKFIKPILEKMDGTEELLVKLNREDLLRKQRTFDNGSIPHQIHLGELHAILRRQEDFYPFLKDNREKIEKILTFRIPYYVGPLARGNSRFAWMTRKSEETITPWNFEEVVDKGASAQSFIERMTNFDKNLPNEKVLPKHSLLYEYFTVYNELTKVKYVTEGMRKPAFLSGEQKKAIVDLLFKTNRKVTVKQLKEDYFKKIECFDSVEISGVEDRFNASLGTYHDLLKIIKDKDFLDNEENEDILEDIVLTLTLFEDREMIEERLKTYAHLFDDKVMKQLKRRRYTGWGRLSRKLINGIRDKQSGKTILDFLKSDGFANRNFMQLIHDDSLTFKEDIQKAQVSGQGDSLHEHIANLAGSPAIKKGILQTVKVVDELVKVMGRHKPENIVIEMARENQTTQKGQKNSRERMKRIEEGIKELGSQILKEHPVENTQLQNEKLYLYYLQNGRDMYVDQELDINRLSDYDVDHIVPQSFLKDDSIDNKVLTRSDKARGKSDNVPSEEVVKKMKNYWRQLLNAKLITQRKFDNLTKAERGGLSELDKAGFIKRQLVETRQITKHVAQILDSRMNTKYDENDKLIREVKVITLKSKLVSDFRKDFQFYKVREINNYHHAHDAYLNAVVGTALIKKYPKLESEFVYGDYKVYDVRKMIAKSEQEIGKATAKYFFYSNIMNFFKTEITLANGEIRKRPLIETNGETGEIVWDKGRDFATVRKVLSMPQVNIVKKTEVQTGGFSKESILPKRNSDKLIARKKDWDPKKYGGFDSPTVAYSVLVVAKVEKGKSKKLKSVKELLGITIMERSSFEKNPIDFLEAKGYKEVKKDLIIKLPKYSLFELENGRKRMLASAGELQKGNELALPSKYVNFLYLASHYEKLKGSPEDNEQKQLFVEQHKHYLDEIIEQISEFSKRVILADANLDKVLSAYNKHRDKPIREQAENIIHLFTLTNLGAPAAFKYFDTTIDRKRYTSTKEVLDATLIHQSITGLYETRIDLSQLGGDGGAEAAAKEAAAKEAAAKEAAAKALEAEAAAKEAAAKEAAAKEAAAKAGGTLNIEDEYRLHETSKGPDVPLGSTWLSDFPQAWAETGGMGLAVRQAPLIIPLKATSTPVSIKQYPMSQEARLGIKPHIQRLLDQGILVPCQSPWNTPLLPVKKPGTNDYRPVQDLREVNKRVEDIHPTVPNPYNLLSGLPPSHQWYTVLDLKDAFFCLRLHPTSQSLFAFEWRDPEMGISGQLTWTRLPQGFKNSPTLFNEALHRDLADFRIQHPDLILLQYVDDLLLAATSELDCQQGTRALLQTLGDLGYRASAKKAQICQKQVKYLGYLLKEGQRWLTEARKETVMGQPTPKTPRQLREFLGKAGFCRLFIPGFAEMAAPLYPLTKPGTLFEWGPDQQKAYQEIKQALLTAPALGLPDLTKPFELFVDEKQGYAKGVLTQKLGPWRRPVAYLSKKLDPVAAGWPPCLRMVAAIAVLTKDAGKLTMGQPLVILAPHAVEALVKQPPDRWLSNARMTHYQALLLDTDRVQFGPIVALNPATLLPLPEEGLQHDCLDILAEAHGTRPDLTDQPLPDADHTWYTDGSSFLQEGQRKAGAAVTTETEVVWAKALPAGTSAQRAELIALTQALKMAEGKKLNVYTDSRYAFATAHIHGEIYRRRGWLTSEGKEIKNKDEILALLKALFLPKRLSIIHCPGHQKGNRAEARGNRMADQAAREVATRETPETSTLLAGKRTADGSEFEKRTADGSEFESPKKKAKVE

SEQ ID NO: 2530 - protein, 2096 aa, synthetic construct
MPAAKRVKLDGGDKKYSIGLDIGTNSVGWAVITDEYKVPSKKFKVLGNTDRHSIKKNLIGALLFDSGETAEATRLKRTARRRYTRRKNRICYLQEIFSNEMAKVDDSFFHRLEESFLVEEDKKHERHPIFGNIVDEVAYHEKYPTIYHLRKKLVDSTDKADLRLIYLALAHMIKFRGHFLIEGDLNPDNSDVDKLFIQLVQTYNQLFEENPINASGVDAKAILSARLSKSRRLENLIAQLPGEKKNGLFGNLIALSLGLTPNFKSNFDLAEDAKLQLSKDTYDDDLDNLLAQIGDQYADLFLAAKNLSDAILLSDILRVNTEITKAPLSASMIKRYDEHHQDLTLLKALVRQQLPEKYKEIFFDQSKNGYAGYIDGGASQEEFYKFIKPILEKMDGTEELLVKLNREDLLRKQRTFDNGSIPHQIHLGELHAILRRQEDFYPFLKDNREKIEKILTFRIPYYVGPLARGNSRFAWMTRKSEETITPWNFEEVVDKGASAQSFIERMTNFDKNLPNEKVLPKHSLLYEYFTVYNELTKVKYVTEGMRKPAFLSGEQKKAIVDLLFKTNRKVTVKQLKEDYFKKIECFDSVEISGVEDRFNASLGTYHDLLKIIKDKDFLDNEENEDILEDIVLTLTLFEDREMIEERLKTYAHLFDDKVMKQLKRRRYTGWGRLSRKLINGIRDKQSGKTILDFLKSDGFANRNFMQLIHDDSLTFKEDIQKAQVSGQGDSLHEHIANLAGSPAIKKGILQTVKVVDELVKVMGRHKPENIVIEMARENQTTQKGQKNSRERMKRIEEGIKELGSQILKEHPVENTQLQNEKLYLYYLQNGRDMYVDQELDINRLSDYDVDHIVPQSFLKDDSIDNKVLTRSDKARGKSDNVPSEEVVKKMKNYWRQLLNAKLITQRKFDNLTKAERGGLSELDKAGFIKRQLVETRQITKHVAQILDSRMNTKYDENDKLIREVKVITLKSKLVSDFRKDFQFYKVREINNYHHAHDAYLNAVVGTALIKKYPKLESEFVYGDYKVYDVRKMIAKSEQEIGKATAKYFFYSNIMNFFKTEITLANGEIRKRPLIETNGETGEIVWDKGRDFATVRKVLSMPQVNIVKKTEVQTGGFSKESILPKRNSDKLIARKKDWDPKKYGGFDSPTVAYSVLVVAKVEKGKSKKLKSVKELLGITIMERSSFEKNPIDFLEAKGYKEVKKDLIIKLPKYSLFELENGRKRMLASAGELQKGNELALPSKYVNFLYLASHYEKLKGSPEDNEQKQLFVEQHKHYLDEIIEQISEFSKRVILADANLDKVLSAYNKHRDKPIREQAENIIHLFTLTNLGAPAAFKYFDTTIDRKRYTSTKEVLDATLIHQSITGLYETRIDLSQLGGDGGGGSEAAAKPAPGGTLNIEDEYRLHETSKGPDVPLGSTWLSDFPQAWAETGGMGLAVRQAPLIIPLKATSTPVSIKQYPMSQEARLGIKPHIQRLLDQGILVPCQSPWNTPLLPVKKPGTNDYRPVQDLREVNKRVEDIHPTVPNPYNLLSGLPPSHQWYTVLDLKDAFFCLRLHPTSQSLFAFEWRDPEMGISGQLTWTRLPQGFKNSPTLFNEALHRDLADFRIQHPDLILLQYVDDLLLAATSELDCQQGTRALLQTLGDLGYRASAKKAQICQKQVKYLGYLLKEGQRWLTEARKETVMGQPTPKTPRQLREFLGKAGFCRLFIPGFAEMAAPLYPLTKPGTLFEWGPDQQKAYQEIKQALLTAPALGLPDLTKPFELFVDEKQGYAKGVLTQKLGPWRRPVAYLSKKLDPVAAGWPPCLRMVAAIAVLTKDAGKLTMGQPLVILAPHAVEALVKQPPDRWLSNARMTHYQALLLDTDRVQFGPIVALNPATLLPLPEEGLQHDCLDILAEAHGTRPDLTDQPLPDADHTWYTDGSSFLQEGQRKAGAAVTTETEVVWAKALPAGTSAQRAELIALTQALKMAEGKKLNVYTDSRYAFATAHIHGEIYRRRGWLTSEGKEIKNKDEILALLKALFLPKRLSIIHCPGHQKGNRAEARGNRMADQAAREVATRETPETSTLLAGKRTADGSEFEKRTADGSEFESPKKKAKVE

SEQ ID NO: 2531 - protein, 2094 aa, synthetic construct
MPAAKRVKLDGGDKKYSIGLDIGTNSVGWAVITDEYKVPSKKFKVLGNTDRHSIKKNLIGALLFDSGETAEATRLKRTARRRYTRRKNRICYLQEIFSNEMAKVDDSFFHRLEESFLVEEDKKHERHPIFGNIVDEVAYHEKYPTIYHLRKKLVDSTDKADLRLIYLALAHMIKFRGHFLIEGDLNPDNSDVDKLFIQLVQTYNQLFEENPINASGVDAKAILSARLSKSRRLENLIAQLPGEKKNGLFGNLIALSLGLTPNFKSNFDLAEDAKLQLSKDTYDDDLDNLLAQIGDQYADLFLAAKNLSDAILLSDILRVNTEITKAPLSASMIKRYDEHHQDLTLLKALVRQQLPEKYKEIFFDQSKNGYAGYIDGGASQEEFYKFIKPILEKMDGTEELLVKLNREDLLRKQRTFDNGSIPHQIHLGELHAILRRQEDFYPFLKDNREKIEKILTFRIPYYVGPLARGNSRFAWMTRKSEETITPWNFEEVVDKGASAQSFIERMTNFDKNLPNEKVLPKHSLLYEYFTVYNELTKVKYVTEGMRKPAFLSGEQKKAIVDLLFKTNRKVTVKQLKEDYFKKIECFDSVEISGVEDRFNASLGTYHDLLKIIKDKDFLDNEENEDILEDIVLTLTLFEDREMIEERLKTYAHLFDDKVMKQLKRRRYTGWGRLSRKLINGIRDKQSGKTILDFLKSDGFANRNFMQLIHDDSLTFKEDIQKAQVSGQGDSLHEHIANLAGSPAIKKGILQTVKVVDELVKVMGRHKPENIVIEMARENQTTQKGQKNSRERMKRIEEGIKELGSQILKEHPVENTQLQNEKLYLYYLQNGRDMYVDQELDINRLSDYDVDHIVPQSFLKDDSIDNKVLTRSDKARGKSDNVPSEEVVKKMKNYWRQLLNAKLITQRKFDNLTKAERGGLSELDKAGFIKRQLVETRQITKHVAQILDSRMNTKYDENDKLIREVKVITLKSKLVSDFRKDFQFYKVREINNYHHAHDAYLNAVVGTALIKKYPKLESEFVYGDYKVYDVRKMIAKSEQEIGKATAKYFFYSNIMNFFKTEITLANGEIRKRPLIETNGETGEIVWDKGRDFATVRKVLSMPQVNIVKKTEVQTGGFSKESILPKRNSDKLIARKKDWDPKKYGGFDSPTVAYSVLVVAKVEKGKSKKLKSVKELLGITIMERSSFEKNPIDFLEAKGYKEVKKDLIIKLPKYSLFELENGRKRMLASAGELQKGNELALPSKYVNFLYLASHYEKLKGSPEDNEQKQLFVEQHKHYLDEIIEQISEFSKRVILADANLDKVLSAYNKHRDKPIREQAENIIHLFTLTNLGAPAAFKYFDTTIDRKRYTSTKEVLDATLIHQSITGLYETRIDLSQLGGDGGPAPGSSGGGGGTLNIEDEYRLHETSKGPDVPLGSTWLSDFPQAWAETGGMGLAVRQAPLIIPLKATSTPVSIKQYPMSQEARLGIKPHIQRLLDQGILVPCQSPWNTPLLPVKKPGTNDYRPVQDLREVNKRVEDIHPTVPNPYNLLSGLPPSHQWYTVLDLKDAFFCLRLHPTSQSLFAFEWRDPEMGISGQLTWTRLPQGFKNSPTLFNEALHRDLADFRIQHPDLILLQYVDDLLLAATSELDCQQGTRALLQTLGDLGYRASAKKAQICQKQVKYLGYLLKEGQRWLTEARKETVMGQPTPKTPRQLREFLGKAGFCRLFIPGFAEMAAPLYPLTKPGTLFEWGPDQQKAYQEIKQALLTAPALGLPDLTKPFELFVDEKQGYAKGVLTQKLGPWRRPVAYLSKKLDPVAAGWPPCLRMVAAIAVLTKDAGKLTMGQPLVILAPHAVEALVKQPPDRWLSNARMTHYQALLLDTDRVQFGPIVALNPATLLPLPEEGLQHDCLDILAEAHGTRPDLTDQPLPDADHTWYTDGSSFLQEGQRKAGAAVTTETEVVWAKALPAGTSAQRAELIALTQALKMAEGKKLNVYTDSRYAFATAHIHGEIYRRRGWLTSEGKEIKNKDEILALLKALFLPKRLSIIHCPGHQKGNRAEARGNRMADQAAREVATRETPETSTLLAGKRTADGSEFEKRTADGSEFESPKKKAKVE

SEQ ID NO: 2532 - protein, 2100 aa, synthetic construct
MPAAKRVKLDGGDKKYSIGLDIGTNSVGWAVITDEYKVPSKKFKVLGNTDRHSIKKNLIGALLFDSGETAEATRLKRTARRRYTRRKNRICYLQEIFSNEMAKVDDSFFHRLEESFLVEEDKKHERHPIFGNIVDEVAYHEKYPTIYHLRKKLVDSTDKADLRLIYLALAHMIKFRGHFLIEGDLNPDNSDVDKLFIQLVQTYNQLFEENPINASGVDAKAILSARLSKSRRLENLIAQLPGEKKNGLFGNLIALSLGLTPNFKSNFDLAEDAKLQLSKDTYDDDLDNLLAQIGDQYADLFLAAKNLSDAILLSDILRVNTEITKAPLSASMIKRYDEHHQDLTLLKALVRQQLPEKYKEIFFDQSKNGYAGYIDGGASQEEFYKFIKPILEKMDGTEELLVKLNREDLLRKQRTFDNGSIPHQIHLGELHAILRRQEDFYPFLKDNREKIEKILTFRIPYYVGPLARGNSRFAWMTRKSEETITPWNFEEVVDKGASAQSFIERMTNFDKNLPNEKVLPKHSLLYEYFTVYNELTKVKYVTEGMRKPAFLSGEQKKAIVDLLFKTNRKVTVKQLKEDYFKKIECFDSVEISGVEDRFNASLGTYHDLLKIIKDKDFLDNEENEDILEDIVLTLTLFEDREMIEERLKTYAHLFDDKVMKQLKRRRYTGWGRLSRKLINGIRDKQSGKTILDFLKSDGFANRNFMQLIHDDSLTFKEDIQKAQVSGQGDSLHEHIANLAGSPAIKKGILQTVKVVDELVKVMGRHKPENIVIEMARENQTTQKGQKNSRERMKRIEEGIKELGSQILKEHPVENTQLQNEKLYLYYLQNGRDMYVDQELDINRLSDYDVDHIVPQSFLKDDSIDNKVLTRSDKARGKSDNVPSEEVVKKMKNYWRQLLNAKLITQRKFDNLTKAERGGLSELDKAGFIKRQLVETRQITKHVAQILDSRMNTKYDENDKLIREVKVITLKSKLVSDFRKDFQFYKVREINNYHHAHDAYLNAVVGTALIKKYPKLESEFVYGDYKVYDVRKMIAKSEQEIGKATAKYFFYSNIMNFFKTEITLANGEIRKRPLIETNGETGEIVWDKGRDFATVRKVLSMPQVNIVKKTEVQTGGFSKESILPKRNSDKLIARKKDWDPKKYGGFDSPTVAYSVLVVAKVEKGKSKKLKSVKELLGITIMERSSFEKNPIDFLEAKGYKEVKKDLIIKLPKYSLFELENGRKRMLASAGELQKGNELALPSKYVNFLYLASHYEKLKGSPEDNEQKQLFVEQHKHYLDEIIEQISEFSKRVILADANLDKVLSAYNKHRDKPIREQAENIIHLFTLTNLGAPAAFKYFDTTIDRKRYTSTKEVLDATLIHQSITGLYETRIDLSQLGGDGGGSSGSSGSSGSSGSSGGTLNIEDEYRLHETSKGPDVPLGSTWLSDFPQAWAETGGMGLAVRQAPLIIPLKATSTPVSIKQYPMSQEARLGIKPHIQRLLDQGILVPCQSPWNTPLLPVKKPGTNDYRPVQDLREVNKRVEDIHPTVPNPYNLLSGLPPSHQWYTVLDLKDAFFCLRLHPTSQSLFAFEWRDPEMGISGQLTWTRLPQGFKNSPTLFNEALHRDLADFRIQHPDLILLQYVDDLLLAATSELDCQQGTRALLQTLGDLGYRASAKKAQICQKQVKYLGYLLKEGQRWLTEARKETVMGQPTPKTPRQLREFLGKAGFCRLFIPGFAEMAAPLYPLTKPGTLFEWGPDQQKAYQEIKQALLTAPALGLPDLTKPFELFVDEKQGYAKGVLTQKLGPWRRPVAYLSKKLDPVAAGWPPCLRMVAAIAVLTKDAGKLTMGQPLVILAPHAVEALVKQPPDRWLSNARMTHYQALLLDTDRVQFGPIVALNPATLLPLPEEGLQHDCLDILAEAHGTRPDLTDQPLPDADHTWYTDGSSFLQEGQRKAGAAVTTETEVVWAKALPAGTSAQRAELIALTQALKMAEGKKLNVYTDSRYAFATAHIHGEIYRRRGWLTSEGKEIKNKDEILALLKALFLPKRLSIIHCPGHQKGNRAEARGNRMADQAAREVATRETPETSTLLAGKRTADGSEFEKRTADGSEFESPKKKAKVE

SEQ ID NO: 2533 - protein, 2094 aa, synthetic construct
MPAAKRVKLDGGDKKYSIGLDIGTNSVGWAVITDEYKVPSKKFKVLGNTDRHSIKKNLIGALLFDSGETAEATRLKRTARRRYTRRKNRICYLQEIFSNEMAKVDDSFFHRLEESFLVEEDKKHERHPIFGNIVDEVAYHEKYPTIYHLRKKLVDSTDKADLRLIYLALAHMIKFRGHFLIEGDLNPDNSDVDKLFIQLVQTYNQLFEENPINASGVDAKAILSARLSKSRRLENLIAQLPGEKKNGLFGNLIALSLGLTPNFKSNFDLAEDAKLQLSKDTYDDDLDNLLAQIGDQYADLFLAAKNLSDAILLSDILRVNTEITKAPLSASMIKRYDEHHQDLTLLKALVRQQLPEKYKEIFFDQSKNGYAGYIDGGASQEEFYKFIKPILEKMDGTEELLVKLNREDLLRKQRTFDNGSIPHQIHLGELHAILRRQEDFYPFLKDNREKIEKILTFRIPYYVGPLARGNSRFAWMTRKSEETITPWNFEEVVDKGASAQSFIERMTNFDKNLPNEKVLPKHSLLYEYFTVYNELTKVKYVTEGMRKPAFLSGEQKKAIVDLLFKTNRKVTVKQLKEDYFKKIECFDSVEISGVEDRFNASLGTYHDLLKIIKDKDFLDNEENEDILEDIVLTLTLFEDREMIEERLKTYAHLFDDKVMKQLKRRRYTGWGRLSRKLINGIRDKQSGKTILDFLKSDGFANRNFMQLIHDDSLTFKEDIQKAQVSGQGDSLHEHIANLAGSPAIKKGILQTVKVVDELVKVMGRHKPENIVIEMARENQTTQKGQKNSRERMKRIEEGIKELGSQILKEHPVENTQLQNEKLYLYYLQNGRDMYVDQELDINRLSDYDVDHIVPQSFLKDDSIDNKVLTRSDKARGKSDNVPSEEVVKKMKNYWRQLLNAKLITQRKFDNLTKAERGGLSELDKAGFIKRQLVETRQITKHVAQILDSRMNTKYDENDKLIREVKVITLKSKLVSDFRKDFQFYKVREINNYHHAHDAYLNAVVGTALIKKYPKLESEFVYGDYKVYDVRKMIAKSEQEIGKATAKYFFYSNIMNFFKTEITLANGEIRKRPLIETNGETGEIVWDKGRDFATVRKVLSMPQVNIVKKTEVQTGGFSKESILPKRNSDKLIARKKDWDPKKYGGFDSPTVAYSVLVVAKVEKGKSKKLKSVKELLGITIMERSSFEKNPIDFLEAKGYKEVKKDLIIKLPKYSLFELENGRKRMLASAGELQKGNELALPSKYVNFLYLASHYEKLKGSPEDNEQKQLFVEQHKHYLDEIIEQISEFSKRVILADANLDKVLSAYNKHRDKPIREQAENIIHLFTLTNLGAPAAFKYFDTTIDRKRYTSTKEVLDATLIHQSITGLYETRIDLSQLGGDGGPAPGGSGSSGGTLNIEDEYRLHETSKGPDVPLGSTWLSDFPQAWAETGGMGLAVRQAPLIIPLKATSTPVSIKQYPMSQEARLGIKPHIQRLLDQGILVPCQSPWNTPLLPVKKPGTNDYRPVQDLREVNKRVEDIHPTVPNPYNLLSGLPPSHQWYTVLDLKDAFFCLRLHPTSQSLFAFEWRDPEMGISGQLTWTRLPQGFKNSPTLFNEALHRDLADFRIQHPDLILLQYVDDLLLAATSELDCQQGTRALLQTLGDLGYRASAKKAQICQKQVKYLGYLLKEGQRWLTEARKETVMGQPTPKTPRQLREFLGKAGFCRLFIPGFAEMAAPLYPLTKPGTLFEWGPDQQKAYQEIKQALLTAPALGLPDLTKPFELFVDEKQGYAKGVLTQKLGPWRRPVAYLSKKLDPVAAGWPPCLRMVAAIAVLTKDAGKLTMGQPLVILAPHAVEALVKQPPDRWLSNARMTHYQALLLDTDRVQFGPIVALNPATLLPLPEEGLQHDCLDILAEAHGTRPDLTDQPLPDADHTWYTDGSSFLQEGQRKAGAAVTTETEVVWAKALPAGTSAQRAELIALTQALKMAEGKKLNVYTDSRYAFATAHIHGEIYRRRGWLTSEGKEIKNKDEILALLKALFLPKRLSIIHCPGHQKGNRAEARGNRMADQAAREVATRETPETSTLLAGKRTADGSEFEKRTADGSEFESPKKKAKVE

SEQ ID NO: 2534 - protein, 2098 aa, synthetic construct
MPAAKRVKLDGGDKKYSIGLDIGTNSVGWAVITDEYKVPSKKFKVLGNTDRHSIKKNLIGALLFDSGETAEATRLKRTARRRYTRRKNRICYLQEIFSNEMAKVDDSFFHRLEESFLVEEDKKHERHPIFGNIVDEVAYHEKYPTIYHLRKKLVDSTDKADLRLIYLALAHMIKFRGHFLIEGDLNPDNSDVDKLFIQLVQTYNQLFEENPINASGVDAKAILSARLSKSRRLENLIAQLPGEKKNGLFGNLIALSLGLTPNFKSNFDLAEDAKLQLSKDTYDDDLDNLLAQIGDQYADLFLAAKNLSDAILLSDILRVNTEITKAPLSASMIKRYDEHHQDLTLLKALVRQQLPEKYKEIFFDQSKNGYAGYIDGGASQEEFYKFIKPILEKMDGTEELLVKLNREDLLRKQRTFDNGSIPHQIHLGELHAILRRQEDFYPFLKDNREKIEKILTFRIPYYVGPLARGNSRFAWMTRKSEETITPWNFEEVVDKGASAQSFIERMTNFDKNLPNEKVLPKHSLLYEYFTVYNELTKVKYVTEGMRKPAFLSGEQKKAIVDLLFKTNRKVTVKQLKEDYFKKIECFDSVEISGVEDRFNASLGTYHDLLKIIKDKDFLDNEENEDILEDIVLTLTLFEDREMIEERLKTYAHLFDDKVMKQLKRRRYTGWGRLSRKLINGIRDKQSGKTILDFLKSDGFANRNFMQLIHDDSLTFKEDIQKAQVSGQGDSLHEHIANLAGSPAIKKGILQTVKVVDELVKVMGRHKPENIVIEMARENQTTQKGQKNSRERMKRIEEGIKELGSQILKEHPVENTQLQNEKLYLYYLQNGRDMYVDQELDINRLSDYDVDHIVPQSFLKDDSIDNKVLTRSDKARGKSDNVPSEEVVKKMKNYWRQLLNAKLITQRKFDNLTKAERGGLSELDKAGFIKRQLVETRQITKHVAQILDSRMNTKYDENDKLIREVKVITLKSKLVSDFRKDFQFYKVREINNYHHAHDAYLNAVVGTALIKKYPKLESEFVYGDYKVYDVRKMIAKSEQEIGKATAKYFFYSNIMNFFKTEITLANGEIRKRPLIETNGETGEIVWDKGRDFATVRKVLSMPQVNIVKKTEVQTGGFSKESILPKRNSDKLIARKKDWDPKKYGGFDSPTVAYSVLVVAKVEKGKSKKLKSVKELLGITIMERSSFEKNPIDFLEAKGYKEVKKDLIIKLPKYSLFELENGRKRMLASAGELQKGNELALPSKYVNFLYLASHYEKLKGSPEDNEQKQLFVEQHKHYLDEIIEQISEFSKRVILADANLDKVLSAYNKHRDKPIREQAENIIHLFTLTNLGAPAAFKYFDTTIDRKRYTSTKEVLDATLIHQSITGLYETRIDLSQLGGDGGPAPAPAPAPAPAPGGTLNIEDEYRLHETSKGPDVPLGSTWLSDFPQAWAETGGMGLAVRQAPLIIPLKATSTPVSIKQYPMSQEARLGIKPHIQRLLDQGILVPCQSPWNTPLLPVKKPGTNDYRPVQDLREVNKRVEDIHPTVPNPYNLLSGLPPSHQWYTVLDLKDAFFCLRLHPTSQSLFAFEWRDPEMGISGQLTWTRLPQGFKNSPTLFNEALHRDLADFRIQHPDLILLQYVDDLLLAATSELDCQQGTRALLQTLGDLGYRASAKKAQICQKQVKYLGYLLKEGQRWLTEARKETVMGQPTPKTPRQLREFLGKAGFCRLFIPGFAEMAAPLYPLTKPGTLFEWGPDQQKAYQEIKQALLTAPALGLPDLTKPFELFVDEKQGYAKGVLTQKLGPWRRPVAYLSKKLDPVAAGWPPCLRMVAAIAVLTKDAGKLTMGQPLVILAPHAVEALVKQPPDRWLSNARMTHYQALLLDTDRVQFGPIVALNPATLLPLPEEGLQHDCLDILAEAHGTRPDLTDQPLPDADHTWYTDGSSFLQEGQRKAGAAVTTETEVVWAKALPAGTSAQRAELIALTQALKMAEGKKLNVYTDSRYAFATAHIHGEIYRRRGWLTSEGKEIKNKDEILALLKALFLPKRLSIIHCPGHQKGNRAEARGNRMADQAAREVATRETPETSTLLAGKRTADGSEFEKRTADGSEFESPKKKAKVE

SEQ ID NO: 2535 - protein, 2096 aa, synthetic construct
MPAAKRVKLDGGDKKYSIGLDIGTNSVGWAVITDEYKVPSKKFKVLGNTDRHSIKKNLIGALLFDSGETAEATRLKRTARRRYTRRKNRICYLQEIFSNEMAKVDDSFFHRLEESFLVEEDKKHERHPIFGNIVDEVAYHEKYPTIYHLRKKLVDSTDKADLRLIYLALAHMIKFRGHFLIEGDLNPDNSDVDKLFIQLVQTYNQLFEENPINASGVDAKAILSARLSKSRRLENLIAQLPGEKKNGLFGNLIALSLGLTPNFKSNFDLAEDAKLQLSKDTYDDDLDNLLAQIGDQYADLFLAAKNLSDAILLSDILRVNTEITKAPLSASMIKRYDEHHQDLTLLKALVRQQLPEKYKEIFFDQSKNGYAGYIDGGASQEEFYKFIKPILEKMDGTEELLVKLNREDLLRKQRTFDNGSIPHQIHLGELHAILRRQEDFYPFLKDNREKIEKILTFRIPYYVGPLARGNSRFAWMTRKSEETITPWNFEEVVDKGASAQSFIERMTNFDKNLPNEKVLPKHSLLYEYFTVYNELTKVKYVTEGMRKPAFLSGEQKKAIVDLLFKTNRKVTVKQLKEDYFKKIECFDSVEISGVEDRFNASLGTYHDLLKIIKDKDFLDNEENEDILEDIVLTLTLFEDREMIEERLKTYAHLFDDKVMKQLKRRRYTGWGRLSRKLINGIRDKQSGKTILDFLKSDGFANRNFMQLIHDDSLTFKEDIQKAQVSGQGDSLHEHIANLAGSPAIKKGILQTVKVVDELVKVMGRHKPENIVIEMARENQTTQKGQKNSRERMKRIEEGIKELGSQILKEHPVENTQLQNEKLYLYYLQNGRDMYVDQELDINRLSDYDVDHIVPQSFLKDDSIDNKVLTRSDKARGKSDNVPSEEVVKKMKNYWRQLLNAKLITQRKFDNLTKAERGGLSELDKAGFIKRQLVETRQITKHVAQILDSRMNTKYDENDKLIREVKVITLKSKLVSDFRKDFQFYKVREINNYHHAHDAYLNAVVGTALIKKYPKLESEFVYGDYKVYDVRKMIAKSEQEIGKATAKYFFYSNIMNFFKTEITLANGEIRKRPLIETNGETGEIVWDKGRDFATVRKVLSMPQVNIVKKTEVQTGGFSKESILPKRNSDKLIARKKDWDPKKYGGFDSPTVAYSVLVVAKVEKGKSKKLKSVKELLGITIMERSSFEKNPIDFLEAKGYKEVKKDLIIKLPKYSLFELENGRKRMLASAGELQKGNELALPSKYVNFLYLASHYEKLKGSPEDNEQKQLFVEQHKHYLDEIIEQISEFSKRVILADANLDKVLSAYNKHRDKPIREQAENIIHLFTLTNLGAPAAFKYFDTTIDRKRYTSTKEVLDATLIHQSITGLYETRIDLSQLGGDGGGSSEAAAKPAPGGTLNIEDEYRLHETSKGPDVPLGSTWLSDFPQAWAETGGMGLAVRQAPLIIPLKATSTPVSIKQYPMSQEARLGIKPHIQRLLDQGILVPCQSPWNTPLLPVKKPGTNDYRPVQDLREVNKRVEDIHPTVPNPYNLLSGLPPSHQWYTVLDLKDAFFCLRLHPTSQSLFAFEWRDPEMGISGQLTWTRLPQGFKNSPTLFNEALHRDLADFRIQHPDLILLQYVDDLLLAATSELDCQQGTRALLQTLGDLGYRASAKKAQICQKQVKYLGYLLKEGQRWLTEARKETVMGQPTPKTPRQLREFLGKAGFCRLFIPGFAEMAAPLYPLTKPGTLFEWGPDQQKAYQEIKQALLTAPALGLPDLTKPFELFVDEKQGYAKGVLTQKLGPWRRPVAYLSKKLDPVAAGWPPCLRMVAAIAVLTKDAGKLTMGQPLVILAPHAVEALVKQPPDRWLSNARMTHYQALLLDTDRVQFGPIVALNPATLLPLPEEGLQHDCLDILAEAHGTRPDLTDQPLPDADHTWYTDGSSFLQEGQRKAGAAVTTETEVVWAKALPAGTSAQRAELIALTQALKMAEGKKLNVYTDSRYAFATAHIHGEIYRRRGWLTSEGKEIKNKDEILALLKALFLPKRLSIIHCPGHQKGNRAEARGNRMADQAAREVATRETPETSTLLAGKRTADGSEFEKRTADGSEFESPKKKAKVE

SEQ ID NO: 2536 - protein, 2110 aa, synthetic construct
MPAAKRVKLDGGDKKYSIGLDIGTNSVGWAVITDEYKVPSKKFKVLGNTDRHSIKKNLIGALLFDSGETAEATRLKRTARRRYTRRKNRICYLQEIFSNEMAKVDDSFFHRLEESFLVEEDKKHERHPIFGNIVDEVAYHEKYPTIYHLRKKLVDSTDKADLRLIYLALAHMIKFRGHFLIEGDLNPDNSDVDKLFIQLVQTYNQLFEENPINASGVDAKAILSARLSKSRRLENLIAQLPGEKKNGLFGNLIALSLGLTPNFKSNFDLAEDAKLQLSKDTYDDDLDNLLAQIGDQYADLFLAAKNLSDAILLSDILRVNTEITKAPLSASMIKRYDEHHQDLTLLKALVRQQLPEKYKEIFFDQSKNGYAGYIDGGASQEEFYKFIKPILEKMDGTEELLVKLNREDLLRKQRTFDNGSIPHQIHLGELHAILRRQEDFYPFLKDNREKIEKILTFRIPYYVGPLARGNSRFAWMTRKSEETITPWNFEEVVDKGASAQSFIERMTNFDKNLPNEKVLPKHSLLYEYFTVYNELTKVKYVTEGMRKPAFLSGEQKKAIVDLLFKTNRKVTVKQLKEDYFKKIECFDSVEISGVEDRFNASLGTYHDLLKIIKDKDFLDNEENEDILEDIVLTLTLFEDREMIEERLKTYAHLFDDKVMKQLKRRRYTGWGRLSRKLINGIRDKQSGKTILDFLKSDGFANRNFMQLIHDDSLTFKEDIQKAQVSGQGDSLHEHIANLAGSPAIKKGILQTVKVVDELVKVMGRHKPENIVIEMARENQTTQKGQKNSRERMKRIEEGIKELGSQILKEHPVENTQLQNEKLYLYYLQNGRDMYVDQELDINRLSDYDVDHIVPQSFLKDDSIDNKVLTRSDKARGKSDNVPSEEVVKKMKNYWRQLLNAKLITQRKFDNLTKAERGGLSELDKAGFIKRQLVETRQITKHVAQILDSRMNTKYDENDKLIREVKVITLKSKLVSDFRKDFQFYKVREINNYHHAHDAYLNAVVGTALIKKYPKLESEFVYGDYKVYDVRKMIAKSEQEIGKATAKYFFYSNIMNFFKTEITLANGEIRKRPLIETNGETGEIVWDKGRDFATVRKVLSMPQVNIVKKTEVQTGGFSKESILPKRNSDKLIARKKDWDPKKYGGFDSPTVAYSVLVVAKVEKGKSKKLKSVKELLGITIMERSSFEKNPIDFLEAKGYKEVKKDLIIKLPKYSLFELENGRKRMLASAGELQKGNELALPSKYVNFLYLASHYEKLKGSPEDNEQKQLFVEQHKHYLDEIIEQISEFSKRVILADANLDKVLSAYNKHRDKPIREQAENIIHLFTLTNLGAPAAFKYFDTTIDRKRYTSTKEVLDATLIHQSITGLYETRIDLSQLGGDGGEAAAKEAAAKEAAAKEAAAKEAAAKGGTLNIEDEYRLHETSKGPDVPLGSTWLSDFPQAWAETGGMGLAVRQAPLIIPLKATSTPVSIKQYPMSQEARLGIKPHIQRLLDQGILVPCQSPWNTPLLPVKKPGTNDYRPVQDLREVNKRVEDIHPTVPNPYNLLSGLPPSHQWYTVLDLKDAFFCLRLHPTSQSLFAFEWRDPEMGISGQLTWTRLPQGFKNSPTLFNEALHRDLADFRIQHPDLILLQYVDDLLLAATSELDCQQGTRALLQTLGDLGYRASAKKAQICQKQVKYLGYLLKEGQRWLTEARKETVMGQPTPKTPRQLREFLGKAGFCRLFIPGFAEMAAPLYPLTKPGTLFEWGPDQQKAYQEIKQALLTAPALGLPDLTKPFELFVDEKQGYAKGVLTQKLGPWRRPVAYLSKKLDPVAAGWPPCLRMVAAIAVLTKDAGKLTMGQPLVILAPHAVEALVKQPPDRWLSNARMTHYQALLLDTDRVQFGPIVALNPATLLPLPEEGLQHDCLDILAEAHGTRPDLTDQPLPDADHTWYTDGSSFLQEGQRKAGAAVTTETEVVWAKALPAGTSAQRAELIALTQALKMAEGKKLNVYTDSRYAFATAHIHGEIYRRRGWLTSEGKEIKNKDEILALLKALFLPKRLSIIHCPGHQKGNRAEARGNRMADQAAREVATRETPETSTLLAGKRTADGSEFEKRTADGSEFESPKKKAKVE

SEQ ID NO: 2537 - protein, 2097 aa, synthetic construct
MPAAKRVKLDGGDKKYSIGLDIGTNSVGWAVITDEYKVPSKKFKVLGNTDRHSIKKNLIGALLFDSGETAEATRLKRTARRRYTRRKNRICYLQEIFSNEMAKVDDSFFHRLEESFLVEEDKKHERHPIFGNIVDEVAYHEKYPTIYHLRKKLVDSTDKADLRLIYLALAHMIKFRGHFLIEGDLNPDNSDVDKLFIQLVQTYNQLFEENPINASGVDAKAILSARLSKSRRLENLIAQLPGEKKNGLFGNLIALSLGLTPNFKSNFDLAEDAKLQLSKDTYDDDLDNLLAQIGDQYADLFLAAKNLSDAILLSDILRVNTEITKAPLSASMIKRYDEHHQDLTLLKALVRQQLPEKYKEIFFDQSKNGYAGYIDGGASQEEFYKFIKPILEKMDGTEELLVKLNREDLLRKQRTFDNGSIPHQIHLGELHAILRRQEDFYPFLKDNREKIEKILTFRIPYYVGPLARGNSRFAWMTRKSEETITPWNFEEVVDKGASAQSFIERMTNFDKNLPNEKVLPKHSLLYEYFTVYNELTKVKYVTEGMRKPAFLSGEQKKAIVDLLFKTNRKVTVKQLKEDYFKKIECFDSVEISGVEDRFNASLGTYHDLLKIIKDKDFLDNEENEDILEDIVLTLTLFEDREMIEERLKTYAHLFDDKVMKQLKRRRYTGWGRLSRKLINGIRDKQSGKTILDFLKSDGFANRNFMQLIHDDSLTFKEDIQKAQVSGQGDSLHEHIANLAGSPAIKKGILQTVKVVDELVKVMGRHKPENIVIEMARENQTTQKGQKNSRERMKRIEEGIKELGSQILKEHPVENTQLQNEKLYLYYLQNGRDMYVDQELDINRLSDYDVDHIVPQSFLKDDSIDNKVLTRSDKARGKSDNVPSEEVVKKMKNYWRQLLNAKLITQRKFDNLTKAERGGLSELDKAGFIKRQLVETRQITKHVAQILDSRMNTKYDENDKLIREVKVITLKSKLVSDFRKDFQFYKVREINNYHHAHDAYLNAVVGTALIKKYPKLESEFVYGDYKVYDVRKMIAKSEQEIGKATAKYFFYSNIMNFFKTEITLANGEIRKRPLIETNGETGEIVWDKGRDFATVRKVLSMPQVNIVKKTEVQTGGFSKESILPKRNSDKLIARKKDWDPKKYGGFDSPTVAYSVLVVAKVEKGKSKKLKSVKELLGITIMERSSFEKNPIDFLEAKGYKEVKKDLIIKLPKYSLFELENGRKRMLASAGELQKGNELALPSKYVNFLYLASHYEKLKGSPEDNEQKQLFVEQHKHYLDEIIEQISEFSKRVILADANLDKVLSAYNKHRDKPIREQAENIIHLFTLTNLGAPAAFKYFDTTIDRKRYTSTKEVLDATLIHQSITGLYETRIDLSQLGGDGGGSSGSSGSSGSSGGTLNIEDEYRLHETSKGPDVPLGSTWLSDFPQAWAETGGMGLAVRQAPLIIPLKATSTPVSIKQYPMSQEARLGIKPHIQRLLDQGILVPCQSPWNTPLLPVKKPGTNDYRPVQDLREVNKRVEDIHPTVPNPYNLLSGLPPSHQWYTVLDLKDAFFCLRLHPTSQSLFAFEWRDPEMGISGQLTWTRLPQGFKNSPTLFNEALHRDLADFRIQHPDLILLQYVDDLLLAATSELDCQQGTRALLQTLGDLGYRASAKKAQICQKQVKYLGYLLKEGQRWLTEARKETVMGQPTPKTPRQLREFLGKAGFCRLFIPGFAEMAAPLYPLTKPGTLFEWGPDQQKAYQEIKQALLTAPALGLPDLTKPFELFVDEKQGYAKGVLTQKLGPWRRPVAYLSKKLDPVAAGWPPCLRMVAAIAVLTKDAGKLTMGQPLVILAPHAVEALVKQPPDRWLSNARMTHYQALLLDTDRVQFGPIVALNPATLLPLPEEGLQHDCLDILAEAHGTRPDLTDQPLPDADHTWYTDGSSFLQEGQRKAGAAVTTETEVVWAKALPAGTSAQRAELIALTQALKMAEGKKLNVYTDSRYAFATAHIHGEIYRRRGWLTSEGKEIKNKDEILALLKALFLPKRLSIIHCPGHQKGNRAEARGNRMADQAAREVATRETPETSTLLAGKRTADGSEFEKRTADGSEFESPKKKAKVE

SEQ ID NO: 2538 - protein, 2096 aa, synthetic construct
MPAAKRVKLDGGDKKYSIGLDIGTNSVGWAVITDEYKVPSKKFKVLGNTDRHSIKKNLIGALLFDSGETAEATRLKRTARRRYTRRKNRICYLQEIFSNEMAKVDDSFFHRLEESFLVEEDKKHERHPIFGNIVDEVAYHEKYPTIYHLRKKLVDSTDKADLRLIYLALAHMIKFRGHFLIEGDLNPDNSDVDKLFIQLVQTYNQLFEENPINASGVDAKAILSARLSKSRRLENLIAQLPGEKKNGLFGNLIALSLGLTPNFKSNFDLAEDAKLQLSKDTYDDDLDNLLAQIGDQYADLFLAAKNLSDAILLSDILRVNTEITKAPLSASMIKRYDEHHQDLTLLKALVRQQLPEKYKEIFFDQSKNGYAGYIDGGASQEEFYKFIKPILEKMDGTEELLVKLNREDLLRKQRTFDNGSIPHQIHLGELHAILRRQEDFYPFLKDNREKIEKILTFRIPYYVGPLARGNSRFAWMTRKSEETITPWNFEEVVDKGASAQSFIERMTNFDKNLPNEKVLPKHSLLYEYFTVYNELTKVKYVTEGMRKPAFLSGEQKKAIVDLLFKTNRKVTVKQLKEDYFKKIECFDSVEISGVEDRFNASLGTYHDLLKIIKDKDFLDNEENEDILEDIVLTLTLFEDREMIEERLKTYAHLFDDKVMKQLKRRRYTGWGRLSRKLINGIRDKQSGKTILDFLKSDGFANRNFMQLIHDDSLTFKEDIQKAQVSGQGDSLHEHIANLAGSPAIKKGILQTVKVVDELVKVMGRHKPENIVIEMARENQTTQKGQKNSRERMKRIEEGIKELGSQILKEHPVENTQLQNEKLYLYYLQNGRDMYVDQELDINRLSDYDVDHIVPQSFLKDDSIDNKVLTRSDKARGKSDNVPSEEVVKKMKNYWRQLLNAKLITQRKFDNLTKAERGGLSELDKAGFIKRQLVETRQITKHVAQILDSRMNTKYDENDKLIREVKVITLKSKLVSDFRKDFQFYKVREINNYHHAHDAYLNAVVGTALIKKYPKLESEFVYGDYKVYDVRKMIAKSEQEIGKATAKYFFYSNIMNFFKTEITLANGEIRKRPLIETNGETGEIVWDKGRDFATVRKVLSMPQVNIVKKTEVQTGGFSKESILPKRNSDKLIARKKDWDPKKYGGFDSPTVAYSVLVVAKVEKGKSKKLKSVKELLGITIMERSSFEKNPIDFLEAKGYKEVKKDLIIKLPKYSLFELENGRKRMLASAGELQKGNELALPSKYVNFLYLASHYEKLKGSPEDNEQKQLFVEQHKHYLDEIIEQISEFSKRVILADANLDKVLSAYNKHRDKPIREQAENIIHLFTLTNLGAPAAFKYFDTTIDRKRYTSTKEVLDATLIHQSITGLYETRIDLSQLGGDGGGGSGSSEAAAKGGTLNIEDEYRLHETSKGPDVPLGSTWLSDFPQAWAETGGMGLAVRQAPLIIPLKATSTPVSIKQYPMSQEARLGIKPHIQRLLDQGILVPCQSPWNTPLLPVKKPGTNDYRPVQDLREVNKRVEDIHPTVPNPYNLLSGLPPSHQWYTVLDLKDAFFCLRLHPTSQSLFAFEWRDPEMGISGQLTWTRLPQGFKNSPTLFNEALHRDLADFRIQHPDLILLQYVDDLLLAATSELDCQQGTRALLQTLGDLGYRASAKKAQICQKQVKYLGYLLKEGQRWLTEARKETVMGQPTPKTPRQLREFLGKAGFCRLFIPGFAEMAAPLYPLTKPGTLFEWGPDQQKAYQEIKQALLTAPALGLPDLTKPFELFVDEKQGYAKGVLTQKLGPWRRPVAYLSKKLDPVAAGWPPCLRMVAAIAVLTKDAGKLTMGQPLVILAPHAVEALVKQPPDRWLSNARMTHYQALLLDTDRVQFGPIVALNPATLLPLPEEGLQHDCLDILAEAHGTRPDLTDQPLPDADHTWYTDGSSFLQEGQRKAGAAVTTETEVVWAKALPAGTSAQRAELIALTQALKMAEGKKLNVYTDSRYAFATAHIHGEIYRRRGWLTSEGKEIKNKDEILALLKALFLPKRLSIIHCPGHQKGNRAEARGNRMADQAAREVATRETPETSTLLAGKRTADGSEFEKRTADGSEFESPKKKAKVE

SEQ ID NO: 2539 - protein, 2090 aa, synthetic construct
MPAAKRVKLDGGDKKYSIGLDIGTNSVGWAVITDEYKVPSKKFKVLGNTDRHSIKKNLIGALLFDSGETAEATRLKRTARRRYTRRKNRICYLQEIFSNEMAKVDDSFFHRLEESFLVEEDKKHERHPIFGNIVDEVAYHEKYPTIYHLRKKLVDSTDKADLRLIYLALAHMIKFRGHFLIEGDLNPDNSDVDKLFIQLVQTYNQLFEENPINASGVDAKAILSARLSKSRRLENLIAQLPGEKKNGLFGNLIALSLGLTPNFKSNFDLAEDAKLQLSKDTYDDDLDNLLAQIGDQYADLFLAAKNLSDAILLSDILRVNTEITKAPLSASMIKRYDEHHQDLTLLKALVRQQLPEKYKEIFFDQSKNGYAGYIDGGASQEEFYKFIKPILEKMDGTEELLVKLNREDLLRKQRTFDNGSIPHQIHLGELHAILRRQEDFYPFLKDNREKIEKILTFRIPYYVGPLARGNSRFAWMTRKSEETITPWNFEEVVDKGASAQSFIERMTNFDKNLPNEKVLPKHSLLYEYFTVYNELTKVKYVTEGMRKPAFLSGEQKKAIVDLLFKTNRKVTVKQLKEDYFKKIECFDSVEISGVEDRFNASLGTYHDLLKIIKDKDFLDNEENEDILEDIVLTLTLFEDREMIEERLKTYAHLFDDKVMKQLKRRRYTGWGRLSRKLINGIRDKQSGKTILDFLKSDGFANRNFMQLIHDDSLTFKEDIQKAQVSGQGDSLHEHIANLAGSPAIKKGILQTVKVVDELVKVMGRHKPENIVIEMARENQTTQKGQKNSRERMKRIEEGIKELGSQILKEHPVENTQLQNEKLYLYYLQNGRDMYVDQELDINRLSDYDVDHIVPQSFLKDDSIDNKVLTRSDKARGKSDNVPSEEVVKKMKNYWRQLLNAKLITQRKFDNLTKAERGGLSELDKAGFIKRQLVETRQITKHVAQILDSRMNTKYDENDKLIREVKVITLKSKLVSDFRKDFQFYKVREINNYHHAHDAYLNAVVGTALIKKYPKLESEFVYGDYKVYDVRKMIAKSEQEIGKATAKYFFYSNIMNFFKTEITLANGEIRKRPLIETNGETGEIVWDKGRDFATVRKVLSMPQVNIVKKTEVQTGGFSKESILPKRNSDKLIARKKDWDPKKYGGFDSPTVAYSVLVVAKVEKGKSKKLKSVKELLGITIMERSSFEKNPIDFLEAKGYKEVKKDLIIKLPKYSLFELENGRKRMLASAGELQKGNELALPSKYVNFLYLASHYEKLKGSPEDNEQKQLFVEQHKHYLDEIIEQISEFSKRVILADANLDKVLSAYNKHRDKPIREQAENIIHLFTLTNLGAPAAFKYFDTTIDRKRYTSTKEVLDATLIHQSITGLYETRIDLSQLGGDGGEAAAKGGTLNIEDEYRLHETSKGPDVPLGSTWLSDFPQAWAETGGMGLAVRQAPLIIPLKATSTPVSIKQYPMSQEARLGIKPHIQRLLDQGILVPCQSPWNTPLLPVKKPGTNDYRPVQDLREVNKRVEDIHPTVPNPYNLLSGLPPSHQWYTVLDLKDAFFCLRLHPTSQSLFAFEWRDPEMGISGQLTWTRLPQGFKNSPTLFNEALHRDLADFRIQHPDLILLQYVDDLLLAATSELDCQQGTRALLQTLGDLGYRASAKKAQICQKQVKYLGYLLKEGQRWLTEARKETVMGQPTPKTPRQLREFLGKAGFCRLFIPGFAEMAAPLYPLTKPGTLFEWGPDQQKAYQEIKQALLTAPALGLPDLTKPFELFVDEKQGYAKGVLTQKLGPWRRPVAYLSKKLDPVAAGWPPCLRMVAAIAVLTKDAGKLTMGQPLVILAPHAVEALVKQPPDRWLSNARMTHYQALLLDTDRVQFGPIVALNPATLLPLPEEGLQHDCLDILAEAHGTRPDLTDQPLPDADHTWYTDGSSFLQEGQRKAGAAVTTETEVVWAKALPAGTSAQRAELIALTQALKMAEGKKLNVYTDSRYAFATAHIHGEIYRRRGWLTSEGKEIKNKDEILALLKALFLPKRLSIIHCPGHQKGNRAEARGNRMADQAAREVATRETPETSTLLAGKRTADGSEFEKRTADGSEFESPKKKAKVE

SEQ ID NO: 2540 - protein, 2091 aa, synthetic construct
MPAAKRVKLDGGDKKYSIGLDIGTNSVGWAVITDEYKVPSKKFKVLGNTDRHSIKKNLIGALLFDSGETAEATRLKRTARRRYTRRKNRICYLQEIFSNEMAKVDDSFFHRLEESFLVEEDKKHERHPIFGNIVDEVAYHEKYPTIYHLRKKLVDSTDKADLRLIYLALAHMIKFRGHFLIEGDLNPDNSDVDKLFIQLVQTYNQLFEENPINASGVDAKAILSARLSKSRRLENLIAQLPGEKKNGLFGNLIALSLGLTPNFKSNFDLAEDAKLQLSKDTYDDDLDNLLAQIGDQYADLFLAAKNLSDAILLSDILRVNTEITKAPLSASMIKRYDEHHQDLTLLKALVRQQLPEKYKEIFFDQSKNGYAGYIDGGASQEEFYKFIKPILEKMDGTEELLVKLNREDLLRKQRTFDNGSIPHQIHLGELHAILRRQEDFYPFLKDNREKIEKILTFRIPYYVGPLARGNSRFAWMTRKSEETITPWNFEEVVDKGASAQSFIERMTNFDKNLPNEKVLPKHSLLYEYFTVYNELTKVKYVTEGMRKPAFLSGEQKKAIVDLLFKTNRKVTVKQLKEDYFKKIECFDSVEISGVEDRFNASLGTYHDLLKIIKDKDFLDNEENEDILEDIVLTLTLFEDREMIEERLKTYAHLFDDKVMKQLKRRRYTGWGRLSRKLINGIRDKQSGKTILDFLKSDGFANRNFMQLIHDDSLTFKEDIQKAQVSGQGDSLHEHIANLAGSPAIKKGILQTVKVVDELVKVMGRHKPENIVIEMARENQTTQKGQKNSRERMKRIEEGIKELGSQILKEHPVENTQLQNEKLYLYYLQNGRDMYVDQELDINRLSDYDVDHIVPQSFLKDDSIDNKVLTRSDKARGKSDNVPSEEVVKKMKNYWRQLLNAKLITQRKFDNLTKAERGGLSELDKAGFIKRQLVETRQITKHVAQILDSRMNTKYDENDKLIREVKVITLKSKLVSDFRKDFQFYKVREINNYHHAHDAYLNAVVGTALIKKYPKLESEFVYGDYKVYDVRKMIAKSEQEIGKATAKYFFYSNIMNFFKTEITLANGEIRKRPLIETNGETGEIVWDKGRDFATVRKVLSMPQVNIVKKTEVQTGGFSKESILPKRNSDKLIARKKDWDPKKYGGFDSPTVAYSVLVVAKVEKGKSKKLKSVKELLGITIMERSSFEKNPIDFLEAKGYKEVKKDLIIKLPKYSLFELENGRKRMLASAGELQKGNELALPSKYVNFLYLASHYEKLKGSPEDNEQKQLFVEQHKHYLDEIIEQISEFSKRVILADANLDKVLSAYNKHRDKPIREQAENIIHLFTLTNLGAPAAFKYFDTTIDRKRYTSTKEVLDATLIHQSITGLYETRIDLSQLGGDGGPAPGGGGGTLNIEDEYRLHETSKGPDVPLGSTWLSDFPQAWAETGGMGLAVRQAPLIIPLKATSTPVSIKQYPMSQEARLGIKPHIQRLLDQGILVPCQSPWNTPLLPVKKPGTNDYRPVQDLREVNKRVEDIHPTVPNPYNLLSGLPPSHQWYTVLDLKDAFFCLRLHPTSQSLFAFEWRDPEMGISGQLTWTRLPQGFKNSPTLFNEALHRDLADFRIQHPDLILLQYVDDLLLAATSELDCQQGTRALLQTLGDLGYRASAKKAQICQKQVKYLGYLLKEGQRWLTEARKETVMGQPTPKTPRQLREFLGKAGFCRLFIPGFAEMAAPLYPLTKPGTLFEWGPDQQKAYQEIKQALLTAPALGLPDLTKPFELFVDEKQGYAKGVLTQKLGPWRRPVAYLSKKLDPVAAGWPPCLRMVAAIAVLTKDAGKLTMGQPLVILAPHAVEALVKQPPDRWLSNARMTHYQALLLDTDRVQFGPIVALNPATLLPLPEEGLQHDCLDILAEAHGTRPDLTDQPLPDADHTWYTDGSSFLQEGQRKAGAAVTTETEVVWAKALPAGTSAQRAELIALTQALKMAEGKKLNVYTDSRYAFATAHIHGEIYRRRGWLTSEGKEIKNKDEILALLKALFLPKRLSIIHCPGHQKGNRAEARGNRMADQAAREVATRETPETSTLLAGKRTADGSEFEKRTADGSEFESPKKKAKVE

SEQ ID NO: 2541 - protein, 2115 aa, synthetic construct
MPAAKRVKLDGGDKKYSIGLDIGTNSVGWAVITDEYKVPSKKFKVLGNTDRHSIKKNLIGALLFDSGETAEATRLKRTARRRYTRRKNRICYLQEIFSNEMAKVDDSFFHRLEESFLVEEDKKHERHPIFGNIVDEVAYHEKYPTIYHLRKKLVDSTDKADLRLIYLALAHMIKFRGHFLIEGDLNPDNSDVDKLFIQLVQTYNQLFEENPINASGVDAKAILSARLSKSRRLENLIAQLPGEKKNGLFGNLIALSLGLTPNFKSNFDLAEDAKLQLSKDTYDDDLDNLLAQIGDQYADLFLAAKNLSDAILLSDILRVNTEITKAPLSASMIKRYDEHHQDLTLLKALVRQQLPEKYKEIFFDQSKNGYAGYIDGGASQEEFYKFIKPILEKMDGTEELLVKLNREDLLRKQRTFDNGSIPHQIHLGELHAILRRQEDFYPFLKDNREKIEKILTFRIPYYVGPLARGNSRFAWMTRKSEETITPWNFEEVVDKGASAQSFIERMTNFDKNLPNEKVLPKHSLLYEYFTVYNELTKVKYVTEGMRKPAFLSGEQKKAIVDLLFKTNRKVTVKQLKEDYFKKIECFDSVEISGVEDRFNASLGTYHDLLKIIKDKDFLDNEENEDILEDIVLTLTLFEDREMIEERLKTYAHLFDDKVMKQLKRRRYTGWGRLSRKLINGIRDKQSGKTILDFLKSDGFANRNFMQLIHDDSLTFKEDIQKAQVSGQGDSLHEHIANLAGSPAIKKGILQTVKVVDELVKVMGRHKPENIVIEMARENQTTQKGQKNSRERMKRIEEGIKELGSQILKEHPVENTQLQNEKLYLYYLQNGRDMYVDQELDINRLSDYDVDHIVPQSFLKDDSIDNKVLTRSDKARGKSDNVPSEEVVKKMKNYWRQLLNAKLITQRKFDNLTKAERGGLSELDKAGFIKRQLVETRQITKHVAQILDSRMNTKYDENDKLIREVKVITLKSKLVSDFRKDFQFYKVREINNYHHAHDAYLNAVVGTALIKKYPKLESEFVYGDYKVYDVRKMIAKSEQEIGKATAKYFFYSNIMNFFKTEITLANGEIRKRPLIETNGETGEIVWDKGRDFATVRKVLSMPQVNIVKKTEVQTGGFSKESILPKRNSDKLIARKKDWDPKKYGGFDSPTVAYSVLVVAKVEKGKSKKLKSVKELLGITIMERSSFEKNPIDFLEAKGYKEVKKDLIIKLPKYSLFELENGRKRMLASAGELQKGNELALPSKYVNFLYLASHYEKLKGSPEDNEQKQLFVEQHKHYLDEIIEQISEFSKRVILADANLDKVLSAYNKHRDKPIREQAENIIHLFTLTNLGAPAAFKYFDTTIDRKRYTSTKEVLDATLIHQSITGLYETRIDLSQLGGDGGEAAAKEAAAKEAAAKEAAAKEAAAKEAAAKGGTLNIEDEYRLHETSKGPDVPLGSTWLSDFPQAWAETGGMGLAVRQAPLIIPLKATSTPVSIKQYPMSQEARLGIKPHIQRLLDQGILVPCQSPWNTPLLPVKKPGTNDYRPVQDLREVNKRVEDIHPTVPNPYNLLSGLPPSHQWYTVLDLKDAFFCLRLHPTSQSLFAFEWRDPEMGISGQLTWTRLPQGFKNSPTLFNEALHRDLADFRIQHPDLILLQYVDDLLLAATSELDCQQGTRALLQTLGDLGYRASAKKAQICQKQVKYLGYLLKEGQRWLTEARKETVMGQPTPKTPRQLREFLGKAGFCRLFIPGFAEMAAPLYPLTKPGTLFEWGPDQQKAYQEIKQALLTAPALGLPDLTKPFELFVDEKQGYAKGVLTQKLGPWRRPVAYLSKKLDPVAAGWPPCLRMVAAIAVLTKDAGKLTMGQPLVILAPHAVEALVKQPPDRWLSNARMTHYQALLLDTDRVQFGPIVALNPATLLPLPEEGLQHDCLDILAEAHGTRPDLTDQPLPDADHTWYTDGSSFLQEGQRKAGAAVTTETEVVWAKALPAGTSAQRAELIALTQALKMAEGKKLNVYTDSRYAFATAHIHGEIYRRRGWLTSEGKEIKNKDEILALLKALFLPKRLSIIHCPGHQKGNRAEARGNRMADQAAREVATRETPETSTLLAGKRTADGSEFEKRTADGSEFESPKKKAKVE

SEQ ID NO: 2542 - protein, 2096 aa, synthetic construct
MPAAKRVKLDGGDKKYSIGLDIGTNSVGWAVITDEYKVPSKKFKVLGNTDRHSIKKNLIGALLFDSGETAEATRLKRTARRRYTRRKNRICYLQEIFSNEMAKVDDSFFHRLEESFLVEEDKKHERHPIFGNIVDEVAYHEKYPTIYHLRKKLVDSTDKADLRLIYLALAHMIKFRGHFLIEGDLNPDNSDVDKLFIQLVQTYNQLFEENPINASGVDAKAILSARLSKSRRLENLIAQLPGEKKNGLFGNLIALSLGLTPNFKSNFDLAEDAKLQLSKDTYDDDLDNLLAQIGDQYADLFLAAKNLSDAILLSDILRVNTEITKAPLSASMIKRYDEHHQDLTLLKALVRQQLPEKYKEIFFDQSKNGYAGYIDGGASQEEFYKFIKPILEKMDGTEELLVKLNREDLLRKQRTFDNGSIPHQIHLGELHAILRRQEDFYPFLKDNREKIEKILTFRIPYYVGPLARGNSRFAWMTRKSEETITPWNFEEVVDKGASAQSFIERMTNFDKNLPNEKVLPKHSLLYEYFTVYNELTKVKYVTEGMRKPAFLSGEQKKAIVDLLFKTNRKVTVKQLKEDYFKKIECFDSVEISGVEDRFNASLGTYHDLLKIIKDKDFLDNEENEDILEDIVLTLTLFEDREMIEERLKTYAHLFDDKVMKQLKRRRYTGWGRLSRKLINGIRDKQSGKTILDFLKSDGFANRNFMQLIHDDSLTFKEDIQKAQVSGQGDSLHEHIANLAGSPAIKKGILQTVKVVDELVKVMGRHKPENIVIEMARENQTTQKGQKNSRERMKRIEEGIKELGSQILKEHPVENTQLQNEKLYLYYLQNGRDMYVDQELDINRLSDYDVDHIVPQSFLKDDSIDNKVLTRSDKARGKSDNVPSEEVVKKMKNYWRQLLNAKLITQRKFDNLTKAERGGLSELDKAGFIKRQLVETRQITKHVAQILDSRMNTKYDENDKLIREVKVITLKSKLVSDFRKDFQFYKVREINNYHHAHDAYLNAVVGTALIKKYPKLESEFVYGDYKVYDVRKMIAKSEQEIGKATAKYFFYSNIMNFFKTEITLANGEIRKRPLIETNGETGEIVWDKGRDFATVRKVLSMPQVNIVKKTEVQTGGFSKESILPKRNSDKLIARKKDWDPKKYGGFDSPTVAYSVLVVAKVEKGKSKKLKSVKELLGITIMERSSFEKNPIDFLEAKGYKEVKKDLIIKLPKYSLFELENGRKRMLASAGELQKGNELALPSKYVNFLYLASHYEKLKGSPEDNEQKQLFVEQHKHYLDEIIEQISEFSKRVILADANLDKVLSAYNKHRDKPIREQAENIIHLFTLTNLGAPAAFKYFDTTIDRKRYTSTKEVLDATLIHQSITGLYETRIDLSQLGGDGGPAPGSSEAAAKGGTLNIEDEYRLHETSKGPDVPLGSTWLSDFPQAWAETGGMGLAVRQAPLIIPLKATSTPVSIKQYPMSQEARLGIKPHIQRLLDQGILVPCQSPWNTPLLPVKKPGTNDYRPVQDLREVNKRVEDIHPTVPNPYNLLSGLPPSHQWYTVLDLKDAFFCLRLHPTSQSLFAFEWRDPEMGISGQLTWTRLPQGFKNSPTLFNEALHRDLADFRIQHPDLILLQYVDDLLLAATSELDCQQGTRALLQTLGDLGYRASAKKAQICQKQVKYLGYLLKEGQRWLTEARKETVMGQPTPKTPRQLREFLGKAGFCRLFIPGFAEMAAPLYPLTKPGTLFEWGPDQQKAYQEIKQALLTAPALGLPDLTKPFELFVDEKQGYAKGVLTQKLGPWRRPVAYLSKKLDPVAAGWPPCLRMVAAIAVLTKDAGKLTMGQPLVILAPHAVEALVKQPPDRWLSNARMTHYQALLLDTDRVQFGPIVALNPATLLPLPEEGLQHDCLDILAEAHGTRPDLTDQPLPDADHTWYTDGSSFLQEGQRKAGAAVTTETEVVWAKALPAGTSAQRAELIALTQALKMAEGKKLNVYTDSRYAFATAHIHGEIYRRRGWLTSEGKEIKNKDEILALLKALFLPKRLSIIHCPGHQKGNRAEARGNRMADQAAREVATRETPETSTLLAGKRTADGSEFEKRTADGSEFESPKKKAKVE

SEQ ID NO: 2543 - protein, 2094 aa, synthetic construct
MPAAKRVKLDGGDKKYSIGLDIGTNSVGWAVITDEYKVPSKKFKVLGNTDRHSIKKNLIGALLFDSGETAEATRLKRTARRRYTRRKNRICYLQEIFSNEMAKVDDSFFHRLEESFLVEEDKKHERHPIFGNIVDEVAYHEKYPTIYHLRKKLVDSTDKADLRLIYLALAHMIKFRGHFLIEGDLNPDNSDVDKLFIQLVQTYNQLFEENPINASGVDAKAILSARLSKSRRLENLIAQLPGEKKNGLFGNLIALSLGLTPNFKSNFDLAEDAKLQLSKDTYDDDLDNLLAQIGDQYADLFLAAKNLSDAILLSDILRVNTEITKAPLSASMIKRYDEHHQDLTLLKALVRQQLPEKYKEIFFDQSKNGYAGYIDGGASQEEFYKFIKPILEKMDGTEELLVKLNREDLLRKQRTFDNGSIPHQIHLGELHAILRRQEDFYPFLKDNREKIEKILTFRIPYYVGPLARGNSRFAWMTRKSEETITPWNFEEVVDKGASAQSFIERMTNFDKNLPNEKVLPKHSLLYEYFTVYNELTKVKYVTEGMRKPAFLSGEQKKAIVDLLFKTNRKVTVKQLKEDYFKKIECFDSVEISGVEDRFNASLGTYHDLLKIIKDKDFLDNEENEDILEDIVLTLTLFEDREMIEERLKTYAHLFDDKVMKQLKRRRYTGWGRLSRKLINGIRDKQSGKTILDFLKSDGFANRNFMQLIHDDSLTFKEDIQKAQVSGQGDSLHEHIANLAGSPAIKKGILQTVKVVDELVKVMGRHKPENIVIEMARENQTTQKGQKNSRERMKRIEEGIKELGSQILKEHPVENTQLQNEKLYLYYLQNGRDMYVDQELDINRLSDYDVDHIVPQSFLKDDSIDNKVLTRSDKARGKSDNVPSEEVVKKMKNYWRQLLNAKLITQRKFDNLTKAERGGLSELDKAGFIKRQLVETRQITKHVAQILDSRMNTKYDENDKLIREVKVITLKSKLVSDFRKDFQFYKVREINNYHHAHDAYLNAVVGTALIKKYPKLESEFVYGDYKVYDVRKMIAKSEQEIGKATAKYFFYSNIMNFFKTEITLANGEIRKRPLIETNGETGEIVWDKGRDFATVRKVLSMPQVNIVKKTEVQTGGFSKESILPKRNSDKLIARKKDWDPKKYGGFDSPTVAYSVLVVAKVEKGKSKKLKSVKELLGITIMERSSFEKNPIDFLEAKGYKEVKKDLIIKLPKYSLFELENGRKRMLASAGELQKGNELALPSKYVNFLYLASHYEKLKGSPEDNEQKQLFVEQHKHYLDEIIEQISEFSKRVILADANLDKVLSAYNKHRDKPIREQAENIIHLFTLTNLGAPAAFKYFDTTIDRKRYTSTKEVLDATLIHQSITGLYETRIDLSQLGGDGGGGGPAPGGSGGTLNIEDEYRLHETSKGPDVPLGSTWLSDFPQAWAETGGMGLAVRQAPLIIPLKATSTPVSIKQYPMSQEARLGIKPHIQRLLDQGILVPCQSPWNTPLLPVKKPGTNDYRPVQDLREVNKRVEDIHPTVPNPYNLLSGLPPSHQWYTVLDLKDAFFCLRLHPTSQSLFAFEWRDPEMGISGQLTWTRLPQGFKNSPTLFNEALHRDLADFRIQHPDLILLQYVDDLLLAATSELDCQQGTRALLQTLGDLGYRASAKKAQICQKQVKYLGYLLKEGQRWLTEARKETVMGQPTPKTPRQLREFLGKAGFCRLFIPGFAEMAAPLYPLTKPGTLFEWGPDQQKAYQEIKQALLTAPALGLPDLTKPFELFVDEKQGYAKGVLTQKLGPWRRPVAYLSKKLDPVAAGWPPCLRMVAAIAVLTKDAGKLTMGQPLVILAPHAVEALVKQPPDRWLSNARMTHYQALLLDTDRVQFGPIVALNPATLLPLPEEGLQHDCLDILAEAHGTRPDLTDQPLPDADHTWYTDGSSFLQEGQRKAGAAVTTETEVVWAKALPAGTSAQRAELIALTQALKMAEGKKLNVYTDSRYAFATAHIHGEIYRRRGWLTSEGKEIKNKDEILALLKALFLPKRLSIIHCPGHQKGNRAEARGNRMADQAAREVATRETPETSTLLAGKRTADGSEFEKRTADGSEFESPKKKAKVE

SEQ ID NO: 2544 - protein, 2097 aa, synthetic construct
MPAAKRVKLDGGDKKYSIGLDIGTNSVGWAVITDEYKVPSKKFKVLGNTDRHSIKKNLIGALLFDSGETAEATRLKRTARRRYTRRKNRICYLQEIFSNEMAKVDDSFFHRLEESFLVEEDKKHERHPIFGNIVDEVAYHEKYPTIYHLRKKLVDSTDKADLRLIYLALAHMIKFRGHFLIEGDLNPDNSDVDKLFIQLVQTYNQLFEENPINASGVDAKAILSARLSKSRRLENLIAQLPGEKKNGLFGNLIALSLGLTPNFKSNFDLAEDAKLQLSKDTYDDDLDNLLAQIGDQYADLFLAAKNLSDAILLSDILRVNTEITKAPLSASMIKRYDEHHQDLTLLKALVRQQLPEKYKEIFFDQSKNGYAGYIDGGASQEEFYKFIKPILEKMDGTEELLVKLNREDLLRKQRTFDNGSIPHQIHLGELHAILRRQEDFYPFLKDNREKIEKILTFRIPYYVGPLARGNSRFAWMTRKSEETITPWNFEEVVDKGASAQSFIERMTNFDKNLPNEKVLPKHSLLYEYFTVYNELTKVKYVTEGMRKPAFLSGEQKKAIVDLLFKTNRKVTVKQLKEDYFKKIECFDSVEISGVEDRFNASLGTYHDLLKIIKDKDFLDNEENEDILEDIVLTLTLFEDREMIEERLKTYAHLFDDKVMKQLKRRRYTGWGRLSRKLINGIRDKQSGKTILDFLKSDGFANRNFMQLIHDDSLTFKEDIQKAQVSGQGDSLHEHIANLAGSPAIKKGILQTVKVVDELVKVMGRHKPENIVIEMARENQTTQKGQKNSRERMKRIEEGIKELGSQILKEHPVENTQLQNEKLYLYYLQNGRDMYVDQELDINRLSDYDVDHIVPQSFLKDDSIDNKVLTRSDKARGKSDNVPSEEVVKKMKNYWRQLLNAKLITQRKFDNLTKAERGGLSELDKAGFIKRQLVETRQITKHVAQILDSRMNTKYDENDKLIREVKVITLKSKLVSDFRKDFQFYKVREINNYHHAHDAYLNAVVGTALIKKYPKLESEFVYGDYKVYDVRKMIAKSEQEIGKATAKYFFYSNIMNFFKTEITLANGEIRKRPLIETNGETGEIVWDKGRDFATVRKVLSMPQVNIVKKTEVQTGGFSKESILPKRNSDKLIARKKDWDPKKYGGFDSPTVAYSVLVVAKVEKGKSKKLKSVKELLGITIMERSSFEKNPIDFLEAKGYKEVKKDLIIKLPKYSLFELENGRKRMLASAGELQKGNELALPSKYVNFLYLASHYEKLKGSPEDNEQKQLFVEQHKHYLDEIIEQISEFSKRVILADANLDKVLSAYNKHRDKPIREQAENIIHLFTLTNLGAPAAFKYFDTTIDRKRYTSTKEVLDATLIHQSITGLYETRIDLSQLGGDGGGGSGGSGGSGGSGGTLNIEDEYRLHETSKGPDVPLGSTWLSDFPQAWAETGGMGLAVRQAPLIIPLKATSTPVSIKQYPMSQEARLGIKPHIQRLLDQGILVPCQSPWNTPLLPVKKPGTNDYRPVQDLREVNKRVEDIHPTVPNPYNLLSGLPPSHQWYTVLDLKDAFFCLRLHPTSQSLFAFEWRDPEMGISGQLTWTRLPQGFKNSPTLFNEALHRDLADFRIQHPDLILLQYVDDLLLAATSELDCQQGTRALLQTLGDLGYRASAKKAQICQKQVKYLGYLLKEGQRWLTEARKETVMGQPTPKTPRQLREFLGKAGFCRLFIPGFAEMAAPLYPLTKPGTLFEWGPDQQKAYQEIKQALLTAPALGLPDLTKPFELFVDEKQGYAKGVLTQKLGPWRRPVAYLSKKLDPVAAGWPPCLRMVAAIAVLTKDAGKLTMGQPLVILAPHAVEALVKQPPDRWLSNARMTHYQALLLDTDRVQFGPIVALNPATLLPLPEEGLQHDCLDILAEAHGTRPDLTDQPLPDADHTWYTDGSSFLQEGQRKAGAAVTTETEVVWAKALPAGTSAQRAELIALTQALKMAEGKKLNVYTDSRYAFATAHIHGEIYRRRGWLTSEGKEIKNKDEILALLKALFLPKRLSIIHCPGHQKGNRAEARGNRMADQAAREVATRETPETSTLLAGKRTADGSEFEKRTADGSEFESPKKKAKVE

SEQ ID NO: 2545 - protein, 2094 aa, synthetic construct
MPAAKRVKLDGGDKKYSIGLDIGTNSVGWAVITDEYKVPSKKFKVLGNTDRHSIKKNLIGALLFDSGETAEATRLKRTARRRYTRRKNRICYLQEIFSNEMAKVDDSFFHRLEESFLVEEDKKHERHPIFGNIVDEVAYHEKYPTIYHLRKKLVDSTDKADLRLIYLALAHMIKFRGHFLIEGDLNPDNSDVDKLFIQLVQTYNQLFEENPINASGVDAKAILSARLSKSRRLENLIAQLPGEKKNGLFGNLIALSLGLTPNFKSNFDLAEDAKLQLSKDTYDDDLDNLLAQIGDQYADLFLAAKNLSDAILLSDILRVNTEITKAPLSASMIKRYDEHHQDLTLLKALVRQQLPEKYKEIFFDQSKNGYAGYIDGGASQEEFYKFIKPILEKMDGTEELLVKLNREDLLRKQRTFDNGSIPHQIHLGELHAILRRQEDFYPFLKDNREKIEKILTFRIPYYVGPLARGNSRFAWMTRKSEETITPWNFEEVVDKGASAQSFIERMTNFDKNLPNEKVLPKHSLLYEYFTVYNELTKVKYVTEGMRKPAFLSGEQKKAIVDLLFKTNRKVTVKQLKEDYFKKIECFDSVEISGVEDRFNASLGTYHDLLKIIKDKDFLDNEENEDILEDIVLTLTLFEDREMIEERLKTYAHLFDDKVMKQLKRRRYTGWGRLSRKLINGIRDKQSGKTILDFLKSDGFANRNFMQLIHDDSLTFKEDIQKAQVSGQGDSLHEHIANLAGSPAIKKGILQTVKVVDELVKVMGRHKPENIVIEMARENQTTQKGQKNSRERMKRIEEGIKELGSQILKEHPVENTQLQNEKLYLYYLQNGRDMYVDQELDINRLSDYDVDHIVPQSFLKDDSIDNKVLTRSDKARGKSDNVPSEEVVKKMKNYWRQLLNAKLITQRKFDNLTKAERGGLSELDKAGFIKRQLVETRQITKHVAQILDSRMNTKYDENDKLIREVKVITLKSKLVSDFRKDFQFYKVREINNYHHAHDAYLNAVVGTALIKKYPKLESEFVYGDYKVYDVRKMIAKSEQEIGKATAKYFFYSNIMNFFKTEITLANGEIRKRPLIETNGETGEIVWDKGRDFATVRKVLSMPQVNIVKKTEVQTGGFSKESILPKRNSDKLIARKKDWDPKKYGGFDSPTVAYSVLVVAKVEKGKSKKLKSVKELLGITIMERSSFEKNPIDFLEAKGYKEVKKDLIIKLPKYSLFELENGRKRMLASAGELQKGNELALPSKYVNFLYLASHYEKLKGSPEDNEQKQLFVEQHKHYLDEIIEQISEFSKRVILADANLDKVLSAYNKHRDKPIREQAENIIHLFTLTNLGAPAAFKYFDTTIDRKRYTSTKEVLDATLIHQSITGLYETRIDLSQLGGDGGGGSGSSGGGGGTLNIEDEYRLHETSKGPDVPLGSTWLSDFPQAWAETGGMGLAVRQAPLIIPLKATSTPVSIKQYPMSQEARLGIKPHIQRLLDQGILVPCQSPWNTPLLPVKKPGTNDYRPVQDLREVNKRVEDIHPTVPNPYNLLSGLPPSHQWYTVLDLKDAFFCLRLHPTSQSLFAFEWRDPEMGISGQLTWTRLPQGFKNSPTLFNEALHRDLADFRIQHPDLILLQYVDDLLLAATSELDCQQGTRALLQTLGDLGYRASAKKAQICQKQVKYLGYLLKEGQRWLTEARKETVMGQPTPKTPRQLREFLGKAGFCRLFIPGFAEMAAPLYPLTKPGTLFEWGPDQQKAYQEIKQALLTAPALGLPDLTKPFELFVDEKQGYAKGVLTQKLGPWRRPVAYLSKKLDPVAAGWPPCLRMVAAIAVLTKDAGKLTMGQPLVILAPHAVEALVKQPPDRWLSNARMTHYQALLLDTDRVQFGPIVALNPATLLPLPEEGLQHDCLDILAEAHGTRPDLTDQPLPDADHTWYTDGSSFLQEGQRKAGAAVTTETEVVWAKALPAGTSAQRAELIALTQALKMAEGKKLNVYTDSRYAFATAHIHGEIYRRRGWLTSEGKEIKNKDEILALLKALFLPKRLSIIHCPGHQKGNRAEARGNRMADQAAREVATRETPETSTLLAGKRTADGSEFEKRTADGSEFESPKKKAKVE

SEQ ID NO: 2546 - protein, 2091 aa, synthetic construct
MPAAKRVKLDGGDKKYSIGLDIGTNSVGWAVITDEYKVPSKKFKVLGNTDRHSIKKNLIGALLFDSGETAEATRLKRTARRRYTRRKNRICYLQEIFSNEMAKVDDSFFHRLEESFLVEEDKKHERHPIFGNIVDEVAYHEKYPTIYHLRKKLVDSTDKADLRLIYLALAHMIKFRGHFLIEGDLNPDNSDVDKLFIQLVQTYNQLFEENPINASGVDAKAILSARLSKSRRLENLIAQLPGEKKNGLFGNLIALSLGLTPNFKSNFDLAEDAKLQLSKDTYDDDLDNLLAQIGDQYADLFLAAKNLSDAILLSDILRVNTEITKAPLSASMIKRYDEHHQDLTLLKALVRQQLPEKYKEIFFDQSKNGYAGYIDGGASQEEFYKFIKPILEKMDGTEELLVKLNREDLLRKQRTFDNGSIPHQIHLGELHAILRRQEDFYPFLKDNREKIEKILTFRIPYYVGPLARGNSRFAWMTRKSEETITPWNFEEVVDKGASAQSFIERMTNFDKNLPNEKVLPKHSLLYEYFTVYNELTKVKYVTEGMRKPAFLSGEQKKAIVDLLFKTNRKVTVKQLKEDYFKKIECFDSVEISGVEDRFNASLGTYHDLLKIIKDKDFLDNEENEDILEDIVLTLTLFEDREMIEERLKTYAHLFDDKVMKQLKRRRYTGWGRLSRKLINGIRDKQSGKTILDFLKSDGFANRNFMQLIHDDSLTFKEDIQKAQVSGQGDSLHEHIANLAGSPAIKKGILQTVKVVDELVKVMGRHKPENIVIEMARENQTTQKGQKNSRERMKRIEEGIKELGSQILKEHPVENTQLQNEKLYLYYLQNGRDMYVDQELDINRLSDYDVDHIVPQSFLKDDSIDNKVLTRSDKARGKSDNVPSEEVVKKMKNYWRQLLNAKLITQRKFDNLTKAERGGLSELDKAGFIKRQLVETRQITKHVAQILDSRMNTKYDENDKLIREVKVITLKSKLVSDFRKDFQFYKVREINNYHHAHDAYLNAVVGTALIKKYPKLESEFVYGDYKVYDVRKMIAKSEQEIGKATAKYFFYSNIMNFFKTEITLANGEIRKRPLIETNGETGEIVWDKGRDFATVRKVLSMPQVNIVKKTEVQTGGFSKESILPKRNSDKLIARKKDWDPKKYGGFDSPTVAYSVLVVAKVEKGKSKKLKSVKELLGITIMERSSFEKNPIDFLEAKGYKEVKKDLIIKLPKYSLFELENGRKRMLASAGELQKGNELALPSKYVNFLYLASHYEKLKGSPEDNEQKQLFVEQHKHYLDEIIEQISEFSKRVILADANLDKVLSAYNKHRDKPIREQAENIIHLFTLTNLGAPAAFKYFDTTIDRKRYTSTKEVLDATLIHQSITGLYETRIDLSQLGGDGGPAPGGSGGTLNIEDEYRLHETSKGPDVPLGSTWLSDFPQAWAETGGMGLAVRQAPLIIPLKATSTPVSIKQYPMSQEARLGIKPHIQRLLDQGILVPCQSPWNTPLLPVKKPGTNDYRPVQDLREVNKRVEDIHPTVPNPYNLLSGLPPSHQWYTVLDLKDAFFCLRLHPTSQSLFAFEWRDPEMGISGQLTWTRLPQGFKNSPTLFNEALHRDLADFRIQHPDLILLQYVDDLLLAATSELDCQQGTRALLQTLGDLGYRASAKKAQICQKQVKYLGYLLKEGQRWLTEARKETVMGQPTPKTPRQLREFLGKAGFCRLFIPGFAEMAAPLYPLTKPGTLFEWGPDQQKAYQEIKQALLTAPALGLPDLTKPFELFVDEKQGYAKGVLTQKLGPWRRPVAYLSKKLDPVAAGWPPCLRMVAAIAVLTKDAGKLTMGQPLVILAPHAVEALVKQPPDRWLSNARMTHYQALLLDTDRVQFGPIVALNPATLLPLPEEGLQHDCLDILAEAHGTRPDLTDQPLPDADHTWYTDGSSFLQEGQRKAGAAVTTETEVVWAKALPAGTSAQRAELIALTQALKMAEGKKLNVYTDSRYAFATAHIHGEIYRRRGWLTSEGKEIKNKDEILALLKALFLPKRLSIIHCPGHQKGNRAEARGNRMADQAAREVATRETPETSTLLAGKRTADGSEFEKRTADGSEFESPKKKAKVE

SEQ ID NO: 2547 - protein, 2091 aa, synthetic construct
MPAAKRVKLDGGDKKYSIGLDIGTNSVGWAVITDEYKVPSKKFKVLGNTDRHSIKKNLIGALLFDSGETAEATRLKRTARRRYTRRKNRICYLQEIFSNEMAKVDDSFFHRLEESFLVEEDKKHERHPIFGNIVDEVAYHEKYPTIYHLRKKLVDSTDKADLRLIYLALAHMIKFRGHFLIEGDLNPDNSDVDKLFIQLVQTYNQLFEENPINASGVDAKAILSARLSKSRRLENLIAQLPGEKKNGLFGNLIALSLGLTPNFKSNFDLAEDAKLQLSKDTYDDDLDNLLAQIGDQYADLFLAAKNLSDAILLSDILRVNTEITKAPLSASMIKRYDEHHQDLTLLKALVRQQLPEKYKEIFFDQSKNGYAGYIDGGASQEEFYKFIKPILEKMDGTEELLVKLNREDLLRKQRTFDNGSIPHQIHLGELHAILRRQEDFYPFLKDNREKIEKILTFRIPYYVGPLARGNSRFAWMTRKSEETITPWNFEEVVDKGASAQSFIERMTNFDKNLPNEKVLPKHSLLYEYFTVYNELTKVKYVTEGMRKPAFLSGEQKKAIVDLLFKTNRKVTVKQLKEDYFKKIECFDSVEISGVEDRFNASLGTYHDLLKIIKDKDFLDNEENEDILEDIVLTLTLFEDREMIEERLKTYAHLFDDKVMKQLKRRRYTGWGRLSRKLINGIRDKQSGKTILDFLKSDGFANRNFMQLIHDDSLTFKEDIQKAQVSGQGDSLHEHIANLAGSPAIKKGILQTVKVVDELVKVMGRHKPENIVIEMARENQTTQKGQKNSRERMKRIEEGIKELGSQILKEHPVENTQLQNEKLYLYYLQNGRDMYVDQELDINRLSDYDVDHIVPQSFLKDDSIDNKVLTRSDKARGKSDNVPSEEVVKKMKNYWRQLLNAKLITQRKFDNLTKAERGGLSELDKAGFIKRQLVETRQITKHVAQILDSRMNTKYDENDKLIREVKVITLKSKLVSDFRKDFQFYKVREINNYHHAHDAYLNAVVGTALIKKYPKLESEFVYGDYKVYDVRKMIAKSEQEIGKATAKYFFYSNIMNFFKTEITLANGEIRKRPLIETNGETGEIVWDKGRDFATVRKVLSMPQVNIVKKTEVQTGGFSKESILPKRNSDKLIARKKDWDPKKYGGFDSPTVAYSVLVVAKVEKGKSKKLKSVKELLGITIMERSSFEKNPIDFLEAKGYKEVKKDLIIKLPKYSLFELENGRKRMLASAGELQKGNELALPSKYVNFLYLASHYEKLKGSPEDNEQKQLFVEQHKHYLDEIIEQISEFSKRVILADANLDKVLSAYNKHRDKPIREQAENIIHLFTLTNLGAPAAFKYFDTTIDRKRYTSTKEVLDATLIHQSITGLYETRIDLSQLGGDGGGGGPAPGGTLNIEDEYRLHETSKGPDVPLGSTWLSDFPQAWAETGGMGLAVRQAPLIIPLKATSTPVSIKQYPMSQEARLGIKPHIQRLLDQGILVPCQSPWNTPLLPVKKPGTNDYRPVQDLREVNKRVEDIHPTVPNPYNLLSGLPPSHQWYTVLDLKDAFFCLRLHPTSQSLFAFEWRDPEMGISGQLTWTRLPQGFKNSPTLFNEALHRDLADFRIQHPDLILLQYVDDLLLAATSELDCQQGTRALLQTLGDLGYRASAKKAQICQKQVKYLGYLLKEGQRWLTEARKETVMGQPTPKTPRQLREFLGKAGFCRLFIPGFAEMAAPLYPLTKPGTLFEWGPDQQKAYQEIKQALLTAPALGLPDLTKPFELFVDEKQGYAKGVLTQKLGPWRRPVAYLSKKLDPVAAGWPPCLRMVAAIAVLTKDAGKLTMGQPLVILAPHAVEALVKQPPDRWLSNARMTHYQALLLDTDRVQFGPIVALNPATLLPLPEEGLQHDCLDILAEAHGTRPDLTDQPLPDADHTWYTDGSSFLQEGQRKAGAAVTTETEVVWAKALPAGTSAQRAELIALTQALKMAEGKKLNVYTDSRYAFATAHIHGEIYRRRGWLTSEGKEIKNKDEILALLKALFLPKRLSIIHCPGHQKGNRAEARGNRMADQAAREVATRETPETSTLLAGKRTADGSEFEKRTADGSEFESPKKKAKVE

SEQ ID NO: 2548 - protein, 2096 aa, synthetic construct
MPAAKRVKLDGGDKKYSIGLDIGTNSVGWAVITDEYKVPSKKFKVLGNTDRHSIKKNLIGALLFDSGETAEATRLKRTARRRYTRRKNRICYLQEIFSNEMAKVDDSFFHRLEESFLVEEDKKHERHPIFGNIVDEVAYHEKYPTIYHLRKKLVDSTDKADLRLIYLALAHMIKFRGHFLIEGDLNPDNSDVDKLFIQLVQTYNQLFEENPINASGVDAKAILSARLSKSRRLENLIAQLPGEKKNGLFGNLIALSLGLTPNFKSNFDLAEDAKLQLSKDTYDDDLDNLLAQIGDQYADLFLAAKNLSDAILLSDILRVNTEITKAPLSASMIKRYDEHHQDLTLLKALVRQQLPEKYKEIFFDQSKNGYAGYIDGGASQEEFYKFIKPILEKMDGTEELLVKLNREDLLRKQRTFDNGSIPHQIHLGELHAILRRQEDFYPFLKDNREKIEKILTFRIPYYVGPLARGNSRFAWMTRKSEETITPWNFEEVVDKGASAQSFIERMTNFDKNLPNEKVLPKHSLLYEYFTVYNELTKVKYVTEGMRKPAFLSGEQKKAIVDLLFKTNRKVTVKQLKEDYFKKIECFDSVEISGVEDRFNASLGTYHDLLKIIKDKDFLDNEENEDILEDIVLTLTLFEDREMIEERLKTYAHLFDDKVMKQLKRRRYTGWGRLSRKLINGIRDKQSGKTILDFLKSDGFANRNFMQLIHDDSLTFKEDIQKAQVSGQGDSLHEHIANLAGSPAIKKGILQTVKVVDELVKVMGRHKPENIVIEMARENQTTQKGQKNSRERMKRIEEGIKELGSQILKEHPVENTQLQNEKLYLYYLQNGRDMYVDQELDINRLSDYDVDHIVPQSFLKDDSIDNKVLTRSDKARGKSDNVPSEEVVKKMKNYWRQLLNAKLITQRKFDNLTKAERGGLSELDKAGFIKRQLVETRQITKHVAQILDSRMNTKYDENDKLIREVKVITLKSKLVSDFRKDFQFYKVREINNYHHAHDAYLNAVVGTALIKKYPKLESEFVYGDYKVYDVRKMIAKSEQEIGKATAKYFFYSNIMNFFKTEITLANGEIRKRPLIETNGETGEIVWDKGRDFATVRKVLSMPQVNIVKKTEVQTGGFSKESILPKRNSDKLIARKKDWDPKKYGGFDSPTVAYSVLVVAKVEKGKSKKLKSVKELLGITIMERSSFEKNPIDFLEAKGYKEVKKDLIIKLPKYSLFELENGRKRMLASAGELQKGNELALPSKYVNFLYLASHYEKLKGSPEDNEQKQLFVEQHKHYLDEIIEQISEFSKRVILADANLDKVLSAYNKHRDKPIREQAENIIHLFTLTNLGAPAAFKYFDTTIDRKRYTSTKEVLDATLIHQSITGLYETRIDLSQLGGDGGEAAAKGGSGSSGGTLNIEDEYRLHETSKGPDVPLGSTWLSDFPQAWAETGGMGLAVRQAPLIIPLKATSTPVSIKQYPMSQEARLGIKPHIQRLLDQGILVPCQSPWNTPLLPVKKPGTNDYRPVQDLREVNKRVEDIHPTVPNPYNLLSGLPPSHQWYTVLDLKDAFFCLRLHPTSQSLFAFEWRDPEMGISGQLTWTRLPQGFKNSPTLFNEALHRDLADFRIQHPDLILLQYVDDLLLAATSELDCQQGTRALLQTLGDLGYRASAKKAQICQKQVKYLGYLLKEGQRWLTEARKETVMGQPTPKTPRQLREFLGKAGFCRLFIPGFAEMAAPLYPLTKPGTLFEWGPDQQKAYQEIKQALLTAPALGLPDLTKPFELFVDEKQGYAKGVLTQKLGPWRRPVAYLSKKLDPVAAGWPPCLRMVAAIAVLTKDAGKLTMGQPLVILAPHAVEALVKQPPDRWLSNARMTHYQALLLDTDRVQFGPIVALNPATLLPLPEEGLQHDCLDILAEAHGTRPDLTDQPLPDADHTWYTDGSSFLQEGQRKAGAAVTTETEVVWAKALPAGTSAQRAELIALTQALKMAEGKKLNVYTDSRYAFATAHIHGEIYRRRGWLTSEGKEIKNKDEILALLKALFLPKRLSIIHCPGHQKGNRAEARGNRMADQAAREVATRETPETSTLLAGKRTADGSEFEKRTADGSEFESPKKKAKVE

SEQ ID NO: 2549 - protein, 2093 aa, synthetic construct
MPAAKRVKLDGGDKKYSIGLDIGTNSVGWAVITDEYKVPSKKFKVLGNTDRHSIKKNLIGALLFDSGETAEATRLKRTARRRYTRRKNRICYLQEIFSNEMAKVDDSFFHRLEESFLVEEDKKHERHPIFGNIVDEVAYHEKYPTIYHLRKKLVDSTDKADLRLIYLALAHMIKFRGHFLIEGDLNPDNSDVDKLFIQLVQTYNQLFEENPINASGVDAKAILSARLSKSRRLENLIAQLPGEKKNGLFGNLIALSLGLTPNFKSNFDLAEDAKLQLSKDTYDDDLDNLLAQIGDQYADLFLAAKNLSDAILLSDILRVNTEITKAPLSASMIKRYDEHHQDLTLLKALVRQQLPEKYKEIFFDQSKNGYAGYIDGGASQEEFYKFIKPILEKMDGTEELLVKLNREDLLRKQRTFDNGSIPHQIHLGELHAILRRQEDFYPFLKDNREKIEKILTFRIPYYVGPLARGNSRFAWMTRKSEETITPWNFEEVVDKGASAQSFIERMTNFDKNLPNEKVLPKHSLLYEYFTVYNELTKVKYVTEGMRKPAFLSGEQKKAIVDLLFKTNRKVTVKQLKEDYFKKIECFDSVEISGVEDRFNASLGTYHDLLKIIKDKDFLDNEENEDILEDIVLTLTLFEDREMIEERLKTYAHLFDDKVMKQLKRRRYTGWGRLSRKLINGIRDKQSGKTILDFLKSDGFANRNFMQLIHDDSLTFKEDIQKAQVSGQGDSLHEHIANLAGSPAIKKGILQTVKVVDELVKVMGRHKPENIVIEMARENQTTQKGQKNSRERMKRIEEGIKELGSQILKEHPVENTQLQNEKLYLYYLQNGRDMYVDQELDINRLSDYDVDHIVPQSFLKDDSIDNKVLTRSDKARGKSDNVPSEEVVKKMKNYWRQLLNAKLITQRKFDNLTKAERGGLSELDKAGFIKRQLVETRQITKHVAQILDSRMNTKYDENDKLIREVKVITLKSKLVSDFRKDFQFYKVREINNYHHAHDAYLNAVVGTALIKKYPKLESEFVYGDYKVYDVRKMIAKSEQEIGKATAKYFFYSNIMNFFKTEITLANGEIRKRPLIETNGETGEIVWDKGRDFATVRKVLSMPQVNIVKKTEVQTGGFSKESILPKRNSDKLIARKKDWDPKKYGGFDSPTVAYSVLVVAKVEKGKSKKLKSVKELLGITIMERSSFEKNPIDFLEAKGYKEVKKDLIIKLPKYSLFELENGRKRMLASAGELQKGNELALPSKYVNFLYLASHYEKLKGSPEDNEQKQLFVEQHKHYLDEIIEQISEFSKRVILADANLDKVLSAYNKHRDKPIREQAENIIHLFTLTNLGAPAAFKYFDTTIDRKRYTSTKEVLDATLIHQSITGLYETRIDLSQLGGDGGGGGGGGGGGGTLNIEDEYRLHETSKGPDVPLGSTWLSDFPQAWAETGGMGLAVRQAPLIIPLKATSTPVSIKQYPMSQEARLGIKPHIQRLLDQGILVPCQSPWNTPLLPVKKPGTNDYRPVQDLREVNKRVEDIHPTVPNPYNLLSGLPPSHQWYTVLDLKDAFFCLRLHPTSQSLFAFEWRDPEMGISGQLTWTRLPQGFKNSPTLFNEALHRDLADFRIQHPDLILLQYVDDLLLAATSELDCQQGTRALLQTLGDLGYRASAKKAQICQKQVKYLGYLLKEGQRWLTEARKETVMGQPTPKTPRQLREFLGKAGFCRLFIPGFAEMAAPLYPLTKPGTLFEWGPDQQKAYQEIKQALLTAPALGLPDLTKPFELFVDEKQGYAKGVLTQKLGPWRRPVAYLSKKLDPVAAGWPPCLRMVAAIAVLTKDAGKLTMGQPLVILAPHAVEALVKQPPDRWLSNARMTHYQALLLDTDRVQFGPIVALNPATLLPLPEEGLQHDCLDILAEAHGTRPDLTDQPLPDADHTWYTDGSSFLQEGQRKAGAAVTTETEVVWAKALPAGTSAQRAELIALTQALKMAEGKKLNVYTDSRYAFATAHIHGEIYRRRGWLTSEGKEIKNKDEILALLKALFLPKRLSIIHCPGHQKGNRAEARGNRMADQAAREVATRETPETSTLLAGKRTADGSEFEKRTADGSEFESPKKKAKVE

SEQ ID NO: 2550 - protein, 2096 aa, synthetic construct
MPAAKRVKLDGGDKKYSIGLDIGTNSVGWAVITDEYKVPSKKFKVLGNTDRHSIKKNLIGALLFDSGETAEATRLKRTARRRYTRRKNRICYLQEIFSNEMAKVDDSFFHRLEESFLVEEDKKHERHPIFGNIVDEVAYHEKYPTIYHLRKKLVDSTDKADLRLIYLALAHMIKFRGHFLIEGDLNPDNSDVDKLFIQLVQTYNQLFEENPINASGVDAKAILSARLSKSRRLENLIAQLPGEKKNGLFGNLIALSLGLTPNFKSNFDLAEDAKLQLSKDTYDDDLDNLLAQIGDQYADLFLAAKNLSDAILLSDILRVNTEITKAPLSASMIKRYDEHHQDLTLLKALVRQQLPEKYKEIFFDQSKNGYAGYIDGGASQEEFYKFIKPILEKMDGTEELLVKLNREDLLRKQRTFDNGSIPHQIHLGELHAILRRQEDFYPFLKDNREKIEKILTFRIPYYVGPLARGNSRFAWMTRKSEETITPWNFEEVVDKGASAQSFIERMTNFDKNLPNEKVLPKHSLLYEYFTVYNELTKVKYVTEGMRKPAFLSGEQKKAIVDLLFKTNRKVTVKQLKEDYFKKIECFDSVEISGVEDRFNASLGTYHDLLKIIKDKDFLDNEENEDILEDIVLTLTLFEDREMIEERLKTYAHLFDDKVMKQLKRRRYTGWGRLSRKLINGIRDKQSGKTILDFLKSDGFANRNFMQLIHDDSLTFKEDIQKAQVSGQGDSLHEHIANLAGSPAIKKGILQTVKVVDELVKVMGRHKPENIVIEMARENQTTQKGQKNSRERMKRIEEGIKELGSQILKEHPVENTQLQNEKLYLYYLQNGRDMYVDQELDINRLSDYDVDHIVPQSFLKDDSIDNKVLTRSDKARGKSDNVPSEEVVKKMKNYWRQLLNAKLITQRKFDNLTKAERGGLSELDKAGFIKRQLVETRQITKHVAQILDSRMNTKYDENDKLIREVKVITLKSKLVSDFRKDFQFYKVREINNYHHAHDAYLNAVVGTALIKKYPKLESEFVYGDYKVYDVRKMIAKSEQEIGKATAKYFFYSNIMNFFKTEITLANGEIRKRPLIETNGETGEIVWDKGRDFATVRKVLSMPQVNIVKKTEVQTGGFSKESILPKRNSDKLIARKKDWDPKKYGGFDSPTVAYSVLVVAKVEKGKSKKLKSVKELLGITIMERSSFEKNPIDFLEAKGYKEVKKDLIIKLPKYSLFELENGRKRMLASAGELQKGNELALPSKYVNFLYLASHYEKLKGSPEDNEQKQLFVEQHKHYLDEIIEQISEFSKRVILADANLDKVLSAYNKHRDKPIREQAENIIHLFTLTNLGAPAAFKYFDTTIDRKRYTSTKEVLDATLIHQSITGLYETRIDLSQLGGDGGGSSEAAAKGGGGGTLNIEDEYRLHETSKGPDVPLGSTWLSDFPQAWAETGGMGLAVRQAPLIIPLKATSTPVSIKQYPMSQEARLGIKPHIQRLLDQGILVPCQSPWNTPLLPVKKPGTNDYRPVQDLREVNKRVEDIHPTVPNPYNLLSGLPPSHQWYTVLDLKDAFFCLRLHPTSQSLFAFEWRDPEMGISGQLTWTRLPQGFKNSPTLFNEALHRDLADFRIQHPDLILLQYVDDLLLAATSELDCQQGTRALLQTLGDLGYRASAKKAQICQKQVKYLGYLLKEGQRWLTEARKETVMGQPTPKTPRQLREFLGKAGFCRLFIPGFAEMAAPLYPLTKPGTLFEWGPDQQKAYQEIKQALLTAPALGLPDLTKPFELFVDEKQGYAKGVLTQKLGPWRRPVAYLSKKLDPVAAGWPPCLRMVAAIAVLTKDAGKLTMGQPLVILAPHAVEALVKQPPDRWLSNARMTHYQALLLDTDRVQFGPIVALNPATLLPLPEEGLQHDCLDILAEAHGTRPDLTDQPLPDADHTWYTDGSSFLQEGQRKAGAAVTTETEVVWAKALPAGTSAQRAELIALTQALKMAEGKKLNVYTDSRYAFATAHIHGEIYRRRGWLTSEGKEIKNKDEILALLKALFLPKRLSIIHCPGHQKGNRAEARGNRMADQAAREVATRETPETSTLLAGKRTADGSEFEKRTADGSEFESPKKKAKVE

SEQ ID NO: 2551 - protein, 2096 aa, synthetic construct
MPAAKRVKLDGGDKKYSIGLDIGTNSVGWAVITDEYKVPSKKFKVLGNTDRHSIKKNLIGALLFDSGETAEATRLKRTARRRYTRRKNRICYLQEIFSNEMAKVDDSFFHRLEESFLVEEDKKHERHPIFGNIVDEVAYHEKYPTIYHLRKKLVDSTDKADLRLIYLALAHMIKFRGHFLIEGDLNPDNSDVDKLFIQLVQTYNQLFEENPINASGVDAKAILSARLSKSRRLENLIAQLPGEKKNGLFGNLIALSLGLTPNFKSNFDLAEDAKLQLSKDTYDDDLDNLLAQIGDQYADLFLAAKNLSDAILLSDILRVNTEITKAPLSASMIKRYDEHHQDLTLLKALVRQQLPEKYKEIFFDQSKNGYAGYIDGGASQEEFYKFIKPILEKMDGTEELLVKLNREDLLRKQRTFDNGSIPHQIHLGELHAILRRQEDFYPFLKDNREKIEKILTFRIPYYVGPLARGNSRFAWMTRKSEETITPWNFEEVVDKGASAQSFIERMTNFDKNLPNEKVLPKHSLLYEYFTVYNELTKVKYVTEGMRKPAFLSGEQKKAIVDLLFKTNRKVTVKQLKEDYFKKIECFDSVEISGVEDRFNASLGTYHDLLKIIKDKDFLDNEENEDILEDIVLTLTLFEDREMIEERLKTYAHLFDDKVMKQLKRRRYTGWGRLSRKLINGIRDKQSGKTILDFLKSDGFANRNFMQLIHDDSLTFKEDIQKAQVSGQGDSLHEHIANLAGSPAIKKGILQTVKVVDELVKVMGRHKPENIVIEMARENQTTQKGQKNSRERMKRIEEGIKELGSQILKEHPVENTQLQNEKLYLYYLQNGRDMYVDQELDINRLSDYDVDHIVPQSFLKDDSIDNKVLTRSDKARGKSDNVPSEEVVKKMKNYWRQLLNAKLITQRKFDNLTKAERGGLSELDKAGFIKRQLVETRQITKHVAQILDSRMNTKYDENDKLIREVKVITLKSKLVSDFRKDFQFYKVREINNYHHAHDAYLNAVVGTALIKKYPKLESEFVYGDYKVYDVRKMIAKSEQEIGKATAKYFFYSNIMNFFKTEITLANGEIRKRPLIETNGETGEIVWDKGRDFATVRKVLSMPQVNIVKKTEVQTGGFSKESILPKRNSDKLIARKKDWDPKKYGGFDSPTVAYSVLVVAKVEKGKSKKLKSVKELLGITIMERSSFEKNPIDFLEAKGYKEVKKDLIIKLPKYSLFELENGRKRMLASAGELQKGNELALPSKYVNFLYLASHYEKLKGSPEDNEQKQLFVEQHKHYLDEIIEQISEFSKRVILADANLDKVLSAYNKHRDKPIREQAENIIHLFTLTNLGAPAAFKYFDTTIDRKRYTSTKEVLDATLIHQSITGLYETRIDLSQLGGDGGEAAAKGGSGGGGGTLNIEDEYRLHETSKGPDVPLGSTWLSDFPQAWAETGGMGLAVRQAPLIIPLKATSTPVSIKQYPMSQEARLGIKPHIQRLLDQGILVPCQSPWNTPLLPVKKPGTNDYRPVQDLREVNKRVEDIHPTVPNPYNLLSGLPPSHQWYTVLDLKDAFFCLRLHPTSQSLFAFEWRDPEMGISGQLTWTRLPQGFKNSPTLFNEALHRDLADFRIQHPDLILLQYVDDLLLAATSELDCQQGTRALLQTLGDLGYRASAKKAQICQKQVKYLGYLLKEGQRWLTEARKETVMGQPTPKTPRQLREFLGKAGFCRLFIPGFAEMAAPLYPLTKPGTLFEWGPDQQKAYQEIKQALLTAPALGLPDLTKPFELFVDEKQGYAKGVLTQKLGPWRRPVAYLSKKLDPVAAGWPPCLRMVAAIAVLTKDAGKLTMGQPLVILAPHAVEALVKQPPDRWLSNARMTHYQALLLDTDRVQFGPIVALNPATLLPLPEEGLQHDCLDILAEAHGTRPDLTDQPLPDADHTWYTDGSSFLQEGQRKAGAAVTTETEVVWAKALPAGTSAQRAELIALTQALKMAEGKKLNVYTDSRYAFATAHIHGEIYRRRGWLTSEGKEIKNKDEILALLKALFLPKRLSIIHCPGHQKGNRAEARGNRMADQAAREVATRETPETSTLLAGKRTADGSEFEKRTADGSEFESPKKKAKVE

SEQ ID NO: 2552 - protein, 2094 aa, synthetic construct
MPAAKRVKLDGGDKKYSIGLDIGTNSVGWAVITDEYKVPSKKFKVLGNTDRHSIKKNLIGALLFDSGETAEATRLKRTARRRYTRRKNRICYLQEIFSNEMAKVDDSFFHRLEESFLVEEDKKHERHPIFGNIVDEVAYHEKYPTIYHLRKKLVDSTDKADLRLIYLALAHMIKFRGHFLIEGDLNPDNSDVDKLFIQLVQTYNQLFEENPINASGVDAKAILSARLSKSRRLENLIAQLPGEKKNGLFGNLIALSLGLTPNFKSNFDLAEDAKLQLSKDTYDDDLDNLLAQIGDQYADLFLAAKNLSDAILLSDILRVNTEITKAPLSASMIKRYDEHHQDLTLLKALVRQQLPEKYKEIFFDQSKNGYAGYIDGGASQEEFYKFIKPILEKMDGTEELLVKLNREDLLRKQRTFDNGSIPHQIHLGELHAILRRQEDFYPFLKDNREKIEKILTFRIPYYVGPLARGNSRFAWMTRKSEETITPWNFEEVVDKGASAQSFIERMTNFDKNLPNEKVLPKHSLLYEYFTVYNELTKVKYVTEGMRKPAFLSGEQKKAIVDLLFKTNRKVTVKQLKEDYFKKIECFDSVEISGVEDRFNASLGTYHDLLKIIKDKDFLDNEENEDILEDIVLTLTLFEDREMIEERLKTYAHLFDDKVMKQLKRRRYTGWGRLSRKLINGIRDKQSGKTILDFLKSDGFANRNFMQLIHDDSLTFKEDIQKAQVSGQGDSLHEHIANLAGSPAIKKGILQTVKVVDELVKVMGRHKPENIVIEMARENQTTQKGQKNSRERMKRIEEGIKELGSQILKEHPVENTQLQNEKLYLYYLQNGRDMYVDQELDINRLSDYDVDHIVPQSFLKDDSIDNKVLTRSDKARGKSDNVPSEEVVKKMKNYWRQLLNAKLITQRKFDNLTKAERGGLSELDKAGFIKRQLVETRQITKHVAQILDSRMNTKYDENDKLIREVKVITLKSKLVSDFRKDFQFYKVREINNYHHAHDAYLNAVVGTALIKKYPKLESEFVYGDYKVYDVRKMIAKSEQEIGKATAKYFFYSNIMNFFKTEITLANGEIRKRPLIETNGETGEIVWDKGRDFATVRKVLSMPQVNIVKKTEVQTGGFSKESILPKRNSDKLIARKKDWDPKKYGGFDSPTVAYSVLVVAKVEKGKSKKLKSVKELLGITIMERSSFEKNPIDFLEAKGYKEVKKDLIIKLPKYSLFELENGRKRMLASAGELQKGNELALPSKYVNFLYLASHYEKLKGSPEDNEQKQLFVEQHKHYLDEIIEQISEFSKRVILADANLDKVLSAYNKHRDKPIREQAENIIHLFTLTNLGAPAAFKYFDTTIDRKRYTSTKEVLDATLIHQSITGLYETRIDLSQLGGDGGGSSPAPGGSGGTLNIEDEYRLHETSKGPDVPLGSTWLSDFPQAWAETGGMGLAVRQAPLIIPLKATSTPVSIKQYPMSQEARLGIKPHIQRLLDQGILVPCQSPWNTPLLPVKKPGTNDYRPVQDLREVNKRVEDIHPTVPNPYNLLSGLPPSHQWYTVLDLKDAFFCLRLHPTSQSLFAFEWRDPEMGISGQLTWTRLPQGFKNSPTLFNEALHRDLADFRIQHPDLILLQYVDDLLLAATSELDCQQGTRALLQTLGDLGYRASAKKAQICQKQVKYLGYLLKEGQRWLTEARKETVMGQPTPKTPRQLREFLGKAGFCRLFIPGFAEMAAPLYPLTKPGTLFEWGPDQQKAYQEIKQALLTAPALGLPDLTKPFELFVDEKQGYAKGVLTQKLGPWRRPVAYLSKKLDPVAAGWPPCLRMVAAIAVLTKDAGKLTMGQPLVILAPHAVEALVKQPPDRWLSNARMTHYQALLLDTDRVQFGPIVALNPATLLPLPEEGLQHDCLDILAEAHGTRPDLTDQPLPDADHTWYTDGSSFLQEGQRKAGAAVTTETEVVWAKALPAGTSAQRAELIALTQALKMAEGKKLNVYTDSRYAFATAHIHGEIYRRRGWLTSEGKEIKNKDEILALLKALFLPKRLSIIHCPGHQKGNRAEARGNRMADQAAREVATRETPETSTLLAGKRTADGSEFEKRTADGSEFESPKKKAKVE

SEQ ID NO: 2553 - protein, 2096 aa, synthetic construct
MPAAKRVKLDGGDKKYSIGLDIGTNSVGWAVITDEYKVPSKKFKVLGNTDRHSIKKNLIGALLFDSGETAEATRLKRTARRRYTRRKNRICYLQEIFSNEMAKVDDSFFHRLEESFLVEEDKKHERHPIFGNIVDEVAYHEKYPTIYHLRKKLVDSTDKADLRLIYLALAHMIKFRGHFLIEGDLNPDNSDVDKLFIQLVQTYNQLFEENPINASGVDAKAILSARLSKSRRLENLIAQLPGEKKNGLFGNLIALSLGLTPNFKSNFDLAEDAKLQLSKDTYDDDLDNLLAQIGDQYADLFLAAKNLSDAILLSDILRVNTEITKAPLSASMIKRYDEHHQDLTLLKALVRQQLPEKYKEIFFDQSKNGYAGYIDGGASQEEFYKFIKPILEKMDGTEELLVKLNREDLLRKQRTFDNGSIPHQIHLGELHAILRRQEDFYPFLKDNREKIEKILTFRIPYYVGPLARGNSRFAWMTRKSEETITPWNFEEVVDKGASAQSFIERMTNFDKNLPNEKVLPKHSLLYEYFTVYNELTKVKYVTEGMRKPAFLSGEQKKAIVDLLFKTNRKVTVKQLKEDYFKKIECFDSVEISGVEDRFNASLGTYHDLLKIIKDKDFLDNEENEDILEDIVLTLTLFEDREMIEERLKTYAHLFDDKVMKQLKRRRYTGWGRLSRKLINGIRDKQSGKTILDFLKSDGFANRNFMQLIHDDSLTFKEDIQKAQVSGQGDSLHEHIANLAGSPAIKKGILQTVKVVDELVKVMGRHKPENIVIEMARENQTTQKGQKNSRERMKRIEEGIKELGSQILKEHPVENTQLQNEKLYLYYLQNGRDMYVDQELDINRLSDYDVDHIVPQSFLKDDSIDNKVLTRSDKARGKSDNVPSEEVVKKMKNYWRQLLNAKLITQRKFDNLTKAERGGLSELDKAGFIKRQLVETRQITKHVAQILDSRMNTKYDENDKLIREVKVITLKSKLVSDFRKDFQFYKVREINNYHHAHDAYLNAVVGTALIKKYPKLESEFVYGDYKVYDVRKMIAKSEQEIGKATAKYFFYSNIMNFFKTEITLANGEIRKRPLIETNGETGEIVWDKGRDFATVRKVLSMPQVNIVKKTEVQTGGFSKESILPKRNSDKLIARKKDWDPKKYGGFDSPTVAYSVLVVAKVEKGKSKKLKSVKELLGITIMERSSFEKNPIDFLEAKGYKEVKKDLIIKLPKYSLFELENGRKRMLASAGELQKGNELALPSKYVNFLYLASHYEKLKGSPEDNEQKQLFVEQHKHYLDEIIEQISEFSKRVILADANLDKVLSAYNKHRDKPIREQAENIIHLFTLTNLGAPAAFKYFDTTIDRKRYTSTKEVLDATLIHQSITGLYETRIDLSQLGGDGGGSSEAAAKGGSGGTLNIEDEYRLHETSKGPDVPLGSTWLSDFPQAWAETGGMGLAVRQAPLIIPLKATSTPVSIKQYPMSQEARLGIKPHIQRLLDQGILVPCQSPWNTPLLPVKKPGTNDYRPVQDLREVNKRVEDIHPTVPNPYNLLSGLPPSHQWYTVLDLKDAFFCLRLHPTSQSLFAFEWRDPEMGISGQLTWTRLPQGFKNSPTLFNEALHRDLADFRIQHPDLILLQYVDDLLLAATSELDCQQGTRALLQTLGDLGYRASAKKAQICQKQVKYLGYLLKEGQRWLTEARKETVMGQPTPKTPRQLREFLGKAGFCRLFIPGFAEMAAPLYPLTKPGTLFEWGPDQQKAYQEIKQALLTAPALGLPDLTKPFELFVDEKQGYAKGVLTQKLGPWRRPVAYLSKKLDPVAAGWPPCLRMVAAIAVLTKDAGKLTMGQPLVILAPHAVEALVKQPPDRWLSNARMTHYQALLLDTDRVQFGPIVALNPATLLPLPEEGLQHDCLDILAEAHGTRPDLTDQPLPDADHTWYTDGSSFLQEGQRKAGAAVTTETEVVWAKALPAGTSAQRAELIALTQALKMAEGKKLNVYTDSRYAFATAHIHGEIYRRRGWLTSEGKEIKNKDEILALLKALFLPKRLSIIHCPGHQKGNRAEARGNRMADQAAREVATRETPETSTLLAGKRTADGSEFEKRTADGSEFESPKKKAKVE

SEQ ID NO: 2554 - protein, 2094 aa, synthetic construct
MPAAKRVKLDGGDKKYSIGLDIGTNSVGWAVITDEYKVPSKKFKVLGNTDRHSIKKNLIGALLFDSGETAEATRLKRTARRRYTRRKNRICYLQEIFSNEMAKVDDSFFHRLEESFLVEEDKKHERHPIFGNIVDEVAYHEKYPTIYHLRKKLVDSTDKADLRLIYLALAHMIKFRGHFLIEGDLNPDNSDVDKLFIQLVQTYNQLFEENPINASGVDAKAILSARLSKSRRLENLIAQLPGEKKNGLFGNLIALSLGLTPNFKSNFDLAEDAKLQLSKDTYDDDLDNLLAQIGDQYADLFLAAKNLSDAILLSDILRVNTEITKAPLSASMIKRYDEHHQDLTLLKALVRQQLPEKYKEIFFDQSKNGYAGYIDGGASQEEFYKFIKPILEKMDGTEELLVKLNREDLLRKQRTFDNGSIPHQIHLGELHAILRRQEDFYPFLKDNREKIEKILTFRIPYYVGPLARGNSRFAWMTRKSEETITPWNFEEVVDKGASAQSFIERMTNFDKNLPNEKVLPKHSLLYEYFTVYNELTKVKYVTEGMRKPAFLSGEQKKAIVDLLFKTNRKVTVKQLKEDYFKKIECFDSVEISGVEDRFNASLGTYHDLLKIIKDKDFLDNEENEDILEDIVLTLTLFEDREMIEERLKTYAHLFDDKVMKQLKRRRYTGWGRLSRKLINGIRDKQSGKTILDFLKSDGFANRNFMQLIHDDSLTFKEDIQKAQVSGQGDSLHEHIANLAGSPAIKKGILQTVKVVDELVKVMGRHKPENIVIEMARENQTTQKGQKNSRERMKRIEEGIKELGSQILKEHPVENTQLQNEKLYLYYLQNGRDMYVDQELDINRLSDYDVDHIVPQSFLKDDSIDNKVLTRSDKARGKSDNVPSEEVVKKMKNYWRQLLNAKLITQRKFDNLTKAERGGLSELDKAGFIKRQLVETRQITKHVAQILDSRMNTKYDENDKLIREVKVITLKSKLVSDFRKDFQFYKVREINNYHHAHDAYLNAVVGTALIKKYPKLESEFVYGDYKVYDVRKMIAKSEQEIGKATAKYFFYSNIMNFFKTEITLANGEIRKRPLIETNGETGEIVWDKGRDFATVRKVLSMPQVNIVKKTEVQTGGFSKESILPKRNSDKLIARKKDWDPKKYGGFDSPTVAYSVLVVAKVEKGKSKKLKSVKELLGITIMERSSFEKNPIDFLEAKGYKEVKKDLIIKLPKYSLFELENGRKRMLASAGELQKGNELALPSKYVNFLYLASHYEKLKGSPEDNEQKQLFVEQHKHYLDEIIEQISEFSKRVILADANLDKVLSAYNKHRDKPIREQAENIIHLFTLTNLGAPAAFKYFDTTIDRKRYTSTKEVLDATLIHQSITGLYETRIDLSQLGGDGGGSSGGGPAPGGTLNIEDEYRLHETSKGPDVPLGSTWLSDFPQAWAETGGMGLAVRQAPLIIPLKATSTPVSIKQYPMSQEARLGIKPHIQRLLDQGILVPCQSPWNTPLLPVKKPGTNDYRPVQDLREVNKRVEDIHPTVPNPYNLLSGLPPSHQWYTVLDLKDAFFCLRLHPTSQSLFAFEWRDPEMGISGQLTWTRLPQGFKNSPTLFNEALHRDLADFRIQHPDLILLQYVDDLLLAATSELDCQQGTRALLQTLGDLGYRASAKKAQICQKQVKYLGYLLKEGQRWLTEARKETVMGQPTPKTPRQLREFLGKAGFCRLFIPGFAEMAAPLYPLTKPGTLFEWGPDQQKAYQEIKQALLTAPALGLPDLTKPFELFVDEKQGYAKGVLTQKLGPWRRPVAYLSKKLDPVAAGWPPCLRMVAAIAVLTKDAGKLTMGQPLVILAPHAVEALVKQPPDRWLSNARMTHYQALLLDTDRVQFGPIVALNPATLLPLPEEGLQHDCLDILAEAHGTRPDLTDQPLPDADHTWYTDGSSFLQEGQRKAGAAVTTETEVVWAKALPAGTSAQRAELIALTQALKMAEGKKLNVYTDSRYAFATAHIHGEIYRRRGWLTSEGKEIKNKDEILALLKALFLPKRLSIIHCPGHQKGNRAEARGNRMADQAAREVATRETPETSTLLAGKRTADGSEFEKRTADGSEFESPKKKAKVE

SEQ ID NO: 2555 - protein, 2100 aa, synthetic construct
MPAAKRVKLDGGDKKYSIGLDIGTNSVGWAVITDEYKVPSKKFKVLGNTDRHSIKKNLIGALLFDSGETAEATRLKRTARRRYTRRKNRICYLQEIFSNEMAKVDDSFFHRLEESFLVEEDKKHERHPIFGNIVDEVAYHEKYPTIYHLRKKLVDSTDKADLRLIYLALAHMIKFRGHFLIEGDLNPDNSDVDKLFIQLVQTYNQLFEENPINASGVDAKAILSARLSKSRRLENLIAQLPGEKKNGLFGNLIALSLGLTPNFKSNFDLAEDAKLQLSKDTYDDDLDNLLAQIGDQYADLFLAAKNLSDAILLSDILRVNTEITKAPLSASMIKRYDEHHQDLTLLKALVRQQLPEKYKEIFFDQSKNGYAGYIDGGASQEEFYKFIKPILEKMDGTEELLVKLNREDLLRKQRTFDNGSIPHQIHLGELHAILRRQEDFYPFLKDNREKIEKILTFRIPYYVGPLARGNSRFAWMTRKSEETITPWNFEEVVDKGASAQSFIERMTNFDKNLPNEKVLPKHSLLYEYFTVYNELTKVKYVTEGMRKPAFLSGEQKKAIVDLLFKTNRKVTVKQLKEDYFKKIECFDSVEISGVEDRFNASLGTYHDLLKIIKDKDFLDNEENEDILEDIVLTLTLFEDREMIEERLKTYAHLFDDKVMKQLKRRRYTGWGRLSRKLINGIRDKQSGKTILDFLKSDGFANRNFMQLIHDDSLTFKEDIQKAQVSGQGDSLHEHIANLAGSPAIKKGILQTVKVVDELVKVMGRHKPENIVIEMARENQTTQKGQKNSRERMKRIEEGIKELGSQILKEHPVENTQLQNEKLYLYYLQNGRDMYVDQELDINRLSDYDVDHIVPQSFLKDDSIDNKVLTRSDKARGKSDNVPSEEVVKKMKNYWRQLLNAKLITQRKFDNLTKAERGGLSELDKAGFIKRQLVETRQITKHVAQILDSRMNTKYDENDKLIREVKVITLKSKLVSDFRKDFQFYKVREINNYHHAHDAYLNAVVGTALIKKYPKLESEFVYGDYKVYDVRKMIAKSEQEIGKATAKYFFYSNIMNFFKTEITLANGEIRKRPLIETNGETGEIVWDKGRDFATVRKVLSMPQVNIVKKTEVQTGGFSKESILPKRNSDKLIARKKDWDPKKYGGFDSPTVAYSVLVVAKVEKGKSKKLKSVKELLGITIMERSSFEKNPIDFLEAKGYKEVKKDLIIKLPKYSLFELENGRKRMLASAGELQKGNELALPSKYVNFLYLASHYEKLKGSPEDNEQKQLFVEQHKHYLDEIIEQISEFSKRVILADANLDKVLSAYNKHRDKPIREQAENIIHLFTLTNLGAPAAFKYFDTTIDRKRYTSTKEVLDATLIHQSITGLYETRIDLSQLGGDGGGGSGGSGGSGGSGGSGGTLNIEDEYRLHETSKGPDVPLGSTWLSDFPQAWAETGGMGLAVRQAPLIIPLKATSTPVSIKQYPMSQEARLGIKPHIQRLLDQGILVPCQSPWNTPLLPVKKPGTNDYRPVQDLREVNKRVEDIHPTVPNPYNLLSGLPPSHQWYTVLDLKDAFFCLRLHPTSQSLFAFEWRDPEMGISGQLTWTRLPQGFKNSPTLFNEALHRDLADFRIQHPDLILLQYVDDLLLAATSELDCQQGTRALLQTLGDLGYRASAKKAQICQKQVKYLGYLLKEGQRWLTEARKETVMGQPTPKTPRQLREFLGKAGFCRLFIPGFAEMAAPLYPLTKPGTLFEWGPDQQKAYQEIKQALLTAPALGLPDLTKPFELFVDEKQGYAKGVLTQKLGPWRRPVAYLSKKLDPVAAGWPPCLRMVAAIAVLTKDAGKLTMGQPLVILAPHAVEALVKQPPDRWLSNARMTHYQALLLDTDRVQFGPIVALNPATLLPLPEEGLQHDCLDILAEAHGTRPDLTDQPLPDADHTWYTDGSSFLQEGQRKAGAAVTTETEVVWAKALPAGTSAQRAELIALTQALKMAEGKKLNVYTDSRYAFATAHIHGEIYRRRGWLTSEGKEIKNKDEILALLKALFLPKRLSIIHCPGHQKGNRAEARGNRMADQAAREVATRETPETSTLLAGKRTADGSEFEKRTADGSEFESPKKKAKVE

SEQ ID NO: 2556 - protein, 2096 aa, synthetic construct
MPAAKRVKLDGGDKKYSIGLDIGTNSVGWAVITDEYKVPSKKFKVLGNTDRHSIKKNLIGALLFDSGETAEATRLKRTARRRYTRRKNRICYLQEIFSNEMAKVDDSFFHRLEESFLVEEDKKHERHPIFGNIVDEVAYHEKYPTIYHLRKKLVDSTDKADLRLIYLALAHMIKFRGHFLIEGDLNPDNSDVDKLFIQLVQTYNQLFEENPINASGVDAKAILSARLSKSRRLENLIAQLPGEKKNGLFGNLIALSLGLTPNFKSNFDLAEDAKLQLSKDTYDDDLDNLLAQIGDQYADLFLAAKNLSDAILLSDILRVNTEITKAPLSASMIKRYDEHHQDLTLLKALVRQQLPEKYKEIFFDQSKNGYAGYIDGGASQEEFYKFIKPILEKMDGTEELLVKLNREDLLRKQRTFDNGSIPHQIHLGELHAILRRQEDFYPFLKDNREKIEKILTFRIPYYVGPLARGNSRFAWMTRKSEETITPWNFEEVVDKGASAQSFIERMTNFDKNLPNEKVLPKHSLLYEYFTVYNELTKVKYVTEGMRKPAFLSGEQKKAIVDLLFKTNRKVTVKQLKEDYFKKIECFDSVEISGVEDRFNASLGTYHDLLKIIKDKDFLDNEENEDILEDIVLTLTLFEDREMIEERLKTYAHLFDDKVMKQLKRRRYTGWGRLSRKLINGIRDKQSGKTILDFLKSDGFANRNFMQLIHDDSLTFKEDIQKAQVSGQGDSLHEHIANLAGSPAIKKGILQTVKVVDELVKVMGRHKPENIVIEMARENQTTQKGQKNSRERMKRIEEGIKELGSQILKEHPVENTQLQNEKLYLYYLQNGRDMYVDQELDINRLSDYDVDHIVPQSFLKDDSIDNKVLTRSDKARGKSDNVPSEEVVKKMKNYWRQLLNAKLITQRKFDNLTKAERGGLSELDKAGFIKRQLVETRQITKHVAQILDSRMNTKYDENDKLIREVKVITLKSKLVSDFRKDFQFYKVREINNYHHAHDAYLNAVVGTALIKKYPKLESEFVYGDYKVYDVRKMIAKSEQEIGKATAKYFFYSNIMNFFKTEITLANGEIRKRPLIETNGETGEIVWDKGRDFATVRKVLSMPQVNIVKKTEVQTGGFSKESILPKRNSDKLIARKKDWDPKKYGGFDSPTVAYSVLVVAKVEKGKSKKLKSVKELLGITIMERSSFEKNPIDFLEAKGYKEVKKDLIIKLPKYSLFELENGRKRMLASAGELQKGNELALPSKYVNFLYLASHYEKLKGSPEDNEQKQLFVEQHKHYLDEIIEQISEFSKRVILADANLDKVLSAYNKHRDKPIREQAENIIHLFTLTNLGAPAAFKYFDTTIDRKRYTSTKEVLDATLIHQSITGLYETRIDLSQLGGDGGEAAAKGGGPAPGGTLNIEDEYRLHETSKGPDVPLGSTWLSDFPQAWAETGGMGLAVRQAPLIIPLKATSTPVSIKQYPMSQEARLGIKPHIQRLLDQGILVPCQSPWNTPLLPVKKPGTNDYRPVQDLREVNKRVEDIHPTVPNPYNLLSGLPPSHQWYTVLDLKDAFFCLRLHPTSQSLFAFEWRDPEMGISGQLTWTRLPQGFKNSPTLFNEALHRDLADFRIQHPDLILLQYVDDLLLAATSELDCQQGTRALLQTLGDLGYRASAKKAQICQKQVKYLGYLLKEGQRWLTEARKETVMGQPTPKTPRQLREFLGKAGFCRLFIPGFAEMAAPLYPLTKPGTLFEWGPDQQKAYQEIKQALLTAPALGLPDLTKPFELFVDEKQGYAKGVLTQKLGPWRRPVAYLSKKLDPVAAGWPPCLRMVAAIAVLTKDAGKLTMGQPLVILAPHAVEALVKQPPDRWLSNARMTHYQALLLDTDRVQFGPIVALNPATLLPLPEEGLQHDCLDILAEAHGTRPDLTDQPLPDADHTWYTDGSSFLQEGQRKAGAAVTTETEVVWAKALPAGTSAQRAELIALTQALKMAEGKKLNVYTDSRYAFATAHIHGEIYRRRGWLTSEGKEIKNKDEILALLKALFLPKRLSIIHCPGHQKGNRAEARGNRMADQAAREVATRETPETSTLLAGKRTADGSEFEKRTADGSEFESPKKKAKVE

SEQ ID NO: 2557 - protein, 2094 aa, synthetic construct
MPAAKRVKLDGGDKKYSIGLDIGTNSVGWAVITDEYKVPSKKFKVLGNTDRHSIKKNLIGALLFDSGETAEATRLKRTARRRYTRRKNRICYLQEIFSNEMAKVDDSFFHRLEESFLVEEDKKHERHPIFGNIVDEVAYHEKYPTIYHLRKKLVDSTDKADLRLIYLALAHMIKFRGHFLIEGDLNPDNSDVDKLFIQLVQTYNQLFEENPINASGVDAKAILSARLSKSRRLENLIAQLPGEKKNGLFGNLIALSLGLTPNFKSNFDLAEDAKLQLSKDTYDDDLDNLLAQIGDQYADLFLAAKNLSDAILLSDILRVNTEITKAPLSASMIKRYDEHHQDLTLLKALVRQQLPEKYKEIFFDQSKNGYAGYIDGGASQEEFYKFIKPILEKMDGTEELLVKLNREDLLRKQRTFDNGSIPHQIHLGELHAILRRQEDFYPFLKDNREKIEKILTFRIPYYVGPLARGNSRFAWMTRKSEETITPWNFEEVVDKGASAQSFIERMTNFDKNLPNEKVLPKHSLLYEYFTVYNELTKVKYVTEGMRKPAFLSGEQKKAIVDLLFKTNRKVTVKQLKEDYFKKIECFDSVEISGVEDRFNASLGTYHDLLKIIKDKDFLDNEENEDILEDIVLTLTLFEDREMIEERLKTYAHLFDDKVMKQLKRRRYTGWGRLSRKLINGIRDKQSGKTILDFLKSDGFANRNFMQLIHDDSLTFKEDIQKAQVSGQGDSLHEHIANLAGSPAIKKGILQTVKVVDELVKVMGRHKPENIVIEMARENQTTQKGQKNSRERMKRIEEGIKELGSQILKEHPVENTQLQNEKLYLYYLQNGRDMYVDQELDINRLSDYDVDHIVPQSFLKDDSIDNKVLTRSDKARGKSDNVPSEEVVKKMKNYWRQLLNAKLITQRKFDNLTKAERGGLSELDKAGFIKRQLVETRQITKHVAQILDSRMNTKYDENDKLIREVKVITLKSKLVSDFRKDFQFYKVREINNYHHAHDAYLNAVVGTALIKKYPKLESEFVYGDYKVYDVRKMIAKSEQEIGKATAKYFFYSNIMNFFKTEITLANGEIRKRPLIETNGETGEIVWDKGRDFATVRKVLSMPQVNIVKKTEVQTGGFSKESILPKRNSDKLIARKKDWDPKKYGGFDSPTVAYSVLVVAKVEKGKSKKLKSVKELLGITIMERSSFEKNPIDFLEAKGYKEVKKDLIIKLPKYSLFELENGRKRMLASAGELQKGNELALPSKYVNFLYLASHYEKLKGSPEDNEQKQLFVEQHKHYLDEIIEQISEFSKRVILADANLDKVLSAYNKHRDKPIREQAENIIHLFTLTNLGAPAAFKYFDTTIDRKRYTSTKEVLDATLIHQSITGLYETRIDLSQLGGDGGGSSGSSGSSGGTLNIEDEYRLHETSKGPDVPLGSTWLSDFPQAWAETGGMGLAVRQAPLIIPLKATSTPVSIKQYPMSQEARLGIKPHIQRLLDQGILVPCQSPWNTPLLPVKKPGTNDYRPVQDLREVNKRVEDIHPTVPNPYNLLSGLPPSHQWYTVLDLKDAFFCLRLHPTSQSLFAFEWRDPEMGISGQLTWTRLPQGFKNSPTLFNEALHRDLADFRIQHPDLILLQYVDDLLLAATSELDCQQGTRALLQTLGDLGYRASAKKAQICQKQVKYLGYLLKEGQRWLTEARKETVMGQPTPKTPRQLREFLGKAGFCRLFIPGFAEMAAPLYPLTKPGTLFEWGPDQQKAYQEIKQALLTAPALGLPDLTKPFELFVDEKQGYAKGVLTQKLGPWRRPVAYLSKKLDPVAAGWPPCLRMVAAIAVLTKDAGKLTMGQPLVILAPHAVEALVKQPPDRWLSNARMTHYQALLLDTDRVQFGPIVALNPATLLPLPEEGLQHDCLDILAEAHGTRPDLTDQPLPDADHTWYTDGSSFLQEGQRKAGAAVTTETEVVWAKALPAGTSAQRAELIALTQALKMAEGKKLNVYTDSRYAFATAHIHGEIYRRRGWLTSEGKEIKNKDEILALLKALFLPKRLSIIHCPGHQKGNRAEARGNRMADQAAREVATRETPETSTLLAGKRTADGSEFEKRTADGSEFESPKKKAKVE

SEQ ID NO: 2558 - protein, 2094 aa, synthetic construct
MPAAKRVKLDGGDKKYSIGLDIGTNSVGWAVITDEYKVPSKKFKVLGNTDRHSIKKNLIGALLFDSGETAEATRLKRTARRRYTRRKNRICYLQEIFSNEMAKVDDSFFHRLEESFLVEEDKKHERHPIFGNIVDEVAYHEKYPTIYHLRKKLVDSTDKADLRLIYLALAHMIKFRGHFLIEGDLNPDNSDVDKLFIQLVQTYNQLFEENPINASGVDAKAILSARLSKSRRLENLIAQLPGEKKNGLFGNLIALSLGLTPNFKSNFDLAEDAKLQLSKDTYDDDLDNLLAQIGDQYADLFLAAKNLSDAILLSDILRVNTEITKAPLSASMIKRYDEHHQDLTLLKALVRQQLPEKYKEIFFDQSKNGYAGYIDGGASQEEFYKFIKPILEKMDGTEELLVKLNREDLLRKQRTFDNGSIPHQIHLGELHAILRRQEDFYPFLKDNREKIEKILTFRIPYYVGPLARGNSRFAWMTRKSEETITPWNFEEVVDKGASAQSFIERMTNFDKNLPNEKVLPKHSLLYEYFTVYNELTKVKYVTEGMRKPAFLSGEQKKAIVDLLFKTNRKVTVKQLKEDYFKKIECFDSVEISGVEDRFNASLGTYHDLLKIIKDKDFLDNEENEDILEDIVLTLTLFEDREMIEERLKTYAHLFDDKVMKQLKRRRYTGWGRLSRKLINGIRDKQSGKTILDFLKSDGFANRNFMQLIHDDSLTFKEDIQKAQVSGQGDSLHEHIANLAGSPAIKKGILQTVKVVDELVKVMGRHKPENIVIEMARENQTTQKGQKNSRERMKRIEEGIKELGSQILKEHPVENTQLQNEKLYLYYLQNGRDMYVDQELDINRLSDYDVDHIVPQSFLKDDSIDNKVLTRSDKARGKSDNVPSEEVVKKMKNYWRQLLNAKLITQRKFDNLTKAERGGLSELDKAGFIKRQLVETRQITKHVAQILDSRMNTKYDENDKLIREVKVITLKSKLVSDFRKDFQFYKVREINNYHHAHDAYLNAVVGTALIKKYPKLESEFVYGDYKVYDVRKMIAKSEQEIGKATAKYFFYSNIMNFFKTEITLANGEIRKRPLIETNGETGEIVWDKGRDFATVRKVLSMPQVNIVKKTEVQTGGFSKESILPKRNSDKLIARKKDWDPKKYGGFDSPTVAYSVLVVAKVEKGKSKKLKSVKELLGITIMERSSFEKNPIDFLEAKGYKEVKKDLIIKLPKYSLFELENGRKRMLASAGELQKGNELALPSKYVNFLYLASHYEKLKGSPEDNEQKQLFVEQHKHYLDEIIEQISEFSKRVILADANLDKVLSAYNKHRDKPIREQAENIIHLFTLTNLGAPAAFKYFDTTIDRKRYTSTKEVLDATLIHQSITGLYETRIDLSQLGGDGGGGSGSSPAPGGTLNIEDEYRLHETSKGPDVPLGSTWLSDFPQAWAETGGMGLAVRQAPLIIPLKATSTPVSIKQYPMSQEARLGIKPHIQRLLDQGILVPCQSPWNTPLLPVKKPGTNDYRPVQDLREVNKRVEDIHPTVPNPYNLLSGLPPSHQWYTVLDLKDAFFCLRLHPTSQSLFAFEWRDPEMGISGQLTWTRLPQGFKNSPTLFNEALHRDLADFRIQHPDLILLQYVDDLLLAATSELDCQQGTRALLQTLGDLGYRASAKKAQICQKQVKYLGYLLKEGQRWLTEARKETVMGQPTPKTPRQLREFLGKAGFCRLFIPGFAEMAAPLYPLTKPGTLFEWGPDQQKAYQEIKQALLTAPALGLPDLTKPFELFVDEKQGYAKGVLTQKLGPWRRPVAYLSKKLDPVAAGWPPCLRMVAAIAVLTKDAGKLTMGQPLVILAPHAVEALVKQPPDRWLSNARMTHYQALLLDTDRVQFGPIVALNPATLLPLPEEGLQHDCLDILAEAHGTRPDLTDQPLPDADHTWYTDGSSFLQEGQRKAGAAVTTETEVVWAKALPAGTSAQRAELIALTQALKMAEGKKLNVYTDSRYAFATAHIHGEIYRRRGWLTSEGKEIKNKDEILALLKALFLPKRLSIIHCPGHQKGNRAEARGNRMADQAAREVATRETPETSTLLAGKRTADGSEFEKRTADGSEFESPKKKAKVE

SEQ ID NO: 2559 - protein, 2091 aa, synthetic construct
MPAAKRVKLDGGDKKYSIGLDIGTNSVGWAVITDEYKVPSKKFKVLGNTDRHSIKKNLIGALLFDSGETAEATRLKRTARRRYTRRKNRICYLQEIFSNEMAKVDDSFFHRLEESFLVEEDKKHERHPIFGNIVDEVAYHEKYPTIYHLRKKLVDSTDKADLRLIYLALAHMIKFRGHFLIEGDLNPDNSDVDKLFIQLVQTYNQLFEENPINASGVDAKAILSARLSKSRRLENLIAQLPGEKKNGLFGNLIALSLGLTPNFKSNFDLAEDAKLQLSKDTYDDDLDNLLAQIGDQYADLFLAAKNLSDAILLSDILRVNTEITKAPLSASMIKRYDEHHQDLTLLKALVRQQLPEKYKEIFFDQSKNGYAGYIDGGASQEEFYKFIKPILEKMDGTEELLVKLNREDLLRKQRTFDNGSIPHQIHLGELHAILRRQEDFYPFLKDNREKIEKILTFRIPYYVGPLARGNSRFAWMTRKSEETITPWNFEEVVDKGASAQSFIERMTNFDKNLPNEKVLPKHSLLYEYFTVYNELTKVKYVTEGMRKPAFLSGEQKKAIVDLLFKTNRKVTVKQLKEDYFKKIECFDSVEISGVEDRFNASLGTYHDLLKIIKDKDFLDNEENEDILEDIVLTLTLFEDREMIEERLKTYAHLFDDKVMKQLKRRRYTGWGRLSRKLINGIRDKQSGKTILDFLKSDGFANRNFMQLIHDDSLTFKEDIQKAQVSGQGDSLHEHIANLAGSPAIKKGILQTVKVVDELVKVMGRHKPENIVIEMARENQTTQKGQKNSRERMKRIEEGIKELGSQILKEHPVENTQLQNEKLYLYYLQNGRDMYVDQELDINRLSDYDVDHIVPQSFLKDDSIDNKVLTRSDKARGKSDNVPSEEVVKKMKNYWRQLLNAKLITQRKFDNLTKAERGGLSELDKAGFIKRQLVETRQITKHVAQILDSRMNTKYDENDKLIREVKVITLKSKLVSDFRKDFQFYKVREINNYHHAHDAYLNAVVGTALIKKYPKLESEFVYGDYKVYDVRKMIAKSEQEIGKATAKYFFYSNIMNFFKTEITLANGEIRKRPLIETNGETGEIVWDKGRDFATVRKVLSMPQVNIVKKTEVQTGGFSKESILPKRNSDKLIARKKDWDPKKYGGFDSPTVAYSVLVVAKVEKGKSKKLKSVKELLGITIMERSSFEKNPIDFLEAKGYKEVKKDLIIKLPKYSLFELENGRKRMLASAGELQKGNELALPSKYVNFLYLASHYEKLKGSPEDNEQKQLFVEQHKHYLDEIIEQISEFSKRVILADANLDKVLSAYNKHRDKPIREQAENIIHLFTLTNLGAPAAFKYFDTTIDRKRYTSTKEVLDATLIHQSITGLYETRIDLSQLGGDGGGGSGGGGGTLNIEDEYRLHETSKGPDVPLGSTWLSDFPQAWAETGGMGLAVRQAPLIIPLKATSTPVSIKQYPMSQEARLGIKPHIQRLLDQGILVPCQSPWNTPLLPVKKPGTNDYRPVQDLREVNKRVEDIHPTVPNPYNLLSGLPPSHQWYTVLDLKDAFFCLRLHPTSQSLFAFEWRDPEMGISGQLTWTRLPQGFKNSPTLFNEALHRDLADFRIQHPDLILLQYVDDLLLAATSELDCQQGTRALLQTLGDLGYRASAKKAQICQKQVKYLGYLLKEGQRWLTEARKETVMGQPTPKTPRQLREFLGKAGFCRLFIPGFAEMAAPLYPLTKPGTLFEWGPDQQKAYQEIKQALLTAPALGLPDLTKPFELFVDEKQGYAKGVLTQKLGPWRRPVAYLSKKLDPVAAGWPPCLRMVAAIAVLTKDAGKLTMGQPLVILAPHAVEALVKQPPDRWLSNARMTHYQALLLDTDRVQFGPIVALNPATLLPLPEEGLQHDCLDILAEAHGTRPDLTDQPLPDADHTWYTDGSSFLQEGQRKAGAAVTTETEVVWAKALPAGTSAQRAELIALTQALKMAEGKKLNVYTDSRYAFATAHIHGEIYRRRGWLTSEGKEIKNKDEILALLKALFLPKRLSIIHCPGHQKGNRAEARGNRMADQAAREVATRETPETSTLLAGKRTADGSEFEKRTADGSEFESPKKKAKVE

SEQ ID NO: 2560 - protein, 2092 aa, synthetic construct
MPAAKRVKLDGGDKKYSIGLDIGTNSVGWAVITDEYKVPSKKFKVLGNTDRHSIKKNLIGALLFDSGETAEATRLKRTARRRYTRRKNRICYLQEIFSNEMAKVDDSFFHRLEESFLVEEDKKHERHPIFGNIVDEVAYHEKYPTIYHLRKKLVDSTDKADLRLIYLALAHMIKFRGHFLIEGDLNPDNSDVDKLFIQLVQTYNQLFEENPINASGVDAKAILSARLSKSRRLENLIAQLPGEKKNGLFGNLIALSLGLTPNFKSNFDLAEDAKLQLSKDTYDDDLDNLLAQIGDQYADLFLAAKNLSDAILLSDILRVNTEITKAPLSASMIKRYDEHHQDLTLLKALVRQQLPEKYKEIFFDQSKNGYAGYIDGGASQEEFYKFIKPILEKMDGTEELLVKLNREDLLRKQRTFDNGSIPHQIHLGELHAILRRQEDFYPFLKDNREKIEKILTFRIPYYVGPLARGNSRFAWMTRKSEETITPWNFEEVVDKGASAQSFIERMTNFDKNLPNEKVLPKHSLLYEYFTVYNELTKVKYVTEGMRKPAFLSGEQKKAIVDLLFKTNRKVTVKQLKEDYFKKIECFDSVEISGVEDRFNASLGTYHDLLKIIKDKDFLDNEENEDILEDIVLTLTLFEDREMIEERLKTYAHLFDDKVMKQLKRRRYTGWGRLSRKLINGIRDKQSGKTILDFLKSDGFANRNFMQLIHDDSLTFKEDIQKAQVSGQGDSLHEHIANLAGSPAIKKGILQTVKVVDELVKVMGRHKPENIVIEMARENQTTQKGQKNSRERMKRIEEGIKELGSQILKEHPVENTQLQNEKLYLYYLQNGRDMYVDQELDINRLSDYDVDHIVPQSFLKDDSIDNKVLTRSDKARGKSDNVPSEEVVKKMKNYWRQLLNAKLITQRKFDNLTKAERGGLSELDKAGFIKRQLVETRQITKHVAQILDSRMNTKYDENDKLIREVKVITLKSKLVSDFRKDFQFYKVREINNYHHAHDAYLNAVVGTALIKKYPKLESEFVYGDYKVYDVRKMIAKSEQEIGKATAKYFFYSNIMNFFKTEITLANGEIRKRPLIETNGETGEIVWDKGRDFATVRKVLSMPQVNIVKKTEVQTGGFSKESILPKRNSDKLIARKKDWDPKKYGGFDSPTVAYSVLVVAKVEKGKSKKLKSVKELLGITIMERSSFEKNPIDFLEAKGYKEVKKDLIIKLPKYSLFELENGRKRMLASAGELQKGNELALPSKYVNFLYLASHYEKLKGSPEDNEQKQLFVEQHKHYLDEIIEQISEFSKRVILADANLDKVLSAYNKHRDKPIREQAENIIHLFTLTNLGAPAAFKYFDTTIDRKRYTSTKEVLDATLIHQSITGLYETRIDLSQLGGDGGGGGGGGGGGTLNIEDEYRLHETSKGPDVPLGSTWLSDFPQAWAETGGMGLAVRQAPLIIPLKATSTPVSIKQYPMSQEARLGIKPHIQRLLDQGILVPCQSPWNTPLLPVKKPGTNDYRPVQDLREVNKRVEDIHPTVPNPYNLLSGLPPSHQWYTVLDLKDAFFCLRLHPTSQSLFAFEWRDPEMGISGQLTWTRLPQGFKNSPTLFNEALHRDLADFRIQHPDLILLQYVDDLLLAATSELDCQQGTRALLQTLGDLGYRASAKKAQICQKQVKYLGYLLKEGQRWLTEARKETVMGQPTPKTPRQLREFLGKAGFCRLFIPGFAEMAAPLYPLTKPGTLFEWGPDQQKAYQEIKQALLTAPALGLPDLTKPFELFVDEKQGYAKGVLTQKLGPWRRPVAYLSKKLDPVAAGWPPCLRMVAAIAVLTKDAGKLTMGQPLVILAPHAVEALVKQPPDRWLSNARMTHYQALLLDTDRVQFGPIVALNPATLLPLPEEGLQHDCLDILAEAHGTRPDLTDQPLPDADHTWYTDGSSFLQEGQRKAGAAVTTETEVVWAKALPAGTSAQRAELIALTQALKMAEGKKLNVYTDSRYAFATAHIHGEIYRRRGWLTSEGKEIKNKDEILALLKALFLPKRLSIIHCPGHQKGNRAEARGNRMADQAAREVATRETPETSTLLAGKRTADGSEFEKRTADGSEFESPKKKAKVE

SEQ ID NO: 2561 - protein, 2100 aa, synthetic construct
MPAAKRVKLDGGDKKYSIGLDIGTNSVGWAVITDEYKVPSKKFKVLGNTDRHSIKKNLIGALLFDSGETAEATRLKRTARRRYTRRKNRICYLQEIFSNEMAKVDDSFFHRLEESFLVEEDKKHERHPIFGNIVDEVAYHEKYPTIYHLRKKLVDSTDKADLRLIYLALAHMIKFRGHFLIEGDLNPDNSDVDKLFIQLVQTYNQLFEENPINASGVDAKAILSARLSKSRRLENLIAQLPGEKKNGLFGNLIALSLGLTPNFKSNFDLAEDAKLQLSKDTYDDDLDNLLAQIGDQYADLFLAAKNLSDAILLSDILRVNTEITKAPLSASMIKRYDEHHQDLTLLKALVRQQLPEKYKEIFFDQSKNGYAGYIDGGASQEEFYKFIKPILEKMDGTEELLVKLNREDLLRKQRTFDNGSIPHQIHLGELHAILRRQEDFYPFLKDNREKIEKILTFRIPYYVGPLARGNSRFAWMTRKSEETITPWNFEEVVDKGASAQSFIERMTNFDKNLPNEKVLPKHSLLYEYFTVYNELTKVKYVTEGMRKPAFLSGEQKKAIVDLLFKTNRKVTVKQLKEDYFKKIECFDSVEISGVEDRFNASLGTYHDLLKIIKDKDFLDNEENEDILEDIVLTLTLFEDREMIEERLKTYAHLFDDKVMKQLKRRRYTGWGRLSRKLINGIRDKQSGKTILDFLKSDGFANRNFMQLIHDDSLTFKEDIQKAQVSGQGDSLHEHIANLAGSPAIKKGILQTVKVVDELVKVMGRHKPENIVIEMARENQTTQKGQKNSRERMKRIEEGIKELGSQILKEHPVENTQLQNEKLYLYYLQNGRDMYVDQELDINRLSDYDVDHIVPQSFLKDDSIDNKVLTRSDKARGKSDNVPSEEVVKKMKNYWRQLLNAKLITQRKFDNLTKAERGGLSELDKAGFIKRQLVETRQITKHVAQILDSRMNTKYDENDKLIREVKVITLKSKLVSDFRKDFQFYKVREINNYHHAHDAYLNAVVGTALIKKYPKLESEFVYGDYKVYDVRKMIAKSEQEIGKATAKYFFYSNIMNFFKTEITLANGEIRKRPLIETNGETGEIVWDKGRDFATVRKVLSMPQVNIVKKTEVQTGGFSKESILPKRNSDKLIARKKDWDPKKYGGFDSPTVAYSVLVVAKVEKGKSKKLKSVKELLGITIMERSSFEKNPIDFLEAKGYKEVKKDLIIKLPKYSLFELENGRKRMLASAGELQKGNELALPSKYVNFLYLASHYEKLKGSPEDNEQKQLFVEQHKHYLDEIIEQISEFSKRVILADANLDKVLSAYNKHRDKPIREQAENIIHLFTLTNLGAPAAFKYFDTTIDRKRYTSTKEVLDATLIHQSITGLYETRIDLSQLGGDGGEAAAKGGGGSEAAAKGGTLNIEDEYRLHETSKGPDVPLGSTWLSDFPQAWAETGGMGLAVRQAPLIIPLKATSTPVSIKQYPMSQEARLGIKPHIQRLLDQGILVPCQSPWNTPLLPVKKPGTNDYRPVQDLREVNKRVEDIHPTVPNPYNLLSGLPPSHQWYTVLDLKDAFFCLRLHPTSQSLFAFEWRDPEMGISGQLTWTRLPQGFKNSPTLFNEALHRDLADFRIQHPDLILLQYVDDLLLAATSELDCQQGTRALLQTLGDLGYRASAKKAQICQKQVKYLGYLLKEGQRWLTEARKETVMGQPTPKTPRQLREFLGKAGFCRLFIPGFAEMAAPLYPLTKPGTLFEWGPDQQKAYQEIKQALLTAPALGLPDLTKPFELFVDEKQGYAKGVLTQKLGPWRRPVAYLSKKLDPVAAGWPPCLRMVAAIAVLTKDAGKLTMGQPLVILAPHAVEALVKQPPDRWLSNARMTHYQALLLDTDRVQFGPIVALNPATLLPLPEEGLQHDCLDILAEAHGTRPDLTDQPLPDADHTWYTDGSSFLQEGQRKAGAAVTTETEVVWAKALPAGTSAQRAELIALTQALKMAEGKKLNVYTDSRYAFATAHIHGEIYRRRGWLTSEGKEIKNKDEILALLKALFLPKRLSIIHCPGHQKGNRAEARGNRMADQAAREVATRETPETSTLLAGKRTADGSEFEKRTADGSEFESPKKKAKVE

SEQ ID NO: 2562 - protein, 2091 aa, synthetic construct
MPAAKRVKLDGGDKKYSIGLDIGTNSVGWAVITDEYKVPSKKFKVLGNTDRHSIKKNLIGALLFDSGETAEATRLKRTARRRYTRRKNRICYLQEIFSNEMAKVDDSFFHRLEESFLVEEDKKHERHPIFGNIVDEVAYHEKYPTIYHLRKKLVDSTDKADLRLIYLALAHMIKFRGHFLIEGDLNPDNSDVDKLFIQLVQTYNQLFEENPINASGVDAKAILSARLSKSRRLENLIAQLPGEKKNGLFGNLIALSLGLTPNFKSNFDLAEDAKLQLSKDTYDDDLDNLLAQIGDQYADLFLAAKNLSDAILLSDILRVNTEITKAPLSASMIKRYDEHHQDLTLLKALVRQQLPEKYKEIFFDQSKNGYAGYIDGGASQEEFYKFIKPILEKMDGTEELLVKLNREDLLRKQRTFDNGSIPHQIHLGELHAILRRQEDFYPFLKDNREKIEKILTFRIPYYVGPLARGNSRFAWMTRKSEETITPWNFEEVVDKGASAQSFIERMTNFDKNLPNEKVLPKHSLLYEYFTVYNELTKVKYVTEGMRKPAFLSGEQKKAIVDLLFKTNRKVTVKQLKEDYFKKIECFDSVEISGVEDRFNASLGTYHDLLKIIKDKDFLDNEENEDILEDIVLTLTLFEDREMIEERLKTYAHLFDDKVMKQLKRRRYTGWGRLSRKLINGIRDKQSGKTILDFLKSDGFANRNFMQLIHDDSLTFKEDIQKAQVSGQGDSLHEHIANLAGSPAIKKGILQTVKVVDELVKVMGRHKPENIVIEMARENQTTQKGQKNSRERMKRIEEGIKELGSQILKEHPVENTQLQNEKLYLYYLQNGRDMYVDQELDINRLSDYDVDHIVPQSFLKDDSIDNKVLTRSDKARGKSDNVPSEEVVKKMKNYWRQLLNAKLITQRKFDNLTKAERGGLSELDKAGFIKRQLVETRQITKHVAQILDSRMNTKYDENDKLIREVKVITLKSKLVSDFRKDFQFYKVREINNYHHAHDAYLNAVVGTALIKKYPKLESEFVYGDYKVYDVRKMIAKSEQEIGKATAKYFFYSNIMNFFKTEITLANGEIRKRPLIETNGETGEIVWDKGRDFATVRKVLSMPQVNIVKKTEVQTGGFSKESILPKRNSDKLIARKKDWDPKKYGGFDSPTVAYSVLVVAKVEKGKSKKLKSVKELLGITIMERSSFEKNPIDFLEAKGYKEVKKDLIIKLPKYSLFELENGRKRMLASAGELQKGNELALPSKYVNFLYLASHYEKLKGSPEDNEQKQLFVEQHKHYLDEIIEQISEFSKRVILADANLDKVLSAYNKHRDKPIREQAENIIHLFTLTNLGAPAAFKYFDTTIDRKRYTSTKEVLDATLIHQSITGLYETRIDLSQLGGDGGGGGGGGGGTLNIEDEYRLHETSKGPDVPLGSTWLSDFPQAWAETGGMGLAVRQAPLIIPLKATSTPVSIKQYPMSQEARLGIKPHIQRLLDQGILVPCQSPWNTPLLPVKKPGTNDYRPVQDLREVNKRVEDIHPTVPNPYNLLSGLPPSHQWYTVLDLKDAFFCLRLHPTSQSLFAFEWRDPEMGISGQLTWTRLPQGFKNSPTLFNEALHRDLADFRIQHPDLILLQYVDDLLLAATSELDCQQGTRALLQTLGDLGYRASAKKAQICQKQVKYLGYLLKEGQRWLTEARKETVMGQPTPKTPRQLREFLGKAGFCRLFIPGFAEMAAPLYPLTKPGTLFEWGPDQQKAYQEIKQALLTAPALGLPDLTKPFELFVDEKQGYAKGVLTQKLGPWRRPVAYLSKKLDPVAAGWPPCLRMVAAIAVLTKDAGKLTMGQPLVILAPHAVEALVKQPPDRWLSNARMTHYQALLLDTDRVQFGPIVALNPATLLPLPEEGLQHDCLDILAEAHGTRPDLTDQPLPDADHTWYTDGSSFLQEGQRKAGAAVTTETEVVWAKALPAGTSAQRAELIALTQALKMAEGKKLNVYTDSRYAFATAHIHGEIYRRRGWLTSEGKEIKNKDEILALLKALFLPKRLSIIHCPGHQKGNRAEARGNRMADQAAREVATRETPETSTLLAGKRTADGSEFEKRTADGSEFESPKKKAKVE

SEQ ID NO: 2563 - protein, 2094 aa, synthetic construct
MPAAKRVKLDGGDKKYSIGLDIGTNSVGWAVITDEYKVPSKKFKVLGNTDRHSIKKNLIGALLFDSGETAEATRLKRTARRRYTRRKNRICYLQEIFSNEMAKVDDSFFHRLEESFLVEEDKKHERHPIFGNIVDEVAYHEKYPTIYHLRKKLVDSTDKADLRLIYLALAHMIKFRGHFLIEGDLNPDNSDVDKLFIQLVQTYNQLFEENPINASGVDAKAILSARLSKSRRLENLIAQLPGEKKNGLFGNLIALSLGLTPNFKSNFDLAEDAKLQLSKDTYDDDLDNLLAQIGDQYADLFLAAKNLSDAILLSDILRVNTEITKAPLSASMIKRYDEHHQDLTLLKALVRQQLPEKYKEIFFDQSKNGYAGYIDGGASQEEFYKFIKPILEKMDGTEELLVKLNREDLLRKQRTFDNGSIPHQIHLGELHAILRRQEDFYPFLKDNREKIEKILTFRIPYYVGPLARGNSRFAWMTRKSEETITPWNFEEVVDKGASAQSFIERMTNFDKNLPNEKVLPKHSLLYEYFTVYNELTKVKYVTEGMRKPAFLSGEQKKAIVDLLFKTNRKVTVKQLKEDYFKKIECFDSVEISGVEDRFNASLGTYHDLLKIIKDKDFLDNEENEDILEDIVLTLTLFEDREMIEERLKTYAHLFDDKVMKQLKRRRYTGWGRLSRKLINGIRDKQSGKTILDFLKSDGFANRNFMQLIHDDSLTFKEDIQKAQVSGQGDSLHEHIANLAGSPAIKKGILQTVKVVDELVKVMGRHKPENIVIEMARENQTTQKGQKNSRERMKRIEEGIKELGSQILKEHPVENTQLQNEKLYLYYLQNGRDMYVDQELDINRLSDYDVDHIVPQSFLKDDSIDNKVLTRSDKARGKSDNVPSEEVVKKMKNYWRQLLNAKLITQRKFDNLTKAERGGLSELDKAGFIKRQLVETRQITKHVAQILDSRMNTKYDENDKLIREVKVITLKSKLVSDFRKDFQFYKVREINNYHHAHDAYLNAVVGTALIKKYPKLESEFVYGDYKVYDVRKMIAKSEQEIGKATAKYFFYSNIMNFFKTEITLANGEIRKRPLIETNGETGEIVWDKGRDFATVRKVLSMPQVNIVKKTEVQTGGFSKESILPKRNSDKLIARKKDWDPKKYGGFDSPTVAYSVLVVAKVEKGKSKKLKSVKELLGITIMERSSFEKNPIDFLEAKGYKEVKKDLIIKLPKYSLFELENGRKRMLASAGELQKGNELALPSKYVNFLYLASHYEKLKGSPEDNEQKQLFVEQHKHYLDEIIEQISEFSKRVILADANLDKVLSAYNKHRDKPIREQAENIIHLFTLTNLGAPAAFKYFDTTIDRKRYTSTKEVLDATLIHQSITGLYETRIDLSQLGGDGGGGSPAPGSSGGTLNIEDEYRLHETSKGPDVPLGSTWLSDFPQAWAETGGMGLAVRQAPLIIPLKATSTPVSIKQYPMSQEARLGIKPHIQRLLDQGILVPCQSPWNTPLLPVKKPGTNDYRPVQDLREVNKRVEDIHPTVPNPYNLLSGLPPSHQWYTVLDLKDAFFCLRLHPTSQSLFAFEWRDPEMGISGQLTWTRLPQGFKNSPTLFNEALHRDLADFRIQHPDLILLQYVDDLLLAATSELDCQQGTRALLQTLGDLGYRASAKKAQICQKQVKYLGYLLKEGQRWLTEARKETVMGQPTPKTPRQLREFLGKAGFCRLFIPGFAEMAAPLYPLTKPGTLFEWGPDQQKAYQEIKQALLTAPALGLPDLTKPFELFVDEKQGYAKGVLTQKLGPWRRPVAYLSKKLDPVAAGWPPCLRMVAAIAVLTKDAGKLTMGQPLVILAPHAVEALVKQPPDRWLSNARMTHYQALLLDTDRVQFGPIVALNPATLLPLPEEGLQHDCLDILAEAHGTRPDLTDQPLPDADHTWYTDGSSFLQEGQRKAGAAVTTETEVVWAKALPAGTSAQRAELIALTQALKMAEGKKLNVYTDSRYAFATAHIHGEIYRRRGWLTSEGKEIKNKDEILALLKALFLPKRLSIIHCPGHQKGNRAEARGNRMADQAAREVATRETPETSTLLAGKRTADGSEFEKRTADGSEFESPKKKAKVE

SEQ ID NO: 2564 - protein, 2096 aa, synthetic construct
MPAAKRVKLDGGDKKYSIGLDIGTNSVGWAVITDEYKVPSKKFKVLGNTDRHSIKKNLIGALLFDSGETAEATRLKRTARRRYTRRKNRICYLQEIFSNEMAKVDDSFFHRLEESFLVEEDKKHERHPIFGNIVDEVAYHEKYPTIYHLRKKLVDSTDKADLRLIYLALAHMIKFRGHFLIEGDLNPDNSDVDKLFIQLVQTYNQLFEENPINASGVDAKAILSARLSKSRRLENLIAQLPGEKKNGLFGNLIALSLGLTPNFKSNFDLAEDAKLQLSKDTYDDDLDNLLAQIGDQYADLFLAAKNLSDAILLSDILRVNTEITKAPLSASMIKRYDEHHQDLTLLKALVRQQLPEKYKEIFFDQSKNGYAGYIDGGASQEEFYKFIKPILEKMDGTEELLVKLNREDLLRKQRTFDNGSIPHQIHLGELHAILRRQEDFYPFLKDNREKIEKILTFRIPYYVGPLARGNSRFAWMTRKSEETITPWNFEEVVDKGASAQSFIERMTNFDKNLPNEKVLPKHSLLYEYFTVYNELTKVKYVTEGMRKPAFLSGEQKKAIVDLLFKTNRKVTVKQLKEDYFKKIECFDSVEISGVEDRFNASLGTYHDLLKIIKDKDFLDNEENEDILEDIVLTLTLFEDREMIEERLKTYAHLFDDKVMKQLKRRRYTGWGRLSRKLINGIRDKQSGKTILDFLKSDGFANRNFMQLIHDDSLTFKEDIQKAQVSGQGDSLHEHIANLAGSPAIKKGILQTVKVVDELVKVMGRHKPENIVIEMARENQTTQKGQKNSRERMKRIEEGIKELGSQILKEHPVENTQLQNEKLYLYYLQNGRDMYVDQELDINRLSDYDVDHIVPQSFLKDDSIDNKVLTRSDKARGKSDNVPSEEVVKKMKNYWRQLLNAKLITQRKFDNLTKAERGGLSELDKAGFIKRQLVETRQITKHVAQILDSRMNTKYDENDKLIREVKVITLKSKLVSDFRKDFQFYKVREINNYHHAHDAYLNAVVGTALIKKYPKLESEFVYGDYKVYDVRKMIAKSEQEIGKATAKYFFYSNIMNFFKTEITLANGEIRKRPLIETNGETGEIVWDKGRDFATVRKVLSMPQVNIVKKTEVQTGGFSKESILPKRNSDKLIARKKDWDPKKYGGFDSPTVAYSVLVVAKVEKGKSKKLKSVKELLGITIMERSSFEKNPIDFLEAKGYKEVKKDLIIKLPKYSLFELENGRKRMLASAGELQKGNELALPSKYVNFLYLASHYEKLKGSPEDNEQKQLFVEQHKHYLDEIIEQISEFSKRVILADANLDKVLSAYNKHRDKPIREQAENIIHLFTLTNLGAPAAFKYFDTTIDRKRYTSTKEVLDATLIHQSITGLYETRIDLSQLGGDGGPAPGGSEAAAKGGTLNIEDEYRLHETSKGPDVPLGSTWLSDFPQAWAETGGMGLAVRQAPLIIPLKATSTPVSIKQYPMSQEARLGIKPHIQRLLDQGILVPCQSPWNTPLLPVKKPGTNDYRPVQDLREVNKRVEDIHPTVPNPYNLLSGLPPSHQWYTVLDLKDAFFCLRLHPTSQSLFAFEWRDPEMGISGQLTWTRLPQGFKNSPTLFNEALHRDLADFRIQHPDLILLQYVDDLLLAATSELDCQQGTRALLQTLGDLGYRASAKKAQICQKQVKYLGYLLKEGQRWLTEARKETVMGQPTPKTPRQLREFLGKAGFCRLFIPGFAEMAAPLYPLTKPGTLFEWGPDQQKAYQEIKQALLTAPALGLPDLTKPFELFVDEKQGYAKGVLTQKLGPWRRPVAYLSKKLDPVAAGWPPCLRMVAAIAVLTKDAGKLTMGQPLVILAPHAVEALVKQPPDRWLSNARMTHYQALLLDTDRVQFGPIVALNPATLLPLPEEGLQHDCLDILAEAHGTRPDLTDQPLPDADHTWYTDGSSFLQEGQRKAGAAVTTETEVVWAKALPAGTSAQRAELIALTQALKMAEGKKLNVYTDSRYAFATAHIHGEIYRRRGWLTSEGKEIKNKDEILALLKALFLPKRLSIIHCPGHQKGNRAEARGNRMADQAAREVATRETPETSTLLAGKRTADGSEFEKRTADGSEFESPKKKAKVE

SEQ ID NO: 2565 - protein, 2094 aa, synthetic construct
MPAAKRVKLDGGDKKYSIGLDIGTNSVGWAVITDEYKVPSKKFKVLGNTDRHSIKKNLIGALLFDSGETAEATRLKRTARRRYTRRKNRICYLQEIFSNEMAKVDDSFFHRLEESFLVEEDKKHERHPIFGNIVDEVAYHEKYPTIYHLRKKLVDSTDKADLRLIYLALAHMIKFRGHFLIEGDLNPDNSDVDKLFIQLVQTYNQLFEENPINASGVDAKAILSARLSKSRRLENLIAQLPGEKKNGLFGNLIALSLGLTPNFKSNFDLAEDAKLQLSKDTYDDDLDNLLAQIGDQYADLFLAAKNLSDAILLSDILRVNTEITKAPLSASMIKRYDEHHQDLTLLKALVRQQLPEKYKEIFFDQSKNGYAGYIDGGASQEEFYKFIKPILEKMDGTEELLVKLNREDLLRKQRTFDNGSIPHQIHLGELHAILRRQEDFYPFLKDNREKIEKILTFRIPYYVGPLARGNSRFAWMTRKSEETITPWNFEEVVDKGASAQSFIERMTNFDKNLPNEKVLPKHSLLYEYFTVYNELTKVKYVTEGMRKPAFLSGEQKKAIVDLLFKTNRKVTVKQLKEDYFKKIECFDSVEISGVEDRFNASLGTYHDLLKIIKDKDFLDNEENEDILEDIVLTLTLFEDREMIEERLKTYAHLFDDKVMKQLKRRRYTGWGRLSRKLINGIRDKQSGKTILDFLKSDGFANRNFMQLIHDDSLTFKEDIQKAQVSGQGDSLHEHIANLAGSPAIKKGILQTVKVVDELVKVMGRHKPENIVIEMARENQTTQKGQKNSRERMKRIEEGIKELGSQILKEHPVENTQLQNEKLYLYYLQNGRDMYVDQELDINRLSDYDVDHIVPQSFLKDDSIDNKVLTRSDKARGKSDNVPSEEVVKKMKNYWRQLLNAKLITQRKFDNLTKAERGGLSELDKAGFIKRQLVETRQITKHVAQILDSRMNTKYDENDKLIREVKVITLKSKLVSDFRKDFQFYKVREINNYHHAHDAYLNAVVGTALIKKYPKLESEFVYGDYKVYDVRKMIAKSEQEIGKATAKYFFYSNIMNFFKTEITLANGEIRKRPLIETNGETGEIVWDKGRDFATVRKVLSMPQVNIVKKTEVQTGGFSKESILPKRNSDKLIARKKDWDPKKYGGFDSPTVAYSVLVVAKVEKGKSKKLKSVKELLGITIMERSSFEKNPIDFLEAKGYKEVKKDLIIKLPKYSLFELENGRKRMLASAGELQKGNELALPSKYVNFLYLASHYEKLKGSPEDNEQKQLFVEQHKHYLDEIIEQISEFSKRVILADANLDKVLSAYNKHRDKPIREQAENIIHLFTLTNLGAPAAFKYFDTTIDRKRYTSTKEVLDATLIHQSITGLYETRIDLSQLGGDGGGSSGGGGGSGGTLNIEDEYRLHETSKGPDVPLGSTWLSDFPQAWAETGGMGLAVRQAPLIIPLKATSTPVSIKQYPMSQEARLGIKPHIQRLLDQGILVPCQSPWNTPLLPVKKPGTNDYRPVQDLREVNKRVEDIHPTVPNPYNLLSGLPPSHQWYTVLDLKDAFFCLRLHPTSQSLFAFEWRDPEMGISGQLTWTRLPQGFKNSPTLFNEALHRDLADFRIQHPDLILLQYVDDLLLAATSELDCQQGTRALLQTLGDLGYRASAKKAQICQKQVKYLGYLLKEGQRWLTEARKETVMGQPTPKTPRQLREFLGKAGFCRLFIPGFAEMAAPLYPLTKPGTLFEWGPDQQKAYQEIKQALLTAPALGLPDLTKPFELFVDEKQGYAKGVLTQKLGPWRRPVAYLSKKLDPVAAGWPPCLRMVAAIAVLTKDAGKLTMGQPLVILAPHAVEALVKQPPDRWLSNARMTHYQALLLDTDRVQFGPIVALNPATLLPLPEEGLQHDCLDILAEAHGTRPDLTDQPLPDADHTWYTDGSSFLQEGQRKAGAAVTTETEVVWAKALPAGTSAQRAELIALTQALKMAEGKKLNVYTDSRYAFATAHIHGEIYRRRGWLTSEGKEIKNKDEILALLKALFLPKRLSIIHCPGHQKGNRAEARGNRMADQAAREVATRETPETSTLLAGKRTADGSEFEKRTADGSEFESPKKKAKVE

SEQ ID NO: 2566 - protein, 2115 aa, synthetic construct
MPAAKRVKLDGGDKKYSIGLDIGTNSVGWAVITDEYKVPSKKFKVLGNTDRHSIKKNLIGALLFDSGETAEATRLKRTARRRYTRRKNRICYLQEIFSNEMAKVDDSFFHRLEESFLVEEDKKHERHPIFGNIVDEVAYHEKYPTIYHLRKKLVDSTDKADLRLIYLALAHMIKFRGHFLIEGDLNPDNSDVDKLFIQLVQTYNQLFEENPINASGVDAKAILSARLSKSRRLENLIAQLPGEKKNGLFGNLIALSLGLTPNFKSNFDLAEDAKLQLSKDTYDDDLDNLLAQIGDQYADLFLAAKNLSDAILLSDILRVNTEITKAPLSASMIKRYDEHHQDLTLLKALVRQQLPEKYKEIFFDQSKNGYAGYIDGGASQEEFYKFIKPILEKMDGTEELLVKLNREDLLRKQRTFDNGSIPHQIHLGELHAILRRQEDFYPFLKDNREKIEKILTFRIPYYVGPLARGNSRFAWMTRKSEETITPWNFEEVVDKGASAQSFIERMTNFDKNLPNEKVLPKHSLLYEYFTVYNELTKVKYVTEGMRKPAFLSGEQKKAIVDLLFKTNRKVTVKQLKEDYFKKIECFDSVEISGVEDRFNASLGTYHDLLKIIKDKDFLDNEENEDILEDIVLTLTLFEDREMIEERLKTYAHLFDDKVMKQLKRRRYTGWGRLSRKLINGIRDKQSGKTILDFLKSDGFANRNFMQLIHDDSLTFKEDIQKAQVSGQGDSLHEHIANLAGSPAIKKGILQTVKVVDELVKVMGRHKPENIVIEMARENQTTQKGQKNSRERMKRIEEGIKELGSQILKEHPVENTQLQNEKLYLYYLQNGRDMYVDQELDINRLSDYDVDHIVPQSFLKDDSIDNKVLTRSDKARGKSDNVPSEEVVKKMKNYWRQLLNAKLITQRKFDNLTKAERGGLSELDKAGFIKRQLVETRQITKHVAQILDSRMNTKYDENDKLIREVKVITLKSKLVSDFRKDFQFYKVREINNYHHAHDAYLNAVVGTALIKKYPKLESEFVYGDYKVYDVRKMIAKSEQEIGKATAKYFFYSNIMNFFKTEITLANGEIRKRPLIETNGETGEIVWDKGRDFATVRKVLSMPQVNIVKKTEVQTGGFSKESILPKRNSDKLIARKKDWDPKKYGGFDSPTVAYSVLVVAKVEKGKSKKLKSVKELLGITIMERSSFEKNPIDFLEAKGYKEVKKDLIIKLPKYSLFELENGRKRMLASAGELQKGNELALPSKYVNFLYLASHYEKLKGSPEDNEQKQLFVEQHKHYLDEIIEQISEFSKRVILADANLDKVLSAYNKHRDKPIREQAENIIHLFTLTNLGAPAAFKYFDTTIDRKRYTSTKEVLDATLIHQSITGLYETRIDLSQLGGDGGGGGGSGGGGSGGGGSGGGGSGGGGSGGGGSGGTLNIEDEYRLHETSKGPDVPLGSTWLSDFPQAWAETGGMGLAVRQAPLIIPLKATSTPVSIKQYPMSQEARLGIKPHIQRLLDQGILVPCQSPWNTPLLPVKKPGTNDYRPVQDLREVNKRVEDIHPTVPNPYNLLSGLPPSHQWYTVLDLKDAFFCLRLHPTSQSLFAFEWRDPEMGISGQLTWTRLPQGFKNSPTLFNEALHRDLADFRIQHPDLILLQYVDDLLLAATSELDCQQGTRALLQTLGDLGYRASAKKAQICQKQVKYLGYLLKEGQRWLTEARKETVMGQPTPKTPRQLREFLGKAGFCRLFIPGFAEMAAPLYPLTKPGTLFEWGPDQQKAYQEIKQALLTAPALGLPDLTKPFELFVDEKQGYAKGVLTQKLGPWRRPVAYLSKKLDPVAAGWPPCLRMVAAIAVLTKDAGKLTMGQPLVILAPHAVEALVKQPPDRWLSNARMTHYQALLLDTDRVQFGPIVALNPATLLPLPEEGLQHDCLDILAEAHGTRPDLTDQPLPDADHTWYTDGSSFLQEGQRKAGAAVTTETEVVWAKALPAGTSAQRAELIALTQALKMAEGKKLNVYTDSRYAFATAHIHGEIYRRRGWLTSEGKEIKNKDEILALLKALFLPKRLSIIHCPGHQKGNRAEARGNRMADQAAREVATRETPETSTLLAGKRTADGSEFEKRTADGSEFESPKKKAKVE

SEQ ID NO: 2567 - protein, 2094 aa, synthetic construct
MPAAKRVKLDGGDKKYSIGLDIGTNSVGWAVITDEYKVPSKKFKVLGNTDRHSIKKNLIGALLFDSGETAEATRLKRTARRRYTRRKNRICYLQEIFSNEMAKVDDSFFHRLEESFLVEEDKKHERHPIFGNIVDEVAYHEKYPTIYHLRKKLVDSTDKADLRLIYLALAHMIKFRGHFLIEGDLNPDNSDVDKLFIQLVQTYNQLFEENPINASGVDAKAILSARLSKSRRLENLIAQLPGEKKNGLFGNLIALSLGLTPNFKSNFDLAEDAKLQLSKDTYDDDLDNLLAQIGDQYADLFLAAKNLSDAILLSDILRVNTEITKAPLSASMIKRYDEHHQDLTLLKALVRQQLPEKYKEIFFDQSKNGYAGYIDGGASQEEFYKFIKPILEKMDGTEELLVKLNREDLLRKQRTFDNGSIPHQIHLGELHAILRRQEDFYPFLKDNREKIEKILTFRIPYYVGPLARGNSRFAWMTRKSEETITPWNFEEVVDKGASAQSFIERMTNFDKNLPNEKVLPKHSLLYEYFTVYNELTKVKYVTEGMRKPAFLSGEQKKAIVDLLFKTNRKVTVKQLKEDYFKKIECFDSVEISGVEDRFNASLGTYHDLLKIIKDKDFLDNEENEDILEDIVLTLTLFEDREMIEERLKTYAHLFDDKVMKQLKRRRYTGWGRLSRKLINGIRDKQSGKTILDFLKSDGFANRNFMQLIHDDSLTFKEDIQKAQVSGQGDSLHEHIANLAGSPAIKKGILQTVKVVDELVKVMGRHKPENIVIEMARENQTTQKGQKNSRERMKRIEEGIKELGSQILKEHPVENTQLQNEKLYLYYLQNGRDMYVDQELDINRLSDYDVDHIVPQSFLKDDSIDNKVLTRSDKARGKSDNVPSEEVVKKMKNYWRQLLNAKLITQRKFDNLTKAERGGLSELDKAGFIKRQLVETRQITKHVAQILDSRMNTKYDENDKLIREVKVITLKSKLVSDFRKDFQFYKVREINNYHHAHDAYLNAVVGTALIKKYPKLESEFVYGDYKVYDVRKMIAKSEQEIGKATAKYFFYSNIMNFFKTEITLANGEIRKRPLIETNGETGEIVWDKGRDFATVRKVLSMPQVNIVKKTEVQTGGFSKESILPKRNSDKLIARKKDWDPKKYGGFDSPTVAYSVLVVAKVEKGKSKKLKSVKELLGITIMERSSFEKNPIDFLEAKGYKEVKKDLIIKLPKYSLFELENGRKRMLASAGELQKGNELALPSKYVNFLYLASHYEKLKGSPEDNEQKQLFVEQHKHYLDEIIEQISEFSKRVILADANLDKVLSAYNKHRDKPIREQAENIIHLFTLTNLGAPAAFKYFDTTIDRKRYTSTKEVLDATLIHQSITGLYETRIDLSQLGGDGGGSSGGSGGGGGTLNIEDEYRLHETSKGPDVPLGSTWLSDFPQAWAETGGMGLAVRQAPLIIPLKATSTPVSIKQYPMSQEARLGIKPHIQRLLDQGILVPCQSPWNTPLLPVKKPGTNDYRPVQDLREVNKRVEDIHPTVPNPYNLLSGLPPSHQWYTVLDLKDAFFCLRLHPTSQSLFAFEWRDPEMGISGQLTWTRLPQGFKNSPTLFNEALHRDLADFRIQHPDLILLQYVDDLLLAATSELDCQQGTRALLQTLGDLGYRASAKKAQICQKQVKYLGYLLKEGQRWLTEARKETVMGQPTPKTPRQLREFLGKAGFCRLFIPGFAEMAAPLYPLTKPGTLFEWGPDQQKAYQEIKQALLTAPALGLPDLTKPFELFVDEKQGYAKGVLTQKLGPWRRPVAYLSKKLDPVAAGWPPCLRMVAAIAVLTKDAGKLTMGQPLVILAPHAVEALVKQPPDRWLSNARMTHYQALLLDTDRVQFGPIVALNPATLLPLPEEGLQHDCLDILAEAHGTRPDLTDQPLPDADHTWYTDGSSFLQEGQRKAGAAVTTETEVVWAKALPAGTSAQRAELIALTQALKMAEGKKLNVYTDSRYAFATAHIHGEIYRRRGWLTSEGKEIKNKDEILALLKALFLPKRLSIIHCPGHQKGNRAEARGNRMADQAAREVATRETPETSTLLAGKRTADGSEFEKRTADGSEFESPKKKAKVE

SEQ ID NO: 2568 - protein, 2090 aa, synthetic construct
MPAAKRVKLDGGDKKYSIGLDIGTNSVGWAVITDEYKVPSKKFKVLGNTDRHSIKKNLIGALLFDSGETAEATRLKRTARRRYTRRKNRICYLQEIFSNEMAKVDDSFFHRLEESFLVEEDKKHERHPIFGNIVDEVAYHEKYPTIYHLRKKLVDSTDKADLRLIYLALAHMIKFRGHFLIEGDLNPDNSDVDKLFIQLVQTYNQLFEENPINASGVDAKAILSARLSKSRRLENLIAQLPGEKKNGLFGNLIALSLGLTPNFKSNFDLAEDAKLQLSKDTYDDDLDNLLAQIGDQYADLFLAAKNLSDAILLSDILRVNTEITKAPLSASMIKRYDEHHQDLTLLKALVRQQLPEKYKEIFFDQSKNGYAGYIDGGASQEEFYKFIKPILEKMDGTEELLVKLNREDLLRKQRTFDNGSIPHQIHLGELHAILRRQEDFYPFLKDNREKIEKILTFRIPYYVGPLARGNSRFAWMTRKSEETITPWNFEEVVDKGASAQSFIERMTNFDKNLPNEKVLPKHSLLYEYFTVYNELTKVKYVTEGMRKPAFLSGEQKKAIVDLLFKTNRKVTVKQLKEDYFKKIECFDSVEISGVEDRFNASLGTYHDLLKIIKDKDFLDNEENEDILEDIVLTLTLFEDREMIEERLKTYAHLFDDKVMKQLKRRRYTGWGRLSRKLINGIRDKQSGKTILDFLKSDGFANRNFMQLIHDDSLTFKEDIQKAQVSGQGDSLHEHIANLAGSPAIKKGILQTVKVVDELVKVMGRHKPENIVIEMARENQTTQKGQKNSRERMKRIEEGIKELGSQILKEHPVENTQLQNEKLYLYYLQNGRDMYVDQELDINRLSDYDVDHIVPQSFLKDDSIDNKVLTRSDKARGKSDNVPSEEVVKKMKNYWRQLLNAKLITQRKFDNLTKAERGGLSELDKAGFIKRQLVETRQITKHVAQILDSRMNTKYDENDKLIREVKVITLKSKLVSDFRKDFQFYKVREINNYHHAHDAYLNAVVGTALIKKYPKLESEFVYGDYKVYDVRKMIAKSEQEIGKATAKYFFYSNIMNFFKTEITLANGEIRKRPLIETNGETGEIVWDKGRDFATVRKVLSMPQVNIVKKTEVQTGGFSKESILPKRNSDKLIARKKDWDPKKYGGFDSPTVAYSVLVVAKVEKGKSKKLKSVKELLGITIMERSSFEKNPIDFLEAKGYKEVKKDLIIKLPKYSLFELENGRKRMLASAGELQKGNELALPSKYVNFLYLASHYEKLKGSPEDNEQKQLFVEQHKHYLDEIIEQISEFSKRVILADANLDKVLSAYNKHRDKPIREQAENIIHLFTLTNLGAPAAFKYFDTTIDRKRYTSTKEVLDATLIHQSITGLYETRIDLSQLGGDGGPAPAPGGTLNIEDEYRLHETSKGPDVPLGSTWLSDFPQAWAETGGMGLAVRQAPLIIPLKATSTPVSIKQYPMSQEARLGIKPHIQRLLDQGILVPCQSPWNTPLLPVKKPGTNDYRPVQDLREVNKRVEDIHPTVPNPYNLLSGLPPSHQWYTVLDLKDAFFCLRLHPTSQSLFAFEWRDPEMGISGQLTWTRLPQGFKNSPTLFNEALHRDLADFRIQHPDLILLQYVDDLLLAATSELDCQQGTRALLQTLGDLGYRASAKKAQICQKQVKYLGYLLKEGQRWLTEARKETVMGQPTPKTPRQLREFLGKAGFCRLFIPGFAEMAAPLYPLTKPGTLFEWGPDQQKAYQEIKQALLTAPALGLPDLTKPFELFVDEKQGYAKGVLTQKLGPWRRPVAYLSKKLDPVAAGWPPCLRMVAAIAVLTKDAGKLTMGQPLVILAPHAVEALVKQPPDRWLSNARMTHYQALLLDTDRVQFGPIVALNPATLLPLPEEGLQHDCLDILAEAHGTRPDLTDQPLPDADHTWYTDGSSFLQEGQRKAGAAVTTETEVVWAKALPAGTSAQRAELIALTQALKMAEGKKLNVYTDSRYAFATAHIHGEIYRRRGWLTSEGKEIKNKDEILALLKALFLPKRLSIIHCPGHQKGNRAEARGNRMADQAAREVATRETPETSTLLAGKRTADGSEFEKRTADGSEFESPKKKAKVE

SEQ ID NO: 2569 - protein, 2095 aa, synthetic construct
MPAAKRVKLDGGDKKYSIGLDIGTNSVGWAVITDEYKVPSKKFKVLGNTDRHSIKKNLIGALLFDSGETAEATRLKRTARRRYTRRKNRICYLQEIFSNEMAKVDDSFFHRLEESFLVEEDKKHERHPIFGNIVDEVAYHEKYPTIYHLRKKLVDSTDKADLRLIYLALAHMIKFRGHFLIEGDLNPDNSDVDKLFIQLVQTYNQLFEENPINASGVDAKAILSARLSKSRRLENLIAQLPGEKKNGLFGNLIALSLGLTPNFKSNFDLAEDAKLQLSKDTYDDDLDNLLAQIGDQYADLFLAAKNLSDAILLSDILRVNTEITKAPLSASMIKRYDEHHQDLTLLKALVRQQLPEKYKEIFFDQSKNGYAGYIDGGASQEEFYKFIKPILEKMDGTEELLVKLNREDLLRKQRTFDNGSIPHQIHLGELHAILRRQEDFYPFLKDNREKIEKILTFRIPYYVGPLARGNSRFAWMTRKSEETITPWNFEEVVDKGASAQSFIERMTNFDKNLPNEKVLPKHSLLYEYFTVYNELTKVKYVTEGMRKPAFLSGEQKKAIVDLLFKTNRKVTVKQLKEDYFKKIECFDSVEISGVEDRFNASLGTYHDLLKIIKDKDFLDNEENEDILEDIVLTLTLFEDREMIEERLKTYAHLFDDKVMKQLKRRRYTGWGRLSRKLINGIRDKQSGKTILDFLKSDGFANRNFMQLIHDDSLTFKEDIQKAQVSGQGDSLHEHIANLAGSPAIKKGILQTVKVVDELVKVMGRHKPENIVIEMARENQTTQKGQKNSRERMKRIEEGIKELGSQILKEHPVENTQLQNEKLYLYYLQNGRDMYVDQELDINRLSDYDVDHIVPQSFLKDDSIDNKVLTRSDKARGKSDNVPSEEVVKKMKNYWRQLLNAKLITQRKFDNLTKAERGGLSELDKAGFIKRQLVETRQITKHVAQILDSRMNTKYDENDKLIREVKVITLKSKLVSDFRKDFQFYKVREINNYHHAHDAYLNAVVGTALIKKYPKLESEFVYGDYKVYDVRKMIAKSEQEIGKATAKYFFYSNIMNFFKTEITLANGEIRKRPLIETNGETGEIVWDKGRDFATVRKVLSMPQVNIVKKTEVQTGGFSKESILPKRNSDKLIARKKDWDPKKYGGFDSPTVAYSVLVVAKVEKGKSKKLKSVKELLGITIMERSSFEKNPIDFLEAKGYKEVKKDLIIKLPKYSLFELENGRKRMLASAGELQKGNELALPSKYVNFLYLASHYEKLKGSPEDNEQKQLFVEQHKHYLDEIIEQISEFSKRVILADANLDKVLSAYNKHRDKPIREQAENIIHLFTLTNLGAPAAFKYFDTTIDRKRYTSTKEVLDATLIHQSITGLYETRIDLSQLGGDGGEAAAKEAAAKGGTLNIEDEYRLHETSKGPDVPLGSTWLSDFPQAWAETGGMGLAVRQAPLIIPLKATSTPVSIKQYPMSQEARLGIKPHIQRLLDQGILVPCQSPWNTPLLPVKKPGTNDYRPVQDLREVNKRVEDIHPTVPNPYNLLSGLPPSHQWYTVLDLKDAFFCLRLHPTSQSLFAFEWRDPEMGISGQLTWTRLPQGFKNSPTLFNEALHRDLADFRIQHPDLILLQYVDDLLLAATSELDCQQGTRALLQTLGDLGYRASAKKAQICQKQVKYLGYLLKEGQRWLTEARKETVMGQPTPKTPRQLREFLGKAGFCRLFIPGFAEMAAPLYPLTKPGTLFEWGPDQQKAYQEIKQALLTAPALGLPDLTKPFELFVDEKQGYAKGVLTQKLGPWRRPVAYLSKKLDPVAAGWPPCLRMVAAIAVLTKDAGKLTMGQPLVILAPHAVEALVKQPPDRWLSNARMTHYQALLLDTDRVQFGPIVALNPATLLPLPEEGLQHDCLDILAEAHGTRPDLTDQPLPDADHTWYTDGSSFLQEGQRKAGAAVTTETEVVWAKALPAGTSAQRAELIALTQALKMAEGKKLNVYTDSRYAFATAHIHGEIYRRRGWLTSEGKEIKNKDEILALLKALFLPKRLSIIHCPGHQKGNRAEARGNRMADQAAREVATRETPETSTLLAGKRTADGSEFEKRTADGSEFESPKKKAKVE

SEQ ID NO: 2570 - protein, 2096 aa, synthetic construct
MPAAKRVKLDGGDKKYSIGLDIGTNSVGWAVITDEYKVPSKKFKVLGNTDRHSIKKNLIGALLFDSGETAEATRLKRTARRRYTRRKNRICYLQEIFSNEMAKVDDSFFHRLEESFLVEEDKKHERHPIFGNIVDEVAYHEKYPTIYHLRKKLVDSTDKADLRLIYLALAHMIKFRGHFLIEGDLNPDNSDVDKLFIQLVQTYNQLFEENPINASGVDAKAILSARLSKSRRLENLIAQLPGEKKNGLFGNLIALSLGLTPNFKSNFDLAEDAKLQLSKDTYDDDLDNLLAQIGDQYADLFLAAKNLSDAILLSDILRVNTEITKAPLSASMIKRYDEHHQDLTLLKALVRQQLPEKYKEIFFDQSKNGYAGYIDGGASQEEFYKFIKPILEKMDGTEELLVKLNREDLLRKQRTFDNGSIPHQIHLGELHAILRRQEDFYPFLKDNREKIEKILTFRIPYYVGPLARGNSRFAWMTRKSEETITPWNFEEVVDKGASAQSFIERMTNFDKNLPNEKVLPKHSLLYEYFTVYNELTKVKYVTEGMRKPAFLSGEQKKAIVDLLFKTNRKVTVKQLKEDYFKKIECFDSVEISGVEDRFNASLGTYHDLLKIIKDKDFLDNEENEDILEDIVLTLTLFEDREMIEERLKTYAHLFDDKVMKQLKRRRYTGWGRLSRKLINGIRDKQSGKTILDFLKSDGFANRNFMQLIHDDSLTFKEDIQKAQVSGQGDSLHEHIANLAGSPAIKKGILQTVKVVDELVKVMGRHKPENIVIEMARENQTTQKGQKNSRERMKRIEEGIKELGSQILKEHPVENTQLQNEKLYLYYLQNGRDMYVDQELDINRLSDYDVDHIVPQSFLKDDSIDNKVLTRSDKARGKSDNVPSEEVVKKMKNYWRQLLNAKLITQRKFDNLTKAERGGLSELDKAGFIKRQLVETRQITKHVAQILDSRMNTKYDENDKLIREVKVITLKSKLVSDFRKDFQFYKVREINNYHHAHDAYLNAVVGTALIKKYPKLESEFVYGDYKVYDVRKMIAKSEQEIGKATAKYFFYSNIMNFFKTEITLANGEIRKRPLIETNGETGEIVWDKGRDFATVRKVLSMPQVNIVKKTEVQTGGFSKESILPKRNSDKLIARKKDWDPKKYGGFDSPTVAYSVLVVAKVEKGKSKKLKSVKELLGITIMERSSFEKNPIDFLEAKGYKEVKKDLIIKLPKYSLFELENGRKRMLASAGELQKGNELALPSKYVNFLYLASHYEKLKGSPEDNEQKQLFVEQHKHYLDEIIEQISEFSKRVILADANLDKVLSAYNKHRDKPIREQAENIIHLFTLTNLGAPAAFKYFDTTIDRKRYTSTKEVLDATLIHQSITGLYETRIDLSQLGGDGGGSSGGSEAAAKGGTLNIEDEYRLHETSKGPDVPLGSTWLSDFPQAWAETGGMGLAVRQAPLIIPLKATSTPVSIKQYPMSQEARLGIKPHIQRLLDQGILVPCQSPWNTPLLPVKKPGTNDYRPVQDLREVNKRVEDIHPTVPNPYNLLSGLPPSHQWYTVLDLKDAFFCLRLHPTSQSLFAFEWRDPEMGISGQLTWTRLPQGFKNSPTLFNEALHRDLADFRIQHPDLILLQYVDDLLLAATSELDCQQGTRALLQTLGDLGYRASAKKAQICQKQVKYLGYLLKEGQRWLTEARKETVMGQPTPKTPRQLREFLGKAGFCRLFIPGFAEMAAPLYPLTKPGTLFEWGPDQQKAYQEIKQALLTAPALGLPDLTKPFELFVDEKQGYAKGVLTQKLGPWRRPVAYLSKKLDPVAAGWPPCLRMVAAIAVLTKDAGKLTMGQPLVILAPHAVEALVKQPPDRWLSNARMTHYQALLLDTDRVQFGPIVALNPATLLPLPEEGLQHDCLDILAEAHGTRPDLTDQPLPDADHTWYTDGSSFLQEGQRKAGAAVTTETEVVWAKALPAGTSAQRAELIALTQALKMAEGKKLNVYTDSRYAFATAHIHGEIYRRRGWLTSEGKEIKNKDEILALLKALFLPKRLSIIHCPGHQKGNRAEARGNRMADQAAREVATRETPETSTLLAGKRTADGSEFEKRTADGSEFESPKKKAKVE

SEQ ID NO: 2571 - protein, 2094 aa, synthetic construct
MPAAKRVKLDGGDKKYSIGLDIGTNSVGWAVITDEYKVPSKKFKVLGNTDRHSIKKNLIGALLFDSGETAEATRLKRTARRRYTRRKNRICYLQEIFSNEMAKVDDSFFHRLEESFLVEEDKKHERHPIFGNIVDEVAYHEKYPTIYHLRKKLVDSTDKADLRLIYLALAHMIKFRGHFLIEGDLNPDNSDVDKLFIQLVQTYNQLFEENPINASGVDAKAILSARLSKSRRLENLIAQLPGEKKNGLFGNLIALSLGLTPNFKSNFDLAEDAKLQLSKDTYDDDLDNLLAQIGDQYADLFLAAKNLSDAILLSDILRVNTEITKAPLSASMIKRYDEHHQDLTLLKALVRQQLPEKYKEIFFDQSKNGYAGYIDGGASQEEFYKFIKPILEKMDGTEELLVKLNREDLLRKQRTFDNGSIPHQIHLGELHAILRRQEDFYPFLKDNREKIEKILTFRIPYYVGPLARGNSRFAWMTRKSEETITPWNFEEVVDKGASAQSFIERMTNFDKNLPNEKVLPKHSLLYEYFTVYNELTKVKYVTEGMRKPAFLSGEQKKAIVDLLFKTNRKVTVKQLKEDYFKKIECFDSVEISGVEDRFNASLGTYHDLLKIIKDKDFLDNEENEDILEDIVLTLTLFEDREMIEERLKTYAHLFDDKVMKQLKRRRYTGWGRLSRKLINGIRDKQSGKTILDFLKSDGFANRNFMQLIHDDSLTFKEDIQKAQVSGQGDSLHEHIANLAGSPAIKKGILQTVKVVDELVKVMGRHKPENIVIEMARENQTTQKGQKNSRERMKRIEEGIKELGSQILKEHPVENTQLQNEKLYLYYLQNGRDMYVDQELDINRLSDYDVDHIVPQSFLKDDSIDNKVLTRSDKARGKSDNVPSEEVVKKMKNYWRQLLNAKLITQRKFDNLTKAERGGLSELDKAGFIKRQLVETRQITKHVAQILDSRMNTKYDENDKLIREVKVITLKSKLVSDFRKDFQFYKVREINNYHHAHDAYLNAVVGTALIKKYPKLESEFVYGDYKVYDVRKMIAKSEQEIGKATAKYFFYSNIMNFFKTEITLANGEIRKRPLIETNGETGEIVWDKGRDFATVRKVLSMPQVNIVKKTEVQTGGFSKESILPKRNSDKLIARKKDWDPKKYGGFDSPTVAYSVLVVAKVEKGKSKKLKSVKELLGITIMERSSFEKNPIDFLEAKGYKEVKKDLIIKLPKYSLFELENGRKRMLASAGELQKGNELALPSKYVNFLYLASHYEKLKGSPEDNEQKQLFVEQHKHYLDEIIEQISEFSKRVILADANLDKVLSAYNKHRDKPIREQAENIIHLFTLTNLGAPAAFKYFDTTIDRKRYTSTKEVLDATLIHQSITGLYETRIDLSQLGGDGGGGGGSSGGSGGTLNIEDEYRLHETSKGPDVPLGSTWLSDFPQAWAETGGMGLAVRQAPLIIPLKATSTPVSIKQYPMSQEARLGIKPHIQRLLDQGILVPCQSPWNTPLLPVKKPGTNDYRPVQDLREVNKRVEDIHPTVPNPYNLLSGLPPSHQWYTVLDLKDAFFCLRLHPTSQSLFAFEWRDPEMGISGQLTWTRLPQGFKNSPTLFNEALHRDLADFRIQHPDLILLQYVDDLLLAATSELDCQQGTRALLQTLGDLGYRASAKKAQICQKQVKYLGYLLKEGQRWLTEARKETVMGQPTPKTPRQLREFLGKAGFCRLFIPGFAEMAAPLYPLTKPGTLFEWGPDQQKAYQEIKQALLTAPALGLPDLTKPFELFVDEKQGYAKGVLTQKLGPWRRPVAYLSKKLDPVAAGWPPCLRMVAAIAVLTKDAGKLTMGQPLVILAPHAVEALVKQPPDRWLSNARMTHYQALLLDTDRVQFGPIVALNPATLLPLPEEGLQHDCLDILAEAHGTRPDLTDQPLPDADHTWYTDGSSFLQEGQRKAGAAVTTETEVVWAKALPAGTSAQRAELIALTQALKMAEGKKLNVYTDSRYAFATAHIHGEIYRRRGWLTSEGKEIKNKDEILALLKALFLPKRLSIIHCPGHQKGNRAEARGNRMADQAAREVATRETPETSTLLAGKRTADGSEFEKRTADGSEFESPKKKAKVE

SEQ ID NO: 2572 - protein, 2091 aa, synthetic construct
MPAAKRVKLDGGDKKYSIGLDIGTNSVGWAVITDEYKVPSKKFKVLGNTDRHSIKKNLIGALLFDSGETAEATRLKRTARRRYTRRKNRICYLQEIFSNEMAKVDDSFFHRLEESFLVEEDKKHERHPIFGNIVDEVAYHEKYPTIYHLRKKLVDSTDKADLRLIYLALAHMIKFRGHFLIEGDLNPDNSDVDKLFIQLVQTYNQLFEENPINASGVDAKAILSARLSKSRRLENLIAQLPGEKKNGLFGNLIALSLGLTPNFKSNFDLAEDAKLQLSKDTYDDDLDNLLAQIGDQYADLFLAAKNLSDAILLSDILRVNTEITKAPLSASMIKRYDEHHQDLTLLKALVRQQLPEKYKEIFFDQSKNGYAGYIDGGASQEEFYKFIKPILEKMDGTEELLVKLNREDLLRKQRTFDNGSIPHQIHLGELHAILRRQEDFYPFLKDNREKIEKILTFRIPYYVGPLARGNSRFAWMTRKSEETITPWNFEEVVDKGASAQSFIERMTNFDKNLPNEKVLPKHSLLYEYFTVYNELTKVKYVTEGMRKPAFLSGEQKKAIVDLLFKTNRKVTVKQLKEDYFKKIECFDSVEISGVEDRFNASLGTYHDLLKIIKDKDFLDNEENEDILEDIVLTLTLFEDREMIEERLKTYAHLFDDKVMKQLKRRRYTGWGRLSRKLINGIRDKQSGKTILDFLKSDGFANRNFMQLIHDDSLTFKEDIQKAQVSGQGDSLHEHIANLAGSPAIKKGILQTVKVVDELVKVMGRHKPENIVIEMARENQTTQKGQKNSRERMKRIEEGIKELGSQILKEHPVENTQLQNEKLYLYYLQNGRDMYVDQELDINRLSDYDVDHIVPQSFLKDDSIDNKVLTRSDKARGKSDNVPSEEVVKKMKNYWRQLLNAKLITQRKFDNLTKAERGGLSELDKAGFIKRQLVETRQITKHVAQILDSRMNTKYDENDKLIREVKVITLKSKLVSDFRKDFQFYKVREINNYHHAHDAYLNAVVGTALIKKYPKLESEFVYGDYKVYDVRKMIAKSEQEIGKATAKYFFYSNIMNFFKTEITLANGEIRKRPLIETNGETGEIVWDKGRDFATVRKVLSMPQVNIVKKTEVQTGGFSKESILPKRNSDKLIARKKDWDPKKYGGFDSPTVAYSVLVVAKVEKGKSKKLKSVKELLGITIMERSSFEKNPIDFLEAKGYKEVKKDLIIKLPKYSLFELENGRKRMLASAGELQKGNELALPSKYVNFLYLASHYEKLKGSPEDNEQKQLFVEQHKHYLDEIIEQISEFSKRVILADANLDKVLSAYNKHRDKPIREQAENIIHLFTLTNLGAPAAFKYFDTTIDRKRYTSTKEVLDATLIHQSITGLYETRIDLSQLGGDGGGSSPAPGGTLNIEDEYRLHETSKGPDVPLGSTWLSDFPQAWAETGGMGLAVRQAPLIIPLKATSTPVSIKQYPMSQEARLGIKPHIQRLLDQGILVPCQSPWNTPLLPVKKPGTNDYRPVQDLREVNKRVEDIHPTVPNPYNLLSGLPPSHQWYTVLDLKDAFFCLRLHPTSQSLFAFEWRDPEMGISGQLTWTRLPQGFKNSPTLFNEALHRDLADFRIQHPDLILLQYVDDLLLAATSELDCQQGTRALLQTLGDLGYRASAKKAQICQKQVKYLGYLLKEGQRWLTEARKETVMGQPTPKTPRQLREFLGKAGFCRLFIPGFAEMAAPLYPLTKPGTLFEWGPDQQKAYQEIKQALLTAPALGLPDLTKPFELFVDEKQGYAKGVLTQKLGPWRRPVAYLSKKLDPVAAGWPPCLRMVAAIAVLTKDAGKLTMGQPLVILAPHAVEALVKQPPDRWLSNARMTHYQALLLDTDRVQFGPIVALNPATLLPLPEEGLQHDCLDILAEAHGTRPDLTDQPLPDADHTWYTDGSSFLQEGQRKAGAAVTTETEVVWAKALPAGTSAQRAELIALTQALKMAEGKKLNVYTDSRYAFATAHIHGEIYRRRGWLTSEGKEIKNKDEILALLKALFLPKRLSIIHCPGHQKGNRAEARGNRMADQAAREVATRETPETSTLLAGKRTADGSEFEKRTADGSEFESPKKKAKVE

SEQ ID NO: 2573 - protein, 2094 aa, synthetic construct
MPAAKRVKLDGGDKKYSIGLDIGTNSVGWAVITDEYKVPSKKFKVLGNTDRHSIKKNLIGALLFDSGETAEATRLKRTARRRYTRRKNRICYLQEIFSNEMAKVDDSFFHRLEESFLVEEDKKHERHPIFGNIVDEVAYHEKYPTIYHLRKKLVDSTDKADLRLIYLALAHMIKFRGHFLIEGDLNPDNSDVDKLFIQLVQTYNQLFEENPINASGVDAKAILSARLSKSRRLENLIAQLPGEKKNGLFGNLIALSLGLTPNFKSNFDLAEDAKLQLSKDTYDDDLDNLLAQIGDQYADLFLAAKNLSDAILLSDILRVNTEITKAPLSASMIKRYDEHHQDLTLLKALVRQQLPEKYKEIFFDQSKNGYAGYIDGGASQEEFYKFIKPILEKMDGTEELLVKLNREDLLRKQRTFDNGSIPHQIHLGELHAILRRQEDFYPFLKDNREKIEKILTFRIPYYVGPLARGNSRFAWMTRKSEETITPWNFEEVVDKGASAQSFIERMTNFDKNLPNEKVLPKHSLLYEYFTVYNELTKVKYVTEGMRKPAFLSGEQKKAIVDLLFKTNRKVTVKQLKEDYFKKIECFDSVEISGVEDRFNASLGTYHDLLKIIKDKDFLDNEENEDILEDIVLTLTLFEDREMIEERLKTYAHLFDDKVMKQLKRRRYTGWGRLSRKLINGIRDKQSGKTILDFLKSDGFANRNFMQLIHDDSLTFKEDIQKAQVSGQGDSLHEHIANLAGSPAIKKGILQTVKVVDELVKVMGRHKPENIVIEMARENQTTQKGQKNSRERMKRIEEGIKELGSQILKEHPVENTQLQNEKLYLYYLQNGRDMYVDQELDINRLSDYDVDHIVPQSFLKDDSIDNKVLTRSDKARGKSDNVPSEEVVKKMKNYWRQLLNAKLITQRKFDNLTKAERGGLSELDKAGFIKRQLVETRQITKHVAQILDSRMNTKYDENDKLIREVKVITLKSKLVSDFRKDFQFYKVREINNYHHAHDAYLNAVVGTALIKKYPKLESEFVYGDYKVYDVRKMIAKSEQEIGKATAKYFFYSNIMNFFKTEITLANGEIRKRPLIETNGETGEIVWDKGRDFATVRKVLSMPQVNIVKKTEVQTGGFSKESILPKRNSDKLIARKKDWDPKKYGGFDSPTVAYSVLVVAKVEKGKSKKLKSVKELLGITIMERSSFEKNPIDFLEAKGYKEVKKDLIIKLPKYSLFELENGRKRMLASAGELQKGNELALPSKYVNFLYLASHYEKLKGSPEDNEQKQLFVEQHKHYLDEIIEQISEFSKRVILADANLDKVLSAYNKHRDKPIREQAENIIHLFTLTNLGAPAAFKYFDTTIDRKRYTSTKEVLDATLIHQSITGLYETRIDLSQLGGDGGGGSPAPGGGGGTLNIEDEYRLHETSKGPDVPLGSTWLSDFPQAWAETGGMGLAVRQAPLIIPLKATSTPVSIKQYPMSQEARLGIKPHIQRLLDQGILVPCQSPWNTPLLPVKKPGTNDYRPVQDLREVNKRVEDIHPTVPNPYNLLSGLPPSHQWYTVLDLKDAFFCLRLHPTSQSLFAFEWRDPEMGISGQLTWTRLPQGFKNSPTLFNEALHRDLADFRIQHPDLILLQYVDDLLLAATSELDCQQGTRALLQTLGDLGYRASAKKAQICQKQVKYLGYLLKEGQRWLTEARKETVMGQPTPKTPRQLREFLGKAGFCRLFIPGFAEMAAPLYPLTKPGTLFEWGPDQQKAYQEIKQALLTAPALGLPDLTKPFELFVDEKQGYAKGVLTQKLGPWRRPVAYLSKKLDPVAAGWPPCLRMVAAIAVLTKDAGKLTMGQPLVILAPHAVEALVKQPPDRWLSNARMTHYQALLLDTDRVQFGPIVALNPATLLPLPEEGLQHDCLDILAEAHGTRPDLTDQPLPDADHTWYTDGSSFLQEGQRKAGAAVTTETEVVWAKALPAGTSAQRAELIALTQALKMAEGKKLNVYTDSRYAFATAHIHGEIYRRRGWLTSEGKEIKNKDEILALLKALFLPKRLSIIHCPGHQKGNRAEARGNRMADQAAREVATRETPETSTLLAGKRTADGSEFEKRTADGSEFESPKKKAKVE

SEQ ID NO: 2574 - protein, 2094 aa, synthetic construct
MPAAKRVKLDGGDKKYSIGLDIGTNSVGWAVITDEYKVPSKKFKVLGNTDRHSIKKNLIGALLFDSGETAEATRLKRTARRRYTRRKNRICYLQEIFSNEMAKVDDSFFHRLEESFLVEEDKKHERHPIFGNIVDEVAYHEKYPTIYHLRKKLVDSTDKADLRLIYLALAHMIKFRGHFLIEGDLNPDNSDVDKLFIQLVQTYNQLFEENPINASGVDAKAILSARLSKSRRLENLIAQLPGEKKNGLFGNLIALSLGLTPNFKSNFDLAEDAKLQLSKDTYDDDLDNLLAQIGDQYADLFLAAKNLSDAILLSDILRVNTEITKAPLSASMIKRYDEHHQDLTLLKALVRQQLPEKYKEIFFDQSKNGYAGYIDGGASQEEFYKFIKPILEKMDGTEELLVKLNREDLLRKQRTFDNGSIPHQIHLGELHAILRRQEDFYPFLKDNREKIEKILTFRIPYYVGPLARGNSRFAWMTRKSEETITPWNFEEVVDKGASAQSFIERMTNFDKNLPNEKVLPKHSLLYEYFTVYNELTKVKYVTEGMRKPAFLSGEQKKAIVDLLFKTNRKVTVKQLKEDYFKKIECFDSVEISGVEDRFNASLGTYHDLLKIIKDKDFLDNEENEDILEDIVLTLTLFEDREMIEERLKTYAHLFDDKVMKQLKRRRYTGWGRLSRKLINGIRDKQSGKTILDFLKSDGFANRNFMQLIHDDSLTFKEDIQKAQVSGQGDSLHEHIANLAGSPAIKKGILQTVKVVDELVKVMGRHKPENIVIEMARENQTTQKGQKNSRERMKRIEEGIKELGSQILKEHPVENTQLQNEKLYLYYLQNGRDMYVDQELDINRLSDYDVDHIVPQSFLKDDSIDNKVLTRSDKARGKSDNVPSEEVVKKMKNYWRQLLNAKLITQRKFDNLTKAERGGLSELDKAGFIKRQLVETRQITKHVAQILDSRMNTKYDENDKLIREVKVITLKSKLVSDFRKDFQFYKVREINNYHHAHDAYLNAVVGTALIKKYPKLESEFVYGDYKVYDVRKMIAKSEQEIGKATAKYFFYSNIMNFFKTEITLANGEIRKRPLIETNGETGEIVWDKGRDFATVRKVLSMPQVNIVKKTEVQTGGFSKESILPKRNSDKLIARKKDWDPKKYGGFDSPTVAYSVLVVAKVEKGKSKKLKSVKELLGITIMERSSFEKNPIDFLEAKGYKEVKKDLIIKLPKYSLFELENGRKRMLASAGELQKGNELALPSKYVNFLYLASHYEKLKGSPEDNEQKQLFVEQHKHYLDEIIEQISEFSKRVILADANLDKVLSAYNKHRDKPIREQAENIIHLFTLTNLGAPAAFKYFDTTIDRKRYTSTKEVLDATLIHQSITGLYETRIDLSQLGGDGGPAPGGSGGGGGTLNIEDEYRLHETSKGPDVPLGSTWLSDFPQAWAETGGMGLAVRQAPLIIPLKATSTPVSIKQYPMSQEARLGIKPHIQRLLDQGILVPCQSPWNTPLLPVKKPGTNDYRPVQDLREVNKRVEDIHPTVPNPYNLLSGLPPSHQWYTVLDLKDAFFCLRLHPTSQSLFAFEWRDPEMGISGQLTWTRLPQGFKNSPTLFNEALHRDLADFRIQHPDLILLQYVDDLLLAATSELDCQQGTRALLQTLGDLGYRASAKKAQICQKQVKYLGYLLKEGQRWLTEARKETVMGQPTPKTPRQLREFLGKAGFCRLFIPGFAEMAAPLYPLTKPGTLFEWGPDQQKAYQEIKQALLTAPALGLPDLTKPFELFVDEKQGYAKGVLTQKLGPWRRPVAYLSKKLDPVAAGWPPCLRMVAAIAVLTKDAGKLTMGQPLVILAPHAVEALVKQPPDRWLSNARMTHYQALLLDTDRVQFGPIVALNPATLLPLPEEGLQHDCLDILAEAHGTRPDLTDQPLPDADHTWYTDGSSFLQEGQRKAGAAVTTETEVVWAKALPAGTSAQRAELIALTQALKMAEGKKLNVYTDSRYAFATAHIHGEIYRRRGWLTSEGKEIKNKDEILALLKALFLPKRLSIIHCPGHQKGNRAEARGNRMADQAAREVATRETPETSTLLAGKRTADGSEFEKRTADGSEFESPKKKAKVE

SEQ ID NO: 2575 - protein, 2096 aa, synthetic construct
MPAAKRVKLDGGDKKYSIGLDIGTNSVGWAVITDEYKVPSKKFKVLGNTDRHSIKKNLIGALLFDSGETAEATRLKRTARRRYTRRKNRICYLQEIFSNEMAKVDDSFFHRLEESFLVEEDKKHERHPIFGNIVDEVAYHEKYPTIYHLRKKLVDSTDKADLRLIYLALAHMIKFRGHFLIEGDLNPDNSDVDKLFIQLVQTYNQLFEENPINASGVDAKAILSARLSKSRRLENLIAQLPGEKKNGLFGNLIALSLGLTPNFKSNFDLAEDAKLQLSKDTYDDDLDNLLAQIGDQYADLFLAAKNLSDAILLSDILRVNTEITKAPLSASMIKRYDEHHQDLTLLKALVRQQLPEKYKEIFFDQSKNGYAGYIDGGASQEEFYKFIKPILEKMDGTEELLVKLNREDLLRKQRTFDNGSIPHQIHLGELHAILRRQEDFYPFLKDNREKIEKILTFRIPYYVGPLARGNSRFAWMTRKSEETITPWNFEEVVDKGASAQSFIERMTNFDKNLPNEKVLPKHSLLYEYFTVYNELTKVKYVTEGMRKPAFLSGEQKKAIVDLLFKTNRKVTVKQLKEDYFKKIECFDSVEISGVEDRFNASLGTYHDLLKIIKDKDFLDNEENEDILEDIVLTLTLFEDREMIEERLKTYAHLFDDKVMKQLKRRRYTGWGRLSRKLINGIRDKQSGKTILDFLKSDGFANRNFMQLIHDDSLTFKEDIQKAQVSGQGDSLHEHIANLAGSPAIKKGILQTVKVVDELVKVMGRHKPENIVIEMARENQTTQKGQKNSRERMKRIEEGIKELGSQILKEHPVENTQLQNEKLYLYYLQNGRDMYVDQELDINRLSDYDVDHIVPQSFLKDDSIDNKVLTRSDKARGKSDNVPSEEVVKKMKNYWRQLLNAKLITQRKFDNLTKAERGGLSELDKAGFIKRQLVETRQITKHVAQILDSRMNTKYDENDKLIREVKVITLKSKLVSDFRKDFQFYKVREINNYHHAHDAYLNAVVGTALIKKYPKLESEFVYGDYKVYDVRKMIAKSEQEIGKATAKYFFYSNIMNFFKTEITLANGEIRKRPLIETNGETGEIVWDKGRDFATVRKVLSMPQVNIVKKTEVQTGGFSKESILPKRNSDKLIARKKDWDPKKYGGFDSPTVAYSVLVVAKVEKGKSKKLKSVKELLGITIMERSSFEKNPIDFLEAKGYKEVKKDLIIKLPKYSLFELENGRKRMLASAGELQKGNELALPSKYVNFLYLASHYEKLKGSPEDNEQKQLFVEQHKHYLDEIIEQISEFSKRVILADANLDKVLSAYNKHRDKPIREQAENIIHLFTLTNLGAPAAFKYFDTTIDRKRYTSTKEVLDATLIHQSITGLYETRIDLSQLGGDGGGGGGSSEAAAKGGTLNIEDEYRLHETSKGPDVPLGSTWLSDFPQAWAETGGMGLAVRQAPLIIPLKATSTPVSIKQYPMSQEARLGIKPHIQRLLDQGILVPCQSPWNTPLLPVKKPGTNDYRPVQDLREVNKRVEDIHPTVPNPYNLLSGLPPSHQWYTVLDLKDAFFCLRLHPTSQSLFAFEWRDPEMGISGQLTWTRLPQGFKNSPTLFNEALHRDLADFRIQHPDLILLQYVDDLLLAATSELDCQQGTRALLQTLGDLGYRASAKKAQICQKQVKYLGYLLKEGQRWLTEARKETVMGQPTPKTPRQLREFLGKAGFCRLFIPGFAEMAAPLYPLTKPGTLFEWGPDQQKAYQEIKQALLTAPALGLPDLTKPFELFVDEKQGYAKGVLTQKLGPWRRPVAYLSKKLDPVAAGWPPCLRMVAAIAVLTKDAGKLTMGQPLVILAPHAVEALVKQPPDRWLSNARMTHYQALLLDTDRVQFGPIVALNPATLLPLPEEGLQHDCLDILAEAHGTRPDLTDQPLPDADHTWYTDGSSFLQEGQRKAGAAVTTETEVVWAKALPAGTSAQRAELIALTQALKMAEGKKLNVYTDSRYAFATAHIHGEIYRRRGWLTSEGKEIKNKDEILALLKALFLPKRLSIIHCPGHQKGNRAEARGNRMADQAAREVATRETPETSTLLAGKRTADGSEFEKRTADGSEFESPKKKAKVE

SEQ ID NO: 2576 - protein, 2096 aa, synthetic construct
MPAAKRVKLDGGDKKYSIGLDIGTNSVGWAVITDEYKVPSKKFKVLGNTDRHSIKKNLIGALLFDSGETAEATRLKRTARRRYTRRKNRICYLQEIFSNEMAKVDDSFFHRLEESFLVEEDKKHERHPIFGNIVDEVAYHEKYPTIYHLRKKLVDSTDKADLRLIYLALAHMIKFRGHFLIEGDLNPDNSDVDKLFIQLVQTYNQLFEENPINASGVDAKAILSARLSKSRRLENLIAQLPGEKKNGLFGNLIALSLGLTPNFKSNFDLAEDAKLQLSKDTYDDDLDNLLAQIGDQYADLFLAAKNLSDAILLSDILRVNTEITKAPLSASMIKRYDEHHQDLTLLKALVRQQLPEKYKEIFFDQSKNGYAGYIDGGASQEEFYKFIKPILEKMDGTEELLVKLNREDLLRKQRTFDNGSIPHQIHLGELHAILRRQEDFYPFLKDNREKIEKILTFRIPYYVGPLARGNSRFAWMTRKSEETITPWNFEEVVDKGASAQSFIERMTNFDKNLPNEKVLPKHSLLYEYFTVYNELTKVKYVTEGMRKPAFLSGEQKKAIVDLLFKTNRKVTVKQLKEDYFKKIECFDSVEISGVEDRFNASLGTYHDLLKIIKDKDFLDNEENEDILEDIVLTLTLFEDREMIEERLKTYAHLFDDKVMKQLKRRRYTGWGRLSRKLINGIRDKQSGKTILDFLKSDGFANRNFMQLIHDDSLTFKEDIQKAQVSGQGDSLHEHIANLAGSPAIKKGILQTVKVVDELVKVMGRHKPENIVIEMARENQTTQKGQKNSRERMKRIEEGIKELGSQILKEHPVENTQLQNEKLYLYYLQNGRDMYVDQELDINRLSDYDVDHIVPQSFLKDDSIDNKVLTRSDKARGKSDNVPSEEVVKKMKNYWRQLLNAKLITQRKFDNLTKAERGGLSELDKAGFIKRQLVETRQITKHVAQILDSRMNTKYDENDKLIREVKVITLKSKLVSDFRKDFQFYKVREINNYHHAHDAYLNAVVGTALIKKYPKLESEFVYGDYKVYDVRKMIAKSEQEIGKATAKYFFYSNIMNFFKTEITLANGEIRKRPLIETNGETGEIVWDKGRDFATVRKVLSMPQVNIVKKTEVQTGGFSKESILPKRNSDKLIARKKDWDPKKYGGFDSPTVAYSVLVVAKVEKGKSKKLKSVKELLGITIMERSSFEKNPIDFLEAKGYKEVKKDLIIKLPKYSLFELENGRKRMLASAGELQKGNELALPSKYVNFLYLASHYEKLKGSPEDNEQKQLFVEQHKHYLDEIIEQISEFSKRVILADANLDKVLSAYNKHRDKPIREQAENIIHLFTLTNLGAPAAFKYFDTTIDRKRYTSTKEVLDATLIHQSITGLYETRIDLSQLGGDGGGGGEAAAKGSSGGTLNIEDEYRLHETSKGPDVPLGSTWLSDFPQAWAETGGMGLAVRQAPLIIPLKATSTPVSIKQYPMSQEARLGIKPHIQRLLDQGILVPCQSPWNTPLLPVKKPGTNDYRPVQDLREVNKRVEDIHPTVPNPYNLLSGLPPSHQWYTVLDLKDAFFCLRLHPTSQSLFAFEWRDPEMGISGQLTWTRLPQGFKNSPTLFNEALHRDLADFRIQHPDLILLQYVDDLLLAATSELDCQQGTRALLQTLGDLGYRASAKKAQICQKQVKYLGYLLKEGQRWLTEARKETVMGQPTPKTPRQLREFLGKAGFCRLFIPGFAEMAAPLYPLTKPGTLFEWGPDQQKAYQEIKQALLTAPALGLPDLTKPFELFVDEKQGYAKGVLTQKLGPWRRPVAYLSKKLDPVAAGWPPCLRMVAAIAVLTKDAGKLTMGQPLVILAPHAVEALVKQPPDRWLSNARMTHYQALLLDTDRVQFGPIVALNPATLLPLPEEGLQHDCLDILAEAHGTRPDLTDQPLPDADHTWYTDGSSFLQEGQRKAGAAVTTETEVVWAKALPAGTSAQRAELIALTQALKMAEGKKLNVYTDSRYAFATAHIHGEIYRRRGWLTSEGKEIKNKDEILALLKALFLPKRLSIIHCPGHQKGNRAEARGNRMADQAAREVATRETPETSTLLAGKRTADGSEFEKRTADGSEFESPKKKAKVE

SEQ ID NO: 2577 - protein, 2096 aa, synthetic construct
MPAAKRVKLDGGDKKYSIGLDIGTNSVGWAVITDEYKVPSKKFKVLGNTDRHSIKKNLIGALLFDSGETAEATRLKRTARRRYTRRKNRICYLQEIFSNEMAKVDDSFFHRLEESFLVEEDKKHERHPIFGNIVDEVAYHEKYPTIYHLRKKLVDSTDKADLRLIYLALAHMIKFRGHFLIEGDLNPDNSDVDKLFIQLVQTYNQLFEENPINASGVDAKAILSARLSKSRRLENLIAQLPGEKKNGLFGNLIALSLGLTPNFKSNFDLAEDAKLQLSKDTYDDDLDNLLAQIGDQYADLFLAAKNLSDAILLSDILRVNTEITKAPLSASMIKRYDEHHQDLTLLKALVRQQLPEKYKEIFFDQSKNGYAGYIDGGASQEEFYKFIKPILEKMDGTEELLVKLNREDLLRKQRTFDNGSIPHQIHLGELHAILRRQEDFYPFLKDNREKIEKILTFRIPYYVGPLARGNSRFAWMTRKSEETITPWNFEEVVDKGASAQSFIERMTNFDKNLPNEKVLPKHSLLYEYFTVYNELTKVKYVTEGMRKPAFLSGEQKKAIVDLLFKTNRKVTVKQLKEDYFKKIECFDSVEISGVEDRFNASLGTYHDLLKIIKDKDFLDNEENEDILEDIVLTLTLFEDREMIEERLKTYAHLFDDKVMKQLKRRRYTGWGRLSRKLINGIRDKQSGKTILDFLKSDGFANRNFMQLIHDDSLTFKEDIQKAQVSGQGDSLHEHIANLAGSPAIKKGILQTVKVVDELVKVMGRHKPENIVIEMARENQTTQKGQKNSRERMKRIEEGIKELGSQILKEHPVENTQLQNEKLYLYYLQNGRDMYVDQELDINRLSDYDVDHIVPQSFLKDDSIDNKVLTRSDKARGKSDNVPSEEVVKKMKNYWRQLLNAKLITQRKFDNLTKAERGGLSELDKAGFIKRQLVETRQITKHVAQILDSRMNTKYDENDKLIREVKVITLKSKLVSDFRKDFQFYKVREINNYHHAHDAYLNAVVGTALIKKYPKLESEFVYGDYKVYDVRKMIAKSEQEIGKATAKYFFYSNIMNFFKTEITLANGEIRKRPLIETNGETGEIVWDKGRDFATVRKVLSMPQVNIVKKTEVQTGGFSKESILPKRNSDKLIARKKDWDPKKYGGFDSPTVAYSVLVVAKVEKGKSKKLKSVKELLGITIMERSSFEKNPIDFLEAKGYKEVKKDLIIKLPKYSLFELENGRKRMLASAGELQKGNELALPSKYVNFLYLASHYEKLKGSPEDNEQKQLFVEQHKHYLDEIIEQISEFSKRVILADANLDKVLSAYNKHRDKPIREQAENIIHLFTLTNLGAPAAFKYFDTTIDRKRYTSTKEVLDATLIHQSITGLYETRIDLSQLGGDGGPAPEAAAKGGSGGTLNIEDEYRLHETSKGPDVPLGSTWLSDFPQAWAETGGMGLAVRQAPLIIPLKATSTPVSIKQYPMSQEARLGIKPHIQRLLDQGILVPCQSPWNTPLLPVKKPGTNDYRPVQDLREVNKRVEDIHPTVPNPYNLLSGLPPSHQWYTVLDLKDAFFCLRLHPTSQSLFAFEWRDPEMGISGQLTWTRLPQGFKNSPTLFNEALHRDLADFRIQHPDLILLQYVDDLLLAATSELDCQQGTRALLQTLGDLGYRASAKKAQICQKQVKYLGYLLKEGQRWLTEARKETVMGQPTPKTPRQLREFLGKAGFCRLFIPGFAEMAAPLYPLTKPGTLFEWGPDQQKAYQEIKQALLTAPALGLPDLTKPFELFVDEKQGYAKGVLTQKLGPWRRPVAYLSKKLDPVAAGWPPCLRMVAAIAVLTKDAGKLTMGQPLVILAPHAVEALVKQPPDRWLSNARMTHYQALLLDTDRVQFGPIVALNPATLLPLPEEGLQHDCLDILAEAHGTRPDLTDQPLPDADHTWYTDGSSFLQEGQRKAGAAVTTETEVVWAKALPAGTSAQRAELIALTQALKMAEGKKLNVYTDSRYAFATAHIHGEIYRRRGWLTSEGKEIKNKDEILALLKALFLPKRLSIIHCPGHQKGNRAEARGNRMADQAAREVATRETPETSTLLAGKRTADGSEFEKRTADGSEFESPKKKAKVE

SEQ ID NO: 2578 - protein, 2096 aa, synthetic construct
MPAAKRVKLDGGDKKYSIGLDIGTNSVGWAVITDEYKVPSKKFKVLGNTDRHSIKKNLIGALLFDSGETAEATRLKRTARRRYTRRKNRICYLQEIFSNEMAKVDDSFFHRLEESFLVEEDKKHERHPIFGNIVDEVAYHEKYPTIYHLRKKLVDSTDKADLRLIYLALAHMIKFRGHFLIEGDLNPDNSDVDKLFIQLVQTYNQLFEENPINASGVDAKAILSARLSKSRRLENLIAQLPGEKKNGLFGNLIALSLGLTPNFKSNFDLAEDAKLQLSKDTYDDDLDNLLAQIGDQYADLFLAAKNLSDAILLSDILRVNTEITKAPLSASMIKRYDEHHQDLTLLKALVRQQLPEKYKEIFFDQSKNGYAGYIDGGASQEEFYKFIKPILEKMDGTEELLVKLNREDLLRKQRTFDNGSIPHQIHLGELHAILRRQEDFYPFLKDNREKIEKILTFRIPYYVGPLARGNSRFAWMTRKSEETITPWNFEEVVDKGASAQSFIERMTNFDKNLPNEKVLPKHSLLYEYFTVYNELTKVKYVTEGMRKPAFLSGEQKKAIVDLLFKTNRKVTVKQLKEDYFKKIECFDSVEISGVEDRFNASLGTYHDLLKIIKDKDFLDNEENEDILEDIVLTLTLFEDREMIEERLKTYAHLFDDKVMKQLKRRRYTGWGRLSRKLINGIRDKQSGKTILDFLKSDGFANRNFMQLIHDDSLTFKEDIQKAQVSGQGDSLHEHIANLAGSPAIKKGILQTVKVVDELVKVMGRHKPENIVIEMARENQTTQKGQKNSRERMKRIEEGIKELGSQILKEHPVENTQLQNEKLYLYYLQNGRDMYVDQELDINRLSDYDVDHIVPQSFLKDDSIDNKVLTRSDKARGKSDNVPSEEVVKKMKNYWRQLLNAKLITQRKFDNLTKAERGGLSELDKAGFIKRQLVETRQITKHVAQILDSRMNTKYDENDKLIREVKVITLKSKLVSDFRKDFQFYKVREINNYHHAHDAYLNAVVGTALIKKYPKLESEFVYGDYKVYDVRKMIAKSEQEIGKATAKYFFYSNIMNFFKTEITLANGEIRKRPLIETNGETGEIVWDKGRDFATVRKVLSMPQVNIVKKTEVQTGGFSKESILPKRNSDKLIARKKDWDPKKYGGFDSPTVAYSVLVVAKVEKGKSKKLKSVKELLGITIMERSSFEKNPIDFLEAKGYKEVKKDLIIKLPKYSLFELENGRKRMLASAGELQKGNELALPSKYVNFLYLASHYEKLKGSPEDNEQKQLFVEQHKHYLDEIIEQISEFSKRVILADANLDKVLSAYNKHRDKPIREQAENIIHLFTLTNLGAPAAFKYFDTTIDRKRYTSTKEVLDATLIHQSITGLYETRIDLSQLGGDGGGGSEAAAKGGGGGTLNIEDEYRLHETSKGPDVPLGSTWLSDFPQAWAETGGMGLAVRQAPLIIPLKATSTPVSIKQYPMSQEARLGIKPHIQRLLDQGILVPCQSPWNTPLLPVKKPGTNDYRPVQDLREVNKRVEDIHPTVPNPYNLLSGLPPSHQWYTVLDLKDAFFCLRLHPTSQSLFAFEWRDPEMGISGQLTWTRLPQGFKNSPTLFNEALHRDLADFRIQHPDLILLQYVDDLLLAATSELDCQQGTRALLQTLGDLGYRASAKKAQICQKQVKYLGYLLKEGQRWLTEARKETVMGQPTPKTPRQLREFLGKAGFCRLFIPGFAEMAAPLYPLTKPGTLFEWGPDQQKAYQEIKQALLTAPALGLPDLTKPFELFVDEKQGYAKGVLTQKLGPWRRPVAYLSKKLDPVAAGWPPCLRMVAAIAVLTKDAGKLTMGQPLVILAPHAVEALVKQPPDRWLSNARMTHYQALLLDTDRVQFGPIVALNPATLLPLPEEGLQHDCLDILAEAHGTRPDLTDQPLPDADHTWYTDGSSFLQEGQRKAGAAVTTETEVVWAKALPAGTSAQRAELIALTQALKMAEGKKLNVYTDSRYAFATAHIHGEIYRRRGWLTSEGKEIKNKDEILALLKALFLPKRLSIIHCPGHQKGNRAEARGNRMADQAAREVATRETPETSTLLAGKRTADGSEFEKRTADGSEFESPKKKAKVE

SEQ ID NO: 2579 - protein, 2090 aa, synthetic construct
MPAAKRVKLDGGDKKYSIGLDIGTNSVGWAVITDEYKVPSKKFKVLGNTDRHSIKKNLIGALLFDSGETAEATRLKRTARRRYTRRKNRICYLQEIFSNEMAKVDDSFFHRLEESFLVEEDKKHERHPIFGNIVDEVAYHEKYPTIYHLRKKLVDSTDKADLRLIYLALAHMIKFRGHFLIEGDLNPDNSDVDKLFIQLVQTYNQLFEENPINASGVDAKAILSARLSKSRRLENLIAQLPGEKKNGLFGNLIALSLGLTPNFKSNFDLAEDAKLQLSKDTYDDDLDNLLAQIGDQYADLFLAAKNLSDAILLSDILRVNTEITKAPLSASMIKRYDEHHQDLTLLKALVRQQLPEKYKEIFFDQSKNGYAGYIDGGASQEEFYKFIKPILEKMDGTEELLVKLNREDLLRKQRTFDNGSIPHQIHLGELHAILRRQEDFYPFLKDNREKIEKILTFRIPYYVGPLARGNSRFAWMTRKSEETITPWNFEEVVDKGASAQSFIERMTNFDKNLPNEKVLPKHSLLYEYFTVYNELTKVKYVTEGMRKPAFLSGEQKKAIVDLLFKTNRKVTVKQLKEDYFKKIECFDSVEISGVEDRFNASLGTYHDLLKIIKDKDFLDNEENEDILEDIVLTLTLFEDREMIEERLKTYAHLFDDKVMKQLKRRRYTGWGRLSRKLINGIRDKQSGKTILDFLKSDGFANRNFMQLIHDDSLTFKEDIQKAQVSGQGDSLHEHIANLAGSPAIKKGILQTVKVVDELVKVMGRHKPENIVIEMARENQTTQKGQKNSRERMKRIEEGIKELGSQILKEHPVENTQLQNEKLYLYYLQNGRDMYVDQELDINRLSDYDVDHIVPQSFLKDDSIDNKVLTRSDKARGKSDNVPSEEVVKKMKNYWRQLLNAKLITQRKFDNLTKAERGGLSELDKAGFIKRQLVETRQITKHVAQILDSRMNTKYDENDKLIREVKVITLKSKLVSDFRKDFQFYKVREINNYHHAHDAYLNAVVGTALIKKYPKLESEFVYGDYKVYDVRKMIAKSEQEIGKATAKYFFYSNIMNFFKTEITLANGEIRKRPLIETNGETGEIVWDKGRDFATVRKVLSMPQVNIVKKTEVQTGGFSKESILPKRNSDKLIARKKDWDPKKYGGFDSPTVAYSVLVVAKVEKGKSKKLKSVKELLGITIMERSSFEKNPIDFLEAKGYKEVKKDLIIKLPKYSLFELENGRKRMLASAGELQKGNELALPSKYVNFLYLASHYEKLKGSPEDNEQKQLFVEQHKHYLDEIIEQISEFSKRVILADANLDKVLSAYNKHRDKPIREQAENIIHLFTLTNLGAPAAFKYFDTTIDRKRYTSTKEVLDATLIHQSITGLYETRIDLSQLGGDGGGGGGGGGTLNIEDEYRLHETSKGPDVPLGSTWLSDFPQAWAETGGMGLAVRQAPLIIPLKATSTPVSIKQYPMSQEARLGIKPHIQRLLDQGILVPCQSPWNTPLLPVKKPGTNDYRPVQDLREVNKRVEDIHPTVPNPYNLLSGLPPSHQWYTVLDLKDAFFCLRLHPTSQSLFAFEWRDPEMGISGQLTWTRLPQGFKNSPTLFNEALHRDLADFRIQHPDLILLQYVDDLLLAATSELDCQQGTRALLQTLGDLGYRASAKKAQICQKQVKYLGYLLKEGQRWLTEARKETVMGQPTPKTPRQLREFLGKAGFCRLFIPGFAEMAAPLYPLTKPGTLFEWGPDQQKAYQEIKQALLTAPALGLPDLTKPFELFVDEKQGYAKGVLTQKLGPWRRPVAYLSKKLDPVAAGWPPCLRMVAAIAVLTKDAGKLTMGQPLVILAPHAVEALVKQPPDRWLSNARMTHYQALLLDTDRVQFGPIVALNPATLLPLPEEGLQHDCLDILAEAHGTRPDLTDQPLPDADHTWYTDGSSFLQEGQRKAGAAVTTETEVVWAKALPAGTSAQRAELIALTQALKMAEGKKLNVYTDSRYAFATAHIHGEIYRRRGWLTSEGKEIKNKDEILALLKALFLPKRLSIIHCPGHQKGNRAEARGNRMADQAAREVATRETPETSTLLAGKRTADGSEFEKRTADGSEFESPKKKAKVE

SEQ ID NO: 2580 - protein, 2094 aa, synthetic construct
MPAAKRVKLDGGDKKYSIGLDIGTNSVGWAVITDEYKVPSKKFKVLGNTDRHSIKKNLIGALLFDSGETAEATRLKRTARRRYTRRKNRICYLQEIFSNEMAKVDDSFFHRLEESFLVEEDKKHERHPIFGNIVDEVAYHEKYPTIYHLRKKLVDSTDKADLRLIYLALAHMIKFRGHFLIEGDLNPDNSDVDKLFIQLVQTYNQLFEENPINASGVDAKAILSARLSKSRRLENLIAQLPGEKKNGLFGNLIALSLGLTPNFKSNFDLAEDAKLQLSKDTYDDDLDNLLAQIGDQYADLFLAAKNLSDAILLSDILRVNTEITKAPLSASMIKRYDEHHQDLTLLKALVRQQLPEKYKEIFFDQSKNGYAGYIDGGASQEEFYKFIKPILEKMDGTEELLVKLNREDLLRKQRTFDNGSIPHQIHLGELHAILRRQEDFYPFLKDNREKIEKILTFRIPYYVGPLARGNSRFAWMTRKSEETITPWNFEEVVDKGASAQSFIERMTNFDKNLPNEKVLPKHSLLYEYFTVYNELTKVKYVTEGMRKPAFLSGEQKKAIVDLLFKTNRKVTVKQLKEDYFKKIECFDSVEISGVEDRFNASLGTYHDLLKIIKDKDFLDNEENEDILEDIVLTLTLFEDREMIEERLKTYAHLFDDKVMKQLKRRRYTGWGRLSRKLINGIRDKQSGKTILDFLKSDGFANRNFMQLIHDDSLTFKEDIQKAQVSGQGDSLHEHIANLAGSPAIKKGILQTVKVVDELVKVMGRHKPENIVIEMARENQTTQKGQKNSRERMKRIEEGIKELGSQILKEHPVENTQLQNEKLYLYYLQNGRDMYVDQELDINRLSDYDVDHIVPQSFLKDDSIDNKVLTRSDKARGKSDNVPSEEVVKKMKNYWRQLLNAKLITQRKFDNLTKAERGGLSELDKAGFIKRQLVETRQITKHVAQILDSRMNTKYDENDKLIREVKVITLKSKLVSDFRKDFQFYKVREINNYHHAHDAYLNAVVGTALIKKYPKLESEFVYGDYKVYDVRKMIAKSEQEIGKATAKYFFYSNIMNFFKTEITLANGEIRKRPLIETNGETGEIVWDKGRDFATVRKVLSMPQVNIVKKTEVQTGGFSKESILPKRNSDKLIARKKDWDPKKYGGFDSPTVAYSVLVVAKVEKGKSKKLKSVKELLGITIMERSSFEKNPIDFLEAKGYKEVKKDLIIKLPKYSLFELENGRKRMLASAGELQKGNELALPSKYVNFLYLASHYEKLKGSPEDNEQKQLFVEQHKHYLDEIIEQISEFSKRVILADANLDKVLSAYNKHRDKPIREQAENIIHLFTLTNLGAPAAFKYFDTTIDRKRYTSTKEVLDATLIHQSITGLYETRIDLSQLGGDGGGSSPAPGGGGGTLNIEDEYRLHETSKGPDVPLGSTWLSDFPQAWAETGGMGLAVRQAPLIIPLKATSTPVSIKQYPMSQEARLGIKPHIQRLLDQGILVPCQSPWNTPLLPVKKPGTNDYRPVQDLREVNKRVEDIHPTVPNPYNLLSGLPPSHQWYTVLDLKDAFFCLRLHPTSQSLFAFEWRDPEMGISGQLTWTRLPQGFKNSPTLFNEALHRDLADFRIQHPDLILLQYVDDLLLAATSELDCQQGTRALLQTLGDLGYRASAKKAQICQKQVKYLGYLLKEGQRWLTEARKETVMGQPTPKTPRQLREFLGKAGFCRLFIPGFAEMAAPLYPLTKPGTLFEWGPDQQKAYQEIKQALLTAPALGLPDLTKPFELFVDEKQGYAKGVLTQKLGPWRRPVAYLSKKLDPVAAGWPPCLRMVAAIAVLTKDAGKLTMGQPLVILAPHAVEALVKQPPDRWLSNARMTHYQALLLDTDRVQFGPIVALNPATLLPLPEEGLQHDCLDILAEAHGTRPDLTDQPLPDADHTWYTDGSSFLQEGQRKAGAAVTTETEVVWAKALPAGTSAQRAELIALTQALKMAEGKKLNVYTDSRYAFATAHIHGEIYRRRGWLTSEGKEIKNKDEILALLKALFLPKRLSIIHCPGHQKGNRAEARGNRMADQAAREVATRETPETSTLLAGKRTADGSEFEKRTADGSEFESPKKKAKVE

SEQ ID NO: 2581 - protein, 2094 aa, synthetic construct
MPAAKRVKLDGGDKKYSIGLDIGTNSVGWAVITDEYKVPSKKFKVLGNTDRHSIKKNLIGALLFDSGETAEATRLKRTARRRYTRRKNRICYLQEIFSNEMAKVDDSFFHRLEESFLVEEDKKHERHPIFGNIVDEVAYHEKYPTIYHLRKKLVDSTDKADLRLIYLALAHMIKFRGHFLIEGDLNPDNSDVDKLFIQLVQTYNQLFEENPINASGVDAKAILSARLSKSRRLENLIAQLPGEKKNGLFGNLIALSLGLTPNFKSNFDLAEDAKLQLSKDTYDDDLDNLLAQIGDQYADLFLAAKNLSDAILLSDILRVNTEITKAPLSASMIKRYDEHHQDLTLLKALVRQQLPEKYKEIFFDQSKNGYAGYIDGGASQEEFYKFIKPILEKMDGTEELLVKLNREDLLRKQRTFDNGSIPHQIHLGELHAILRRQEDFYPFLKDNREKIEKILTFRIPYYVGPLARGNSRFAWMTRKSEETITPWNFEEVVDKGASAQSFIERMTNFDKNLPNEKVLPKHSLLYEYFTVYNELTKVKYVTEGMRKPAFLSGEQKKAIVDLLFKTNRKVTVKQLKEDYFKKIECFDSVEISGVEDRFNASLGTYHDLLKIIKDKDFLDNEENEDILEDIVLTLTLFEDREMIEERLKTYAHLFDDKVMKQLKRRRYTGWGRLSRKLINGIRDKQSGKTILDFLKSDGFANRNFMQLIHDDSLTFKEDIQKAQVSGQGDSLHEHIANLAGSPAIKKGILQTVKVVDELVKVMGRHKPENIVIEMARENQTTQKGQKNSRERMKRIEEGIKELGSQILKEHPVENTQLQNEKLYLYYLQNGRDMYVDQELDINRLSDYDVDHIVPQSFLKDDSIDNKVLTRSDKARGKSDNVPSEEVVKKMKNYWRQLLNAKLITQRKFDNLTKAERGGLSELDKAGFIKRQLVETRQITKHVAQILDSRMNTKYDENDKLIREVKVITLKSKLVSDFRKDFQFYKVREINNYHHAHDAYLNAVVGTALIKKYPKLESEFVYGDYKVYDVRKMIAKSEQEIGKATAKYFFYSNIMNFFKTEITLANGEIRKRPLIETNGETGEIVWDKGRDFATVRKVLSMPQVNIVKKTEVQTGGFSKESILPKRNSDKLIARKKDWDPKKYGGFDSPTVAYSVLVVAKVEKGKSKKLKSVKELLGITIMERSSFEKNPIDFLEAKGYKEVKKDLIIKLPKYSLFELENGRKRMLASAGELQKGNELALPSKYVNFLYLASHYEKLKGSPEDNEQKQLFVEQHKHYLDEIIEQISEFSKRVILADANLDKVLSAYNKHRDKPIREQAENIIHLFTLTNLGAPAAFKYFDTTIDRKRYTSTKEVLDATLIHQSITGLYETRIDLSQLGGDGGPAPGSSGGSGGTLNIEDEYRLHETSKGPDVPLGSTWLSDFPQAWAETGGMGLAVRQAPLIIPLKATSTPVSIKQYPMSQEARLGIKPHIQRLLDQGILVPCQSPWNTPLLPVKKPGTNDYRPVQDLREVNKRVEDIHPTVPNPYNLLSGLPPSHQWYTVLDLKDAFFCLRLHPTSQSLFAFEWRDPEMGISGQLTWTRLPQGFKNSPTLFNEALHRDLADFRIQHPDLILLQYVDDLLLAATSELDCQQGTRALLQTLGDLGYRASAKKAQICQKQVKYLGYLLKEGQRWLTEARKETVMGQPTPKTPRQLREFLGKAGFCRLFIPGFAEMAAPLYPLTKPGTLFEWGPDQQKAYQEIKQALLTAPALGLPDLTKPFELFVDEKQGYAKGVLTQKLGPWRRPVAYLSKKLDPVAAGWPPCLRMVAAIAVLTKDAGKLTMGQPLVILAPHAVEALVKQPPDRWLSNARMTHYQALLLDTDRVQFGPIVALNPATLLPLPEEGLQHDCLDILAEAHGTRPDLTDQPLPDADHTWYTDGSSFLQEGQRKAGAAVTTETEVVWAKALPAGTSAQRAELIALTQALKMAEGKKLNVYTDSRYAFATAHIHGEIYRRRGWLTSEGKEIKNKDEILALLKALFLPKRLSIIHCPGHQKGNRAEARGNRMADQAAREVATRETPETSTLLAGKRTADGSEFEKRTADGSEFESPKKKAKVE

SEQ ID NO: 2582 - protein, 2096 aa, synthetic construct
MPAAKRVKLDGGDKKYSIGLDIGTNSVGWAVITDEYKVPSKKFKVLGNTDRHSIKKNLIGALLFDSGETAEATRLKRTARRRYTRRKNRICYLQEIFSNEMAKVDDSFFHRLEESFLVEEDKKHERHPIFGNIVDEVAYHEKYPTIYHLRKKLVDSTDKADLRLIYLALAHMIKFRGHFLIEGDLNPDNSDVDKLFIQLVQTYNQLFEENPINASGVDAKAILSARLSKSRRLENLIAQLPGEKKNGLFGNLIALSLGLTPNFKSNFDLAEDAKLQLSKDTYDDDLDNLLAQIGDQYADLFLAAKNLSDAILLSDILRVNTEITKAPLSASMIKRYDEHHQDLTLLKALVRQQLPEKYKEIFFDQSKNGYAGYIDGGASQEEFYKFIKPILEKMDGTEELLVKLNREDLLRKQRTFDNGSIPHQIHLGELHAILRRQEDFYPFLKDNREKIEKILTFRIPYYVGPLARGNSRFAWMTRKSEETITPWNFEEVVDKGASAQSFIERMTNFDKNLPNEKVLPKHSLLYEYFTVYNELTKVKYVTEGMRKPAFLSGEQKKAIVDLLFKTNRKVTVKQLKEDYFKKIECFDSVEISGVEDRFNASLGTYHDLLKIIKDKDFLDNEENEDILEDIVLTLTLFEDREMIEERLKTYAHLFDDKVMKQLKRRRYTGWGRLSRKLINGIRDKQSGKTILDFLKSDGFANRNFMQLIHDDSLTFKEDIQKAQVSGQGDSLHEHIANLAGSPAIKKGILQTVKVVDELVKVMGRHKPENIVIEMARENQTTQKGQKNSRERMKRIEEGIKELGSQILKEHPVENTQLQNEKLYLYYLQNGRDMYVDQELDINRLSDYDVDHIVPQSFLKDDSIDNKVLTRSDKARGKSDNVPSEEVVKKMKNYWRQLLNAKLITQRKFDNLTKAERGGLSELDKAGFIKRQLVETRQITKHVAQILDSRMNTKYDENDKLIREVKVITLKSKLVSDFRKDFQFYKVREINNYHHAHDAYLNAVVGTALIKKYPKLESEFVYGDYKVYDVRKMIAKSEQEIGKATAKYFFYSNIMNFFKTEITLANGEIRKRPLIETNGETGEIVWDKGRDFATVRKVLSMPQVNIVKKTEVQTGGFSKESILPKRNSDKLIARKKDWDPKKYGGFDSPTVAYSVLVVAKVEKGKSKKLKSVKELLGITIMERSSFEKNPIDFLEAKGYKEVKKDLIIKLPKYSLFELENGRKRMLASAGELQKGNELALPSKYVNFLYLASHYEKLKGSPEDNEQKQLFVEQHKHYLDEIIEQISEFSKRVILADANLDKVLSAYNKHRDKPIREQAENIIHLFTLTNLGAPAAFKYFDTTIDRKRYTSTKEVLDATLIHQSITGLYETRIDLSQLGGDGGEAAAKGGGGGSGGTLNIEDEYRLHETSKGPDVPLGSTWLSDFPQAWAETGGMGLAVRQAPLIIPLKATSTPVSIKQYPMSQEARLGIKPHIQRLLDQGILVPCQSPWNTPLLPVKKPGTNDYRPVQDLREVNKRVEDIHPTVPNPYNLLSGLPPSHQWYTVLDLKDAFFCLRLHPTSQSLFAFEWRDPEMGISGQLTWTRLPQGFKNSPTLFNEALHRDLADFRIQHPDLILLQYVDDLLLAATSELDCQQGTRALLQTLGDLGYRASAKKAQICQKQVKYLGYLLKEGQRWLTEARKETVMGQPTPKTPRQLREFLGKAGFCRLFIPGFAEMAAPLYPLTKPGTLFEWGPDQQKAYQEIKQALLTAPALGLPDLTKPFELFVDEKQGYAKGVLTQKLGPWRRPVAYLSKKLDPVAAGWPPCLRMVAAIAVLTKDAGKLTMGQPLVILAPHAVEALVKQPPDRWLSNARMTHYQALLLDTDRVQFGPIVALNPATLLPLPEEGLQHDCLDILAEAHGTRPDLTDQPLPDADHTWYTDGSSFLQEGQRKAGAAVTTETEVVWAKALPAGTSAQRAELIALTQALKMAEGKKLNVYTDSRYAFATAHIHGEIYRRRGWLTSEGKEIKNKDEILALLKALFLPKRLSIIHCPGHQKGNRAEARGNRMADQAAREVATRETPETSTLLAGKRTADGSEFEKRTADGSEFESPKKKAKVE

SEQ ID NO: 2583 - protein, 2097 aa, synthetic construct
MPAAKRVKLDGGDKKYSIGLDIGTNSVGWAVITDEYKVPSKKFKVLGNTDRHSIKKNLIGALLFDSGETAEATRLKRTARRRYTRRKNRICYLQEIFSNEMAKVDDSFFHRLEESFLVEEDKKHERHPIFGNIVDEVAYHEKYPTIYHLRKKLVDSTDKADLRLIYLALAHMIKFRGHFLIEGDLNPDNSDVDKLFIQLVQTYNQLFEENPINASGVDAKAILSARLSKSRRLENLIAQLPGEKKNGLFGNLIALSLGLTPNFKSNFDLAEDAKLQLSKDTYDDDLDNLLAQIGDQYADLFLAAKNLSDAILLSDILRVNTEITKAPLSASMIKRYDEHHQDLTLLKALVRQQLPEKYKEIFFDQSKNGYAGYIDGGASQEEFYKFIKPILEKMDGTEELLVKLNREDLLRKQRTFDNGSIPHQIHLGELHAILRRQEDFYPFLKDNREKIEKILTFRIPYYVGPLARGNSRFAWMTRKSEETITPWNFEEVVDKGASAQSFIERMTNFDKNLPNEKVLPKHSLLYEYFTVYNELTKVKYVTEGMRKPAFLSGEQKKAIVDLLFKTNRKVTVKQLKEDYFKKIECFDSVEISGVEDRFNASLGTYHDLLKIIKDKDFLDNEENEDILEDIVLTLTLFEDREMIEERLKTYAHLFDDKVMKQLKRRRYTGWGRLSRKLINGIRDKQSGKTILDFLKSDGFANRNFMQLIHDDSLTFKEDIQKAQVSGQGDSLHEHIANLAGSPAIKKGILQTVKVVDELVKVMGRHKPENIVIEMARENQTTQKGQKNSRERMKRIEEGIKELGSQILKEHPVENTQLQNEKLYLYYLQNGRDMYVDQELDINRLSDYDVDHIVPQSFLKDDSIDNKVLTRSDKARGKSDNVPSEEVVKKMKNYWRQLLNAKLITQRKFDNLTKAERGGLSELDKAGFIKRQLVETRQITKHVAQILDSRMNTKYDENDKLIREVKVITLKSKLVSDFRKDFQFYKVREINNYHHAHDAYLNAVVGTALIKKYPKLESEFVYGDYKVYDVRKMIAKSEQEIGKATAKYFFYSNIMNFFKTEITLANGEIRKRPLIETNGETGEIVWDKGRDFATVRKVLSMPQVNIVKKTEVQTGGFSKESILPKRNSDKLIARKKDWDPKKYGGFDSPTVAYSVLVVAKVEKGKSKKLKSVKELLGITIMERSSFEKNPIDFLEAKGYKEVKKDLIIKLPKYSLFELENGRKRMLASAGELQKGNELALPSKYVNFLYLASHYEKLKGSPEDNEQKQLFVEQHKHYLDEIIEQISEFSKRVILADANLDKVLSAYNKHRDKPIREQAENIIHLFTLTNLGAPAAFKYFDTTIDRKRYTSTKEVLDATLIHQSITGLYETRIDLSQLGGDGGGSAGSAAGSGEFGGTLNIEDEYRLHETSKGPDVPLGSTWLSDFPQAWAETGGMGLAVRQAPLIIPLKATSTPVSIKQYPMSQEARLGIKPHIQRLLDQGILVPCQSPWNTPLLPVKKPGTNDYRPVQDLREVNKRVEDIHPTVPNPYNLLSGLPPSHQWYTVLDLKDAFFCLRLHPTSQSLFAFEWRDPEMGISGQLTWTRLPQGFKNSPTLFNEALHRDLADFRIQHPDLILLQYVDDLLLAATSELDCQQGTRALLQTLGDLGYRASAKKAQICQKQVKYLGYLLKEGQRWLTEARKETVMGQPTPKTPRQLREFLGKAGFCRLFIPGFAEMAAPLYPLTKPGTLFEWGPDQQKAYQEIKQALLTAPALGLPDLTKPFELFVDEKQGYAKGVLTQKLGPWRRPVAYLSKKLDPVAAGWPPCLRMVAAIAVLTKDAGKLTMGQPLVILAPHAVEALVKQPPDRWLSNARMTHYQALLLDTDRVQFGPIVALNPATLLPLPEEGLQHDCLDILAEAHGTRPDLTDQPLPDADHTWYTDGSSFLQEGQRKAGAAVTTETEVVWAKALPAGTSAQRAELIALTQALKMAEGKKLNVYTDSRYAFATAHIHGEIYRRRGWLTSEGKEIKNKDEILALLKALFLPKRLSIIHCPGHQKGNRAEARGNRMADQAAREVATRETPETSTLLAGKRTADGSEFEKRTADGSEFESPKKKAKVE

SEQ ID NO: 2584 - protein, 2093 aa, synthetic construct
MPAAKRVKLDGGDKKYSIGLDIGTNSVGWAVITDEYKVPSKKFKVLGNTDRHSIKKNLIGALLFDSGETAEATRLKRTARRRYTRRKNRICYLQEIFSNEMAKVDDSFFHRLEESFLVEEDKKHERHPIFGNIVDEVAYHEKYPTIYHLRKKLVDSTDKADLRLIYLALAHMIKFRGHFLIEGDLNPDNSDVDKLFIQLVQTYNQLFEENPINASGVDAKAILSARLSKSRRLENLIAQLPGEKKNGLFGNLIALSLGLTPNFKSNFDLAEDAKLQLSKDTYDDDLDNLLAQIGDQYADLFLAAKNLSDAILLSDILRVNTEITKAPLSASMIKRYDEHHQDLTLLKALVRQQLPEKYKEIFFDQSKNGYAGYIDGGASQEEFYKFIKPILEKMDGTEELLVKLNREDLLRKQRTFDNGSIPHQIHLGELHAILRRQEDFYPFLKDNREKIEKILTFRIPYYVGPLARGNSRFAWMTRKSEETITPWNFEEVVDKGASAQSFIERMTNFDKNLPNEKVLPKHSLLYEYFTVYNELTKVKYVTEGMRKPAFLSGEQKKAIVDLLFKTNRKVTVKQLKEDYFKKIECFDSVEISGVEDRFNASLGTYHDLLKIIKDKDFLDNEENEDILEDIVLTLTLFEDREMIEERLKTYAHLFDDKVMKQLKRRRYTGWGRLSRKLINGIRDKQSGKTILDFLKSDGFANRNFMQLIHDDSLTFKEDIQKAQVSGQGDSLHEHIANLAGSPAIKKGILQTVKVVDELVKVMGRHKPENIVIEMARENQTTQKGQKNSRERMKRIEEGIKELGSQILKEHPVENTQLQNEKLYLYYLQNGRDMYVDQELDINRLSDYDVDHIVPQSFLKDDSIDNKVLTRSDKARGKSDNVPSEEVVKKMKNYWRQLLNAKLITQRKFDNLTKAERGGLSELDKAGFIKRQLVETRQITKHVAQILDSRMNTKYDENDKLIREVKVITLKSKLVSDFRKDFQFYKVREINNYHHAHDAYLNAVVGTALIKKYPKLESEFVYGDYKVYDVRKMIAKSEQEIGKATAKYFFYSNIMNFFKTEITLANGEIRKRPLIETNGETGEIVWDKGRDFATVRKVLSMPQVNIVKKTEVQTGGFSKESILPKRNSDKLIARKKDWDPKKYGGFDSPTVAYSVLVVAKVEKGKSKKLKSVKELLGITIMERSSFEKNPIDFLEAKGYKEVKKDLIIKLPKYSLFELENGRKRMLASAGELQKGNELALPSKYVNFLYLASHYEKLKGSPEDNEQKQLFVEQHKHYLDEIIEQISEFSKRVILADANLDKVLSAYNKHRDKPIREQAENIIHLFTLTNLGAPAAFKYFDTTIDRKRYTSTKEVLDATLIHQSITGLYETRIDLSQLGGDGGEAAAKGGSGGTLNIEDEYRLHETSKGPDVPLGSTWLSDFPQAWAETGGMGLAVRQAPLIIPLKATSTPVSIKQYPMSQEARLGIKPHIQRLLDQGILVPCQSPWNTPLLPVKKPGTNDYRPVQDLREVNKRVEDIHPTVPNPYNLLSGLPPSHQWYTVLDLKDAFFCLRLHPTSQSLFAFEWRDPEMGISGQLTWTRLPQGFKNSPTLFNEALHRDLADFRIQHPDLILLQYVDDLLLAATSELDCQQGTRALLQTLGDLGYRASAKKAQICQKQVKYLGYLLKEGQRWLTEARKETVMGQPTPKTPRQLREFLGKAGFCRLFIPGFAEMAAPLYPLTKPGTLFEWGPDQQKAYQEIKQALLTAPALGLPDLTKPFELFVDEKQGYAKGVLTQKLGPWRRPVAYLSKKLDPVAAGWPPCLRMVAAIAVLTKDAGKLTMGQPLVILAPHAVEALVKQPPDRWLSNARMTHYQALLLDTDRVQFGPIVALNPATLLPLPEEGLQHDCLDILAEAHGTRPDLTDQPLPDADHTWYTDGSSFLQEGQRKAGAAVTTETEVVWAKALPAGTSAQRAELIALTQALKMAEGKKLNVYTDSRYAFATAHIHGEIYRRRGWLTSEGKEIKNKDEILALLKALFLPKRLSIIHCPGHQKGNRAEARGNRMADQAAREVATRETPETSTLLAGKRTADGSEFEKRTADGSEFESPKKKAKVE

SEQ ID NO: 2585 - protein, 2093 aa, synthetic construct
MPAAKRVKLDGGDKKYSIGLDIGTNSVGWAVITDEYKVPSKKFKVLGNTDRHSIKKNLIGALLFDSGETAEATRLKRTARRRYTRRKNRICYLQEIFSNEMAKVDDSFFHRLEESFLVEEDKKHERHPIFGNIVDEVAYHEKYPTIYHLRKKLVDSTDKADLRLIYLALAHMIKFRGHFLIEGDLNPDNSDVDKLFIQLVQTYNQLFEENPINASGVDAKAILSARLSKSRRLENLIAQLPGEKKNGLFGNLIALSLGLTPNFKSNFDLAEDAKLQLSKDTYDDDLDNLLAQIGDQYADLFLAAKNLSDAILLSDILRVNTEITKAPLSASMIKRYDEHHQDLTLLKALVRQQLPEKYKEIFFDQSKNGYAGYIDGGASQEEFYKFIKPILEKMDGTEELLVKLNREDLLRKQRTFDNGSIPHQIHLGELHAILRRQEDFYPFLKDNREKIEKILTFRIPYYVGPLARGNSRFAWMTRKSEETITPWNFEEVVDKGASAQSFIERMTNFDKNLPNEKVLPKHSLLYEYFTVYNELTKVKYVTEGMRKPAFLSGEQKKAIVDLLFKTNRKVTVKQLKEDYFKKIECFDSVEISGVEDRFNASLGTYHDLLKIIKDKDFLDNEENEDILEDIVLTLTLFEDREMIEERLKTYAHLFDDKVMKQLKRRRYTGWGRLSRKLINGIRDKQSGKTILDFLKSDGFANRNFMQLIHDDSLTFKEDIQKAQVSGQGDSLHEHIANLAGSPAIKKGILQTVKVVDELVKVMGRHKPENIVIEMARENQTTQKGQKNSRERMKRIEEGIKELGSQILKEHPVENTQLQNEKLYLYYLQNGRDMYVDQELDINRLSDYDVDHIVPQSFLKDDSIDNKVLTRSDKARGKSDNVPSEEVVKKMKNYWRQLLNAKLITQRKFDNLTKAERGGLSELDKAGFIKRQLVETRQITKHVAQILDSRMNTKYDENDKLIREVKVITLKSKLVSDFRKDFQFYKVREINNYHHAHDAYLNAVVGTALIKKYPKLESEFVYGDYKVYDVRKMIAKSEQEIGKATAKYFFYSNIMNFFKTEITLANGEIRKRPLIETNGETGEIVWDKGRDFATVRKVLSMPQVNIVKKTEVQTGGFSKESILPKRNSDKLIARKKDWDPKKYGGFDSPTVAYSVLVVAKVEKGKSKKLKSVKELLGITIMERSSFEKNPIDFLEAKGYKEVKKDLIIKLPKYSLFELENGRKRMLASAGELQKGNELALPSKYVNFLYLASHYEKLKGSPEDNEQKQLFVEQHKHYLDEIIEQISEFSKRVILADANLDKVLSAYNKHRDKPIREQAENIIHLFTLTNLGAPAAFKYFDTTIDRKRYTSTKEVLDATLIHQSITGLYETRIDLSQLGGDGGEAAAKGSSGGTLNIEDEYRLHETSKGPDVPLGSTWLSDFPQAWAETGGMGLAVRQAPLIIPLKATSTPVSIKQYPMSQEARLGIKPHIQRLLDQGILVPCQSPWNTPLLPVKKPGTNDYRPVQDLREVNKRVEDIHPTVPNPYNLLSGLPPSHQWYTVLDLKDAFFCLRLHPTSQSLFAFEWRDPEMGISGQLTWTRLPQGFKNSPTLFNEALHRDLADFRIQHPDLILLQYVDDLLLAATSELDCQQGTRALLQTLGDLGYRASAKKAQICQKQVKYLGYLLKEGQRWLTEARKETVMGQPTPKTPRQLREFLGKAGFCRLFIPGFAEMAAPLYPLTKPGTLFEWGPDQQKAYQEIKQALLTAPALGLPDLTKPFELFVDEKQGYAKGVLTQKLGPWRRPVAYLSKKLDPVAAGWPPCLRMVAAIAVLTKDAGKLTMGQPLVILAPHAVEALVKQPPDRWLSNARMTHYQALLLDTDRVQFGPIVALNPATLLPLPEEGLQHDCLDILAEAHGTRPDLTDQPLPDADHTWYTDGSSFLQEGQRKAGAAVTTETEVVWAKALPAGTSAQRAELIALTQALKMAEGKKLNVYTDSRYAFATAHIHGEIYRRRGWLTSEGKEIKNKDEILALLKALFLPKRLSIIHCPGHQKGNRAEARGNRMADQAAREVATRETPETSTLLAGKRTADGSEFEKRTADGSEFESPKKKAKVE

SEQ ID NO: 2586 - protein, 2091 aa, synthetic construct
MPAAKRVKLDGGDKKYSIGLDIGTNSVGWAVITDEYKVPSKKFKVLGNTDRHSIKKNLIGALLFDSGETAEATRLKRTARRRYTRRKNRICYLQEIFSNEMAKVDDSFFHRLEESFLVEEDKKHERHPIFGNIVDEVAYHEKYPTIYHLRKKLVDSTDKADLRLIYLALAHMIKFRGHFLIEGDLNPDNSDVDKLFIQLVQTYNQLFEENPINASGVDAKAILSARLSKSRRLENLIAQLPGEKKNGLFGNLIALSLGLTPNFKSNFDLAEDAKLQLSKDTYDDDLDNLLAQIGDQYADLFLAAKNLSDAILLSDILRVNTEITKAPLSASMIKRYDEHHQDLTLLKALVRQQLPEKYKEIFFDQSKNGYAGYIDGGASQEEFYKFIKPILEKMDGTEELLVKLNREDLLRKQRTFDNGSIPHQIHLGELHAILRRQEDFYPFLKDNREKIEKILTFRIPYYVGPLARGNSRFAWMTRKSEETITPWNFEEVVDKGASAQSFIERMTNFDKNLPNEKVLPKHSLLYEYFTVYNELTKVKYVTEGMRKPAFLSGEQKKAIVDLLFKTNRKVTVKQLKEDYFKKIECFDSVEISGVEDRFNASLGTYHDLLKIIKDKDFLDNEENEDILEDIVLTLTLFEDREMIEERLKTYAHLFDDKVMKQLKRRRYTGWGRLSRKLINGIRDKQSGKTILDFLKSDGFANRNFMQLIHDDSLTFKEDIQKAQVSGQGDSLHEHIANLAGSPAIKKGILQTVKVVDELVKVMGRHKPENIVIEMARENQTTQKGQKNSRERMKRIEEGIKELGSQILKEHPVENTQLQNEKLYLYYLQNGRDMYVDQELDINRLSDYDVDHIVPQSFLKDDSIDNKVLTRSDKARGKSDNVPSEEVVKKMKNYWRQLLNAKLITQRKFDNLTKAERGGLSELDKAGFIKRQLVETRQITKHVAQILDSRMNTKYDENDKLIREVKVITLKSKLVSDFRKDFQFYKVREINNYHHAHDAYLNAVVGTALIKKYPKLESEFVYGDYKVYDVRKMIAKSEQEIGKATAKYFFYSNIMNFFKTEITLANGEIRKRPLIETNGETGEIVWDKGRDFATVRKVLSMPQVNIVKKTEVQTGGFSKESILPKRNSDKLIARKKDWDPKKYGGFDSPTVAYSVLVVAKVEKGKSKKLKSVKELLGITIMERSSFEKNPIDFLEAKGYKEVKKDLIIKLPKYSLFELENGRKRMLASAGELQKGNELALPSKYVNFLYLASHYEKLKGSPEDNEQKQLFVEQHKHYLDEIIEQISEFSKRVILADANLDKVLSAYNKHRDKPIREQAENIIHLFTLTNLGAPAAFKYFDTTIDRKRYTSTKEVLDATLIHQSITGLYETRIDLSQLGGDGGGGGGSSGGTLNIEDEYRLHETSKGPDVPLGSTWLSDFPQAWAETGGMGLAVRQAPLIIPLKATSTPVSIKQYPMSQEARLGIKPHIQRLLDQGILVPCQSPWNTPLLPVKKPGTNDYRPVQDLREVNKRVEDIHPTVPNPYNLLSGLPPSHQWYTVLDLKDAFFCLRLHPTSQSLFAFEWRDPEMGISGQLTWTRLPQGFKNSPTLFNEALHRDLADFRIQHPDLILLQYVDDLLLAATSELDCQQGTRALLQTLGDLGYRASAKKAQICQKQVKYLGYLLKEGQRWLTEARKETVMGQPTPKTPRQLREFLGKAGFCRLFIPGFAEMAAPLYPLTKPGTLFEWGPDQQKAYQEIKQALLTAPALGLPDLTKPFELFVDEKQGYAKGVLTQKLGPWRRPVAYLSKKLDPVAAGWPPCLRMVAAIAVLTKDAGKLTMGQPLVILAPHAVEALVKQPPDRWLSNARMTHYQALLLDTDRVQFGPIVALNPATLLPLPEEGLQHDCLDILAEAHGTRPDLTDQPLPDADHTWYTDGSSFLQEGQRKAGAAVTTETEVVWAKALPAGTSAQRAELIALTQALKMAEGKKLNVYTDSRYAFATAHIHGEIYRRRGWLTSEGKEIKNKDEILALLKALFLPKRLSIIHCPGHQKGNRAEARGNRMADQAAREVATRETPETSTLLAGKRTADGSEFEKRTADGSEFESPKKKAKVE

SEQ ID NO: 2587 - protein, 2093 aa, synthetic construct
MPAAKRVKLDGGDKKYSIGLDIGTNSVGWAVITDEYKVPSKKFKVLGNTDRHSIKKNLIGALLFDSGETAEATRLKRTARRRYTRRKNRICYLQEIFSNEMAKVDDSFFHRLEESFLVEEDKKHERHPIFGNIVDEVAYHEKYPTIYHLRKKLVDSTDKADLRLIYLALAHMIKFRGHFLIEGDLNPDNSDVDKLFIQLVQTYNQLFEENPINASGVDAKAILSARLSKSRRLENLIAQLPGEKKNGLFGNLIALSLGLTPNFKSNFDLAEDAKLQLSKDTYDDDLDNLLAQIGDQYADLFLAAKNLSDAILLSDILRVNTEITKAPLSASMIKRYDEHHQDLTLLKALVRQQLPEKYKEIFFDQSKNGYAGYIDGGASQEEFYKFIKPILEKMDGTEELLVKLNREDLLRKQRTFDNGSIPHQIHLGELHAILRRQEDFYPFLKDNREKIEKILTFRIPYYVGPLARGNSRFAWMTRKSEETITPWNFEEVVDKGASAQSFIERMTNFDKNLPNEKVLPKHSLLYEYFTVYNELTKVKYVTEGMRKPAFLSGEQKKAIVDLLFKTNRKVTVKQLKEDYFKKIECFDSVEISGVEDRFNASLGTYHDLLKIIKDKDFLDNEENEDILEDIVLTLTLFEDREMIEERLKTYAHLFDDKVMKQLKRRRYTGWGRLSRKLINGIRDKQSGKTILDFLKSDGFANRNFMQLIHDDSLTFKEDIQKAQVSGQGDSLHEHIANLAGSPAIKKGILQTVKVVDELVKVMGRHKPENIVIEMARENQTTQKGQKNSRERMKRIEEGIKELGSQILKEHPVENTQLQNEKLYLYYLQNGRDMYVDQELDINRLSDYDVDHIVPQSFLKDDSIDNKVLTRSDKARGKSDNVPSEEVVKKMKNYWRQLLNAKLITQRKFDNLTKAERGGLSELDKAGFIKRQLVETRQITKHVAQILDSRMNTKYDENDKLIREVKVITLKSKLVSDFRKDFQFYKVREINNYHHAHDAYLNAVVGTALIKKYPKLESEFVYGDYKVYDVRKMIAKSEQEIGKATAKYFFYSNIMNFFKTEITLANGEIRKRPLIETNGETGEIVWDKGRDFATVRKVLSMPQVNIVKKTEVQTGGFSKESILPKRNSDKLIARKKDWDPKKYGGFDSPTVAYSVLVVAKVEKGKSKKLKSVKELLGITIMERSSFEKNPIDFLEAKGYKEVKKDLIIKLPKYSLFELENGRKRMLASAGELQKGNELALPSKYVNFLYLASHYEKLKGSPEDNEQKQLFVEQHKHYLDEIIEQISEFSKRVILADANLDKVLSAYNKHRDKPIREQAENIIHLFTLTNLGAPAAFKYFDTTIDRKRYTSTKEVLDATLIHQSITGLYETRIDLSQLGGDGGEAAAKPAPGGTLNIEDEYRLHETSKGPDVPLGSTWLSDFPQAWAETGGMGLAVRQAPLIIPLKATSTPVSIKQYPMSQEARLGIKPHIQRLLDQGILVPCQSPWNTPLLPVKKPGTNDYRPVQDLREVNKRVEDIHPTVPNPYNLLSGLPPSHQWYTVLDLKDAFFCLRLHPTSQSLFAFEWRDPEMGISGQLTWTRLPQGFKNSPTLFNEALHRDLADFRIQHPDLILLQYVDDLLLAATSELDCQQGTRALLQTLGDLGYRASAKKAQICQKQVKYLGYLLKEGQRWLTEARKETVMGQPTPKTPRQLREFLGKAGFCRLFIPGFAEMAAPLYPLTKPGTLFEWGPDQQKAYQEIKQALLTAPALGLPDLTKPFELFVDEKQGYAKGVLTQKLGPWRRPVAYLSKKLDPVAAGWPPCLRMVAAIAVLTKDAGKLTMGQPLVILAPHAVEALVKQPPDRWLSNARMTHYQALLLDTDRVQFGPIVALNPATLLPLPEEGLQHDCLDILAEAHGTRPDLTDQPLPDADHTWYTDGSSFLQEGQRKAGAAVTTETEVVWAKALPAGTSAQRAELIALTQALKMAEGKKLNVYTDSRYAFATAHIHGEIYRRRGWLTSEGKEIKNKDEILALLKALFLPKRLSIIHCPGHQKGNRAEARGNRMADQAAREVATRETPETSTLLAGKRTADGSEFEKRTADGSEFESPKKKAKVE

SEQ ID NO: 2588 - protein, 2094 aa, synthetic construct
MPAAKRVKLDGGDKKYSIGLDIGTNSVGWAVITDEYKVPSKKFKVLGNTDRHSIKKNLIGALLFDSGETAEATRLKRTARRRYTRRKNRICYLQEIFSNEMAKVDDSFFHRLEESFLVEEDKKHERHPIFGNIVDEVAYHEKYPTIYHLRKKLVDSTDKADLRLIYLALAHMIKFRGHFLIEGDLNPDNSDVDKLFIQLVQTYNQLFEENPINASGVDAKAILSARLSKSRRLENLIAQLPGEKKNGLFGNLIALSLGLTPNFKSNFDLAEDAKLQLSKDTYDDDLDNLLAQIGDQYADLFLAAKNLSDAILLSDILRVNTEITKAPLSASMIKRYDEHHQDLTLLKALVRQQLPEKYKEIFFDQSKNGYAGYIDGGASQEEFYKFIKPILEKMDGTEELLVKLNREDLLRKQRTFDNGSIPHQIHLGELHAILRRQEDFYPFLKDNREKIEKILTFRIPYYVGPLARGNSRFAWMTRKSEETITPWNFEEVVDKGASAQSFIERMTNFDKNLPNEKVLPKHSLLYEYFTVYNELTKVKYVTEGMRKPAFLSGEQKKAIVDLLFKTNRKVTVKQLKEDYFKKIECFDSVEISGVEDRFNASLGTYHDLLKIIKDKDFLDNEENEDILEDIVLTLTLFEDREMIEERLKTYAHLFDDKVMKQLKRRRYTGWGRLSRKLINGIRDKQSGKTILDFLKSDGFANRNFMQLIHDDSLTFKEDIQKAQVSGQGDSLHEHIANLAGSPAIKKGILQTVKVVDELVKVMGRHKPENIVIEMARENQTTQKGQKNSRERMKRIEEGIKELGSQILKEHPVENTQLQNEKLYLYYLQNGRDMYVDQELDINRLSDYDVDHIVPQSFLKDDSIDNKVLTRSDKARGKSDNVPSEEVVKKMKNYWRQLLNAKLITQRKFDNLTKAERGGLSELDKAGFIKRQLVETRQITKHVAQILDSRMNTKYDENDKLIREVKVITLKSKLVSDFRKDFQFYKVREINNYHHAHDAYLNAVVGTALIKKYPKLESEFVYGDYKVYDVRKMIAKSEQEIGKATAKYFFYSNIMNFFKTEITLANGEIRKRPLIETNGETGEIVWDKGRDFATVRKVLSMPQVNIVKKTEVQTGGFSKESILPKRNSDKLIARKKDWDPKKYGGFDSPTVAYSVLVVAKVEKGKSKKLKSVKELLGITIMERSSFEKNPIDFLEAKGYKEVKKDLIIKLPKYSLFELENGRKRMLASAGELQKGNELALPSKYVNFLYLASHYEKLKGSPEDNEQKQLFVEQHKHYLDEIIEQISEFSKRVILADANLDKVLSAYNKHRDKPIREQAENIIHLFTLTNLGAPAAFKYFDTTIDRKRYTSTKEVLDATLIHQSITGLYETRIDLSQLGGDGGGGGGGSPAPGGTLNIEDEYRLHETSKGPDVPLGSTWLSDFPQAWAETGGMGLAVRQAPLIIPLKATSTPVSIKQYPMSQEARLGIKPHIQRLLDQGILVPCQSPWNTPLLPVKKPGTNDYRPVQDLREVNKRVEDIHPTVPNPYNLLSGLPPSHQWYTVLDLKDAFFCLRLHPTSQSLFAFEWRDPEMGISGQLTWTRLPQGFKNSPTLFNEALHRDLADFRIQHPDLILLQYVDDLLLAATSELDCQQGTRALLQTLGDLGYRASAKKAQICQKQVKYLGYLLKEGQRWLTEARKETVMGQPTPKTPRQLREFLGKAGFCRLFIPGFAEMAAPLYPLTKPGTLFEWGPDQQKAYQEIKQALLTAPALGLPDLTKPFELFVDEKQGYAKGVLTQKLGPWRRPVAYLSKKLDPVAAGWPPCLRMVAAIAVLTKDAGKLTMGQPLVILAPHAVEALVKQPPDRWLSNARMTHYQALLLDTDRVQFGPIVALNPATLLPLPEEGLQHDCLDILAEAHGTRPDLTDQPLPDADHTWYTDGSSFLQEGQRKAGAAVTTETEVVWAKALPAGTSAQRAELIALTQALKMAEGKKLNVYTDSRYAFATAHIHGEIYRRRGWLTSEGKEIKNKDEILALLKALFLPKRLSIIHCPGHQKGNRAEARGNRMADQAAREVATRETPETSTLLAGKRTADGSEFEKRTADGSEFESPKKKAKVE

SEQ ID NO: 2589 - protein, 2094 aa, synthetic construct
MPAAKRVKLDGGDKKYSIGLDIGTNSVGWAVITDEYKVPSKKFKVLGNTDRHSIKKNLIGALLFDSGETAEATRLKRTARRRYTRRKNRICYLQEIFSNEMAKVDDSFFHRLEESFLVEEDKKHERHPIFGNIVDEVAYHEKYPTIYHLRKKLVDSTDKADLRLIYLALAHMIKFRGHFLIEGDLNPDNSDVDKLFIQLVQTYNQLFEENPINASGVDAKAILSARLSKSRRLENLIAQLPGEKKNGLFGNLIALSLGLTPNFKSNFDLAEDAKLQLSKDTYDDDLDNLLAQIGDQYADLFLAAKNLSDAILLSDILRVNTEITKAPLSASMIKRYDEHHQDLTLLKALVRQQLPEKYKEIFFDQSKNGYAGYIDGGASQEEFYKFIKPILEKMDGTEELLVKLNREDLLRKQRTFDNGSIPHQIHLGELHAILRRQEDFYPFLKDNREKIEKILTFRIPYYVGPLARGNSRFAWMTRKSEETITPWNFEEVVDKGASAQSFIERMTNFDKNLPNEKVLPKHSLLYEYFTVYNELTKVKYVTEGMRKPAFLSGEQKKAIVDLLFKTNRKVTVKQLKEDYFKKIECFDSVEISGVEDRFNASLGTYHDLLKIIKDKDFLDNEENEDILEDIVLTLTLFEDREMIEERLKTYAHLFDDKVMKQLKRRRYTGWGRLSRKLINGIRDKQSGKTILDFLKSDGFANRNFMQLIHDDSLTFKEDIQKAQVSGQGDSLHEHIANLAGSPAIKKGILQTVKVVDELVKVMGRHKPENIVIEMARENQTTQKGQKNSRERMKRIEEGIKELGSQILKEHPVENTQLQNEKLYLYYLQNGRDMYVDQELDINRLSDYDVDHIVPQSFLKDDSIDNKVLTRSDKARGKSDNVPSEEVVKKMKNYWRQLLNAKLITQRKFDNLTKAERGGLSELDKAGFIKRQLVETRQITKHVAQILDSRMNTKYDENDKLIREVKVITLKSKLVSDFRKDFQFYKVREINNYHHAHDAYLNAVVGTALIKKYPKLESEFVYGDYKVYDVRKMIAKSEQEIGKATAKYFFYSNIMNFFKTEITLANGEIRKRPLIETNGETGEIVWDKGRDFATVRKVLSMPQVNIVKKTEVQTGGFSKESILPKRNSDKLIARKKDWDPKKYGGFDSPTVAYSVLVVAKVEKGKSKKLKSVKELLGITIMERSSFEKNPIDFLEAKGYKEVKKDLIIKLPKYSLFELENGRKRMLASAGELQKGNELALPSKYVNFLYLASHYEKLKGSPEDNEQKQLFVEQHKHYLDEIIEQISEFSKRVILADANLDKVLSAYNKHRDKPIREQAENIIHLFTLTNLGAPAAFKYFDTTIDRKRYTSTKEVLDATLIHQSITGLYETRIDLSQLGGDGGGGGGSSPAPGGTLNIEDEYRLHETSKGPDVPLGSTWLSDFPQAWAETGGMGLAVRQAPLIIPLKATSTPVSIKQYPMSQEARLGIKPHIQRLLDQGILVPCQSPWNTPLLPVKKPGTNDYRPVQDLREVNKRVEDIHPTVPNPYNLLSGLPPSHQWYTVLDLKDAFFCLRLHPTSQSLFAFEWRDPEMGISGQLTWTRLPQGFKNSPTLFNEALHRDLADFRIQHPDLILLQYVDDLLLAATSELDCQQGTRALLQTLGDLGYRASAKKAQICQKQVKYLGYLLKEGQRWLTEARKETVMGQPTPKTPRQLREFLGKAGFCRLFIPGFAEMAAPLYPLTKPGTLFEWGPDQQKAYQEIKQALLTAPALGLPDLTKPFELFVDEKQGYAKGVLTQKLGPWRRPVAYLSKKLDPVAAGWPPCLRMVAAIAVLTKDAGKLTMGQPLVILAPHAVEALVKQPPDRWLSNARMTHYQALLLDTDRVQFGPIVALNPATLLPLPEEGLQHDCLDILAEAHGTRPDLTDQPLPDADHTWYTDGSSFLQEGQRKAGAAVTTETEVVWAKALPAGTSAQRAELIALTQALKMAEGKKLNVYTDSRYAFATAHIHGEIYRRRGWLTSEGKEIKNKDEILALLKALFLPKRLSIIHCPGHQKGNRAEARGNRMADQAAREVATRETPETSTLLAGKRTADGSEFEKRTADGSEFESPKKKAKVE

SEQ ID NO: 2590 - protein, 2091 aa, synthetic construct
MPAAKRVKLDGGDKKYSIGLDIGTNSVGWAVITDEYKVPSKKFKVLGNTDRHSIKKNLIGALLFDSGETAEATRLKRTARRRYTRRKNRICYLQEIFSNEMAKVDDSFFHRLEESFLVEEDKKHERHPIFGNIVDEVAYHEKYPTIYHLRKKLVDSTDKADLRLIYLALAHMIKFRGHFLIEGDLNPDNSDVDKLFIQLVQTYNQLFEENPINASGVDAKAILSARLSKSRRLENLIAQLPGEKKNGLFGNLIALSLGLTPNFKSNFDLAEDAKLQLSKDTYDDDLDNLLAQIGDQYADLFLAAKNLSDAILLSDILRVNTEITKAPLSASMIKRYDEHHQDLTLLKALVRQQLPEKYKEIFFDQSKNGYAGYIDGGASQEEFYKFIKPILEKMDGTEELLVKLNREDLLRKQRTFDNGSIPHQIHLGELHAILRRQEDFYPFLKDNREKIEKILTFRIPYYVGPLARGNSRFAWMTRKSEETITPWNFEEVVDKGASAQSFIERMTNFDKNLPNEKVLPKHSLLYEYFTVYNELTKVKYVTEGMRKPAFLSGEQKKAIVDLLFKTNRKVTVKQLKEDYFKKIECFDSVEISGVEDRFNASLGTYHDLLKIIKDKDFLDNEENEDILEDIVLTLTLFEDREMIEERLKTYAHLFDDKVMKQLKRRRYTGWGRLSRKLINGIRDKQSGKTILDFLKSDGFANRNFMQLIHDDSLTFKEDIQKAQVSGQGDSLHEHIANLAGSPAIKKGILQTVKVVDELVKVMGRHKPENIVIEMARENQTTQKGQKNSRERMKRIEEGIKELGSQILKEHPVENTQLQNEKLYLYYLQNGRDMYVDQELDINRLSDYDVDHIVPQSFLKDDSIDNKVLTRSDKARGKSDNVPSEEVVKKMKNYWRQLLNAKLITQRKFDNLTKAERGGLSELDKAGFIKRQLVETRQITKHVAQILDSRMNTKYDENDKLIREVKVITLKSKLVSDFRKDFQFYKVREINNYHHAHDAYLNAVVGTALIKKYPKLESEFVYGDYKVYDVRKMIAKSEQEIGKATAKYFFYSNIMNFFKTEITLANGEIRKRPLIETNGETGEIVWDKGRDFATVRKVLSMPQVNIVKKTEVQTGGFSKESILPKRNSDKLIARKKDWDPKKYGGFDSPTVAYSVLVVAKVEKGKSKKLKSVKELLGITIMERSSFEKNPIDFLEAKGYKEVKKDLIIKLPKYSLFELENGRKRMLASAGELQKGNELALPSKYVNFLYLASHYEKLKGSPEDNEQKQLFVEQHKHYLDEIIEQISEFSKRVILADANLDKVLSAYNKHRDKPIREQAENIIHLFTLTNLGAPAAFKYFDTTIDRKRYTSTKEVLDATLIHQSITGLYETRIDLSQLGGDGGGSSGGSGGTLNIEDEYRLHETSKGPDVPLGSTWLSDFPQAWAETGGMGLAVRQAPLIIPLKATSTPVSIKQYPMSQEARLGIKPHIQRLLDQGILVPCQSPWNTPLLPVKKPGTNDYRPVQDLREVNKRVEDIHPTVPNPYNLLSGLPPSHQWYTVLDLKDAFFCLRLHPTSQSLFAFEWRDPEMGISGQLTWTRLPQGFKNSPTLFNEALHRDLADFRIQHPDLILLQYVDDLLLAATSELDCQQGTRALLQTLGDLGYRASAKKAQICQKQVKYLGYLLKEGQRWLTEARKETVMGQPTPKTPRQLREFLGKAGFCRLFIPGFAEMAAPLYPLTKPGTLFEWGPDQQKAYQEIKQALLTAPALGLPDLTKPFELFVDEKQGYAKGVLTQKLGPWRRPVAYLSKKLDPVAAGWPPCLRMVAAIAVLTKDAGKLTMGQPLVILAPHAVEALVKQPPDRWLSNARMTHYQALLLDTDRVQFGPIVALNPATLLPLPEEGLQHDCLDILAEAHGTRPDLTDQPLPDADHTWYTDGSSFLQEGQRKAGAAVTTETEVVWAKALPAGTSAQRAELIALTQALKMAEGKKLNVYTDSRYAFATAHIHGEIYRRRGWLTSEGKEIKNKDEILALLKALFLPKRLSIIHCPGHQKGNRAEARGNRMADQAAREVATRETPETSTLLAGKRTADGSEFEKRTADGSEFESPKKKAKVE

SEQ ID NO: 2591 - protein, 2094 aa, synthetic construct
MPAAKRVKLDGGDKKYSIGLDIGTNSVGWAVITDEYKVPSKKFKVLGNTDRHSIKKNLIGALLFDSGETAEATRLKRTARRRYTRRKNRICYLQEIFSNEMAKVDDSFFHRLEESFLVEEDKKHERHPIFGNIVDEVAYHEKYPTIYHLRKKLVDSTDKADLRLIYLALAHMIKFRGHFLIEGDLNPDNSDVDKLFIQLVQTYNQLFEENPINASGVDAKAILSARLSKSRRLENLIAQLPGEKKNGLFGNLIALSLGLTPNFKSNFDLAEDAKLQLSKDTYDDDLDNLLAQIGDQYADLFLAAKNLSDAILLSDILRVNTEITKAPLSASMIKRYDEHHQDLTLLKALVRQQLPEKYKEIFFDQSKNGYAGYIDGGASQEEFYKFIKPILEKMDGTEELLVKLNREDLLRKQRTFDNGSIPHQIHLGELHAILRRQEDFYPFLKDNREKIEKILTFRIPYYVGPLARGNSRFAWMTRKSEETITPWNFEEVVDKGASAQSFIERMTNFDKNLPNEKVLPKHSLLYEYFTVYNELTKVKYVTEGMRKPAFLSGEQKKAIVDLLFKTNRKVTVKQLKEDYFKKIECFDSVEISGVEDRFNASLGTYHDLLKIIKDKDFLDNEENEDILEDIVLTLTLFEDREMIEERLKTYAHLFDDKVMKQLKRRRYTGWGRLSRKLINGIRDKQSGKTILDFLKSDGFANRNFMQLIHDDSLTFKEDIQKAQVSGQGDSLHEHIANLAGSPAIKKGILQTVKVVDELVKVMGRHKPENIVIEMARENQTTQKGQKNSRERMKRIEEGIKELGSQILKEHPVENTQLQNEKLYLYYLQNGRDMYVDQELDINRLSDYDVDHIVPQSFLKDDSIDNKVLTRSDKARGKSDNVPSEEVVKKMKNYWRQLLNAKLITQRKFDNLTKAERGGLSELDKAGFIKRQLVETRQITKHVAQILDSRMNTKYDENDKLIREVKVITLKSKLVSDFRKDFQFYKVREINNYHHAHDAYLNAVVGTALIKKYPKLESEFVYGDYKVYDVRKMIAKSEQEIGKATAKYFFYSNIMNFFKTEITLANGEIRKRPLIETNGETGEIVWDKGRDFATVRKVLSMPQVNIVKKTEVQTGGFSKESILPKRNSDKLIARKKDWDPKKYGGFDSPTVAYSVLVVAKVEKGKSKKLKSVKELLGITIMERSSFEKNPIDFLEAKGYKEVKKDLIIKLPKYSLFELENGRKRMLASAGELQKGNELALPSKYVNFLYLASHYEKLKGSPEDNEQKQLFVEQHKHYLDEIIEQISEFSKRVILADANLDKVLSAYNKHRDKPIREQAENIIHLFTLTNLGAPAAFKYFDTTIDRKRYTSTKEVLDATLIHQSITGLYETRIDLSQLGGDGGGSSGGSPAPGGTLNIEDEYRLHETSKGPDVPLGSTWLSDFPQAWAETGGMGLAVRQAPLIIPLKATSTPVSIKQYPMSQEARLGIKPHIQRLLDQGILVPCQSPWNTPLLPVKKPGTNDYRPVQDLREVNKRVEDIHPTVPNPYNLLSGLPPSHQWYTVLDLKDAFFCLRLHPTSQSLFAFEWRDPEMGISGQLTWTRLPQGFKNSPTLFNEALHRDLADFRIQHPDLILLQYVDDLLLAATSELDCQQGTRALLQTLGDLGYRASAKKAQICQKQVKYLGYLLKEGQRWLTEARKETVMGQPTPKTPRQLREFLGKAGFCRLFIPGFAEMAAPLYPLTKPGTLFEWGPDQQKAYQEIKQALLTAPALGLPDLTKPFELFVDEKQGYAKGVLTQKLGPWRRPVAYLSKKLDPVAAGWPPCLRMVAAIAVLTKDAGKLTMGQPLVILAPHAVEALVKQPPDRWLSNARMTHYQALLLDTDRVQFGPIVALNPATLLPLPEEGLQHDCLDILAEAHGTRPDLTDQPLPDADHTWYTDGSSFLQEGQRKAGAAVTTETEVVWAKALPAGTSAQRAELIALTQALKMAEGKKLNVYTDSRYAFATAHIHGEIYRRRGWLTSEGKEIKNKDEILALLKALFLPKRLSIIHCPGHQKGNRAEARGNRMADQAAREVATRETPETSTLLAGKRTADGSEFEKRTADGSEFESPKKKAKVE

SEQ ID NO: 2592 - protein, 2096 aa, synthetic construct
MPAAKRVKLDGGDKKYSIGLDIGTNSVGWAVITDEYKVPSKKFKVLGNTDRHSIKKNLIGALLFDSGETAEATRLKRTARRRYTRRKNRICYLQEIFSNEMAKVDDSFFHRLEESFLVEEDKKHERHPIFGNIVDEVAYHEKYPTIYHLRKKLVDSTDKADLRLIYLALAHMIKFRGHFLIEGDLNPDNSDVDKLFIQLVQTYNQLFEENPINASGVDAKAILSARLSKSRRLENLIAQLPGEKKNGLFGNLIALSLGLTPNFKSNFDLAEDAKLQLSKDTYDDDLDNLLAQIGDQYADLFLAAKNLSDAILLSDILRVNTEITKAPLSASMIKRYDEHHQDLTLLKALVRQQLPEKYKEIFFDQSKNGYAGYIDGGASQEEFYKFIKPILEKMDGTEELLVKLNREDLLRKQRTFDNGSIPHQIHLGELHAILRRQEDFYPFLKDNREKIEKILTFRIPYYVGPLARGNSRFAWMTRKSEETITPWNFEEVVDKGASAQSFIERMTNFDKNLPNEKVLPKHSLLYEYFTVYNELTKVKYVTEGMRKPAFLSGEQKKAIVDLLFKTNRKVTVKQLKEDYFKKIECFDSVEISGVEDRFNASLGTYHDLLKIIKDKDFLDNEENEDILEDIVLTLTLFEDREMIEERLKTYAHLFDDKVMKQLKRRRYTGWGRLSRKLINGIRDKQSGKTILDFLKSDGFANRNFMQLIHDDSLTFKEDIQKAQVSGQGDSLHEHIANLAGSPAIKKGILQTVKVVDELVKVMGRHKPENIVIEMARENQTTQKGQKNSRERMKRIEEGIKELGSQILKEHPVENTQLQNEKLYLYYLQNGRDMYVDQELDINRLSDYDVDHIVPQSFLKDDSIDNKVLTRSDKARGKSDNVPSEEVVKKMKNYWRQLLNAKLITQRKFDNLTKAERGGLSELDKAGFIKRQLVETRQITKHVAQILDSRMNTKYDENDKLIREVKVITLKSKLVSDFRKDFQFYKVREINNYHHAHDAYLNAVVGTALIKKYPKLESEFVYGDYKVYDVRKMIAKSEQEIGKATAKYFFYSNIMNFFKTEITLANGEIRKRPLIETNGETGEIVWDKGRDFATVRKVLSMPQVNIVKKTEVQTGGFSKESILPKRNSDKLIARKKDWDPKKYGGFDSPTVAYSVLVVAKVEKGKSKKLKSVKELLGITIMERSSFEKNPIDFLEAKGYKEVKKDLIIKLPKYSLFELENGRKRMLASAGELQKGNELALPSKYVNFLYLASHYEKLKGSPEDNEQKQLFVEQHKHYLDEIIEQISEFSKRVILADANLDKVLSAYNKHRDKPIREQAENIIHLFTLTNLGAPAAFKYFDTTIDRKRYTSTKEVLDATLIHQSITGLYETRIDLSQLGGDGGGGGPAPEAAAKGGTLNIEDEYRLHETSKGPDVPLGSTWLSDFPQAWAETGGMGLAVRQAPLIIPLKATSTPVSIKQYPMSQEARLGIKPHIQRLLDQGILVPCQSPWNTPLLPVKKPGTNDYRPVQDLREVNKRVEDIHPTVPNPYNLLSGLPPSHQWYTVLDLKDAFFCLRLHPTSQSLFAFEWRDPEMGISGQLTWTRLPQGFKNSPTLFNEALHRDLADFRIQHPDLILLQYVDDLLLAATSELDCQQGTRALLQTLGDLGYRASAKKAQICQKQVKYLGYLLKEGQRWLTEARKETVMGQPTPKTPRQLREFLGKAGFCRLFIPGFAEMAAPLYPLTKPGTLFEWGPDQQKAYQEIKQALLTAPALGLPDLTKPFELFVDEKQGYAKGVLTQKLGPWRRPVAYLSKKLDPVAAGWPPCLRMVAAIAVLTKDAGKLTMGQPLVILAPHAVEALVKQPPDRWLSNARMTHYQALLLDTDRVQFGPIVALNPATLLPLPEEGLQHDCLDILAEAHGTRPDLTDQPLPDADHTWYTDGSSFLQEGQRKAGAAVTTETEVVWAKALPAGTSAQRAELIALTQALKMAEGKKLNVYTDSRYAFATAHIHGEIYRRRGWLTSEGKEIKNKDEILALLKALFLPKRLSIIHCPGHQKGNRAEARGNRMADQAAREVATRETPETSTLLAGKRTADGSEFEKRTADGSEFESPKKKAKVE

SEQ ID NO: 2593 - protein, 2094 aa, synthetic construct
MPAAKRVKLDGGDKKYSIGLDIGTNSVGWAVITDEYKVPSKKFKVLGNTDRHSIKKNLIGALLFDSGETAEATRLKRTARRRYTRRKNRICYLQEIFSNEMAKVDDSFFHRLEESFLVEEDKKHERHPIFGNIVDEVAYHEKYPTIYHLRKKLVDSTDKADLRLIYLALAHMIKFRGHFLIEGDLNPDNSDVDKLFIQLVQTYNQLFEENPINASGVDAKAILSARLSKSRRLENLIAQLPGEKKNGLFGNLIALSLGLTPNFKSNFDLAEDAKLQLSKDTYDDDLDNLLAQIGDQYADLFLAAKNLSDAILLSDILRVNTEITKAPLSASMIKRYDEHHQDLTLLKALVRQQLPEKYKEIFFDQSKNGYAGYIDGGASQEEFYKFIKPILEKMDGTEELLVKLNREDLLRKQRTFDNGSIPHQIHLGELHAILRRQEDFYPFLKDNREKIEKILTFRIPYYVGPLARGNSRFAWMTRKSEETITPWNFEEVVDKGASAQSFIERMTNFDKNLPNEKVLPKHSLLYEYFTVYNELTKVKYVTEGMRKPAFLSGEQKKAIVDLLFKTNRKVTVKQLKEDYFKKIECFDSVEISGVEDRFNASLGTYHDLLKIIKDKDFLDNEENEDILEDIVLTLTLFEDREMIEERLKTYAHLFDDKVMKQLKRRRYTGWGRLSRKLINGIRDKQSGKTILDFLKSDGFANRNFMQLIHDDSLTFKEDIQKAQVSGQGDSLHEHIANLAGSPAIKKGILQTVKVVDELVKVMGRHKPENIVIEMARENQTTQKGQKNSRERMKRIEEGIKELGSQILKEHPVENTQLQNEKLYLYYLQNGRDMYVDQELDINRLSDYDVDHIVPQSFLKDDSIDNKVLTRSDKARGKSDNVPSEEVVKKMKNYWRQLLNAKLITQRKFDNLTKAERGGLSELDKAGFIKRQLVETRQITKHVAQILDSRMNTKYDENDKLIREVKVITLKSKLVSDFRKDFQFYKVREINNYHHAHDAYLNAVVGTALIKKYPKLESEFVYGDYKVYDVRKMIAKSEQEIGKATAKYFFYSNIMNFFKTEITLANGEIRKRPLIETNGETGEIVWDKGRDFATVRKVLSMPQVNIVKKTEVQTGGFSKESILPKRNSDKLIARKKDWDPKKYGGFDSPTVAYSVLVVAKVEKGKSKKLKSVKELLGITIMERSSFEKNPIDFLEAKGYKEVKKDLIIKLPKYSLFELENGRKRMLASAGELQKGNELALPSKYVNFLYLASHYEKLKGSPEDNEQKQLFVEQHKHYLDEIIEQISEFSKRVILADANLDKVLSAYNKHRDKPIREQAENIIHLFTLTNLGAPAAFKYFDTTIDRKRYTSTKEVLDATLIHQSITGLYETRIDLSQLGGDGGGGGPAPGSSGGTLNIEDEYRLHETSKGPDVPLGSTWLSDFPQAWAETGGMGLAVRQAPLIIPLKATSTPVSIKQYPMSQEARLGIKPHIQRLLDQGILVPCQSPWNTPLLPVKKPGTNDYRPVQDLREVNKRVEDIHPTVPNPYNLLSGLPPSHQWYTVLDLKDAFFCLRLHPTSQSLFAFEWRDPEMGISGQLTWTRLPQGFKNSPTLFNEALHRDLADFRIQHPDLILLQYVDDLLLAATSELDCQQGTRALLQTLGDLGYRASAKKAQICQKQVKYLGYLLKEGQRWLTEARKETVMGQPTPKTPRQLREFLGKAGFCRLFIPGFAEMAAPLYPLTKPGTLFEWGPDQQKAYQEIKQALLTAPALGLPDLTKPFELFVDEKQGYAKGVLTQKLGPWRRPVAYLSKKLDPVAAGWPPCLRMVAAIAVLTKDAGKLTMGQPLVILAPHAVEALVKQPPDRWLSNARMTHYQALLLDTDRVQFGPIVALNPATLLPLPEEGLQHDCLDILAEAHGTRPDLTDQPLPDADHTWYTDGSSFLQEGQRKAGAAVTTETEVVWAKALPAGTSAQRAELIALTQALKMAEGKKLNVYTDSRYAFATAHIHGEIYRRRGWLTSEGKEIKNKDEILALLKALFLPKRLSIIHCPGHQKGNRAEARGNRMADQAAREVATRETPETSTLLAGKRTADGSEFEKRTADGSEFESPKKKAKVE

SEQ ID NO: 2594 - protein, 2091 aa, synthetic construct
MPAAKRVKLDGGDKKYSIGLDIGTNSVGWAVITDEYKVPSKKFKVLGNTDRHSIKKNLIGALLFDSGETAEATRLKRTARRRYTRRKNRICYLQEIFSNEMAKVDDSFFHRLEESFLVEEDKKHERHPIFGNIVDEVAYHEKYPTIYHLRKKLVDSTDKADLRLIYLALAHMIKFRGHFLIEGDLNPDNSDVDKLFIQLVQTYNQLFEENPINASGVDAKAILSARLSKSRRLENLIAQLPGEKKNGLFGNLIALSLGLTPNFKSNFDLAEDAKLQLSKDTYDDDLDNLLAQIGDQYADLFLAAKNLSDAILLSDILRVNTEITKAPLSASMIKRYDEHHQDLTLLKALVRQQLPEKYKEIFFDQSKNGYAGYIDGGASQEEFYKFIKPILEKMDGTEELLVKLNREDLLRKQRTFDNGSIPHQIHLGELHAILRRQEDFYPFLKDNREKIEKILTFRIPYYVGPLARGNSRFAWMTRKSEETITPWNFEEVVDKGASAQSFIERMTNFDKNLPNEKVLPKHSLLYEYFTVYNELTKVKYVTEGMRKPAFLSGEQKKAIVDLLFKTNRKVTVKQLKEDYFKKIECFDSVEISGVEDRFNASLGTYHDLLKIIKDKDFLDNEENEDILEDIVLTLTLFEDREMIEERLKTYAHLFDDKVMKQLKRRRYTGWGRLSRKLINGIRDKQSGKTILDFLKSDGFANRNFMQLIHDDSLTFKEDIQKAQVSGQGDSLHEHIANLAGSPAIKKGILQTVKVVDELVKVMGRHKPENIVIEMARENQTTQKGQKNSRERMKRIEEGIKELGSQILKEHPVENTQLQNEKLYLYYLQNGRDMYVDQELDINRLSDYDVDHIVPQSFLKDDSIDNKVLTRSDKARGKSDNVPSEEVVKKMKNYWRQLLNAKLITQRKFDNLTKAERGGLSELDKAGFIKRQLVETRQITKHVAQILDSRMNTKYDENDKLIREVKVITLKSKLVSDFRKDFQFYKVREINNYHHAHDAYLNAVVGTALIKKYPKLESEFVYGDYKVYDVRKMIAKSEQEIGKATAKYFFYSNIMNFFKTEITLANGEIRKRPLIETNGETGEIVWDKGRDFATVRKVLSMPQVNIVKKTEVQTGGFSKESILPKRNSDKLIARKKDWDPKKYGGFDSPTVAYSVLVVAKVEKGKSKKLKSVKELLGITIMERSSFEKNPIDFLEAKGYKEVKKDLIIKLPKYSLFELENGRKRMLASAGELQKGNELALPSKYVNFLYLASHYEKLKGSPEDNEQKQLFVEQHKHYLDEIIEQISEFSKRVILADANLDKVLSAYNKHRDKPIREQAENIIHLFTLTNLGAPAAFKYFDTTIDRKRYTSTKEVLDATLIHQSITGLYETRIDLSQLGGDGGGSSGGGGGTLNIEDEYRLHETSKGPDVPLGSTWLSDFPQAWAETGGMGLAVRQAPLIIPLKATSTPVSIKQYPMSQEARLGIKPHIQRLLDQGILVPCQSPWNTPLLPVKKPGTNDYRPVQDLREVNKRVEDIHPTVPNPYNLLSGLPPSHQWYTVLDLKDAFFCLRLHPTSQSLFAFEWRDPEMGISGQLTWTRLPQGFKNSPTLFNEALHRDLADFRIQHPDLILLQYVDDLLLAATSELDCQQGTRALLQTLGDLGYRASAKKAQICQKQVKYLGYLLKEGQRWLTEARKETVMGQPTPKTPRQLREFLGKAGFCRLFIPGFAEMAAPLYPLTKPGTLFEWGPDQQKAYQEIKQALLTAPALGLPDLTKPFELFVDEKQGYAKGVLTQKLGPWRRPVAYLSKKLDPVAAGWPPCLRMVAAIAVLTKDAGKLTMGQPLVILAPHAVEALVKQPPDRWLSNARMTHYQALLLDTDRVQFGPIVALNPATLLPLPEEGLQHDCLDILAEAHGTRPDLTDQPLPDADHTWYTDGSSFLQEGQRKAGAAVTTETEVVWAKALPAGTSAQRAELIALTQALKMAEGKKLNVYTDSRYAFATAHIHGEIYRRRGWLTSEGKEIKNKDEILALLKALFLPKRLSIIHCPGHQKGNRAEARGNRMADQAAREVATRETPETSTLLAGKRTADGSEFEKRTADGSEFESPKKKAKVE

SEQ ID NO: 2595 - protein, 2103 aa, synthetic construct
MPAAKRVKLDGGDKKYSIGLDIGTNSVGWAVITDEYKVPSKKFKVLGNTDRHSIKKNLIGALLFDSGETAEATRLKRTARRRYTRRKNRICYLQEIFSNEMAKVDDSFFHRLEESFLVEEDKKHERHPIFGNIVDEVAYHEKYPTIYHLRKKLVDSTDKADLRLIYLALAHMIKFRGHFLIEGDLNPDNSDVDKLFIQLVQTYNQLFEENPINASGVDAKAILSARLSKSRRLENLIAQLPGEKKNGLFGNLIALSLGLTPNFKSNFDLAEDAKLQLSKDTYDDDLDNLLAQIGDQYADLFLAAKNLSDAILLSDILRVNTEITKAPLSASMIKRYDEHHQDLTLLKALVRQQLPEKYKEIFFDQSKNGYAGYIDGGASQEEFYKFIKPILEKMDGTEELLVKLNREDLLRKQRTFDNGSIPHQIHLGELHAILRRQEDFYPFLKDNREKIEKILTFRIPYYVGPLARGNSRFAWMTRKSEETITPWNFEEVVDKGASAQSFIERMTNFDKNLPNEKVLPKHSLLYEYFTVYNELTKVKYVTEGMRKPAFLSGEQKKAIVDLLFKTNRKVTVKQLKEDYFKKIECFDSVEISGVEDRFNASLGTYHDLLKIIKDKDFLDNEENEDILEDIVLTLTLFEDREMIEERLKTYAHLFDDKVMKQLKRRRYTGWGRLSRKLINGIRDKQSGKTILDFLKSDGFANRNFMQLIHDDSLTFKEDIQKAQVSGQGDSLHEHIANLAGSPAIKKGILQTVKVVDELVKVMGRHKPENIVIEMARENQTTQKGQKNSRERMKRIEEGIKELGSQILKEHPVENTQLQNEKLYLYYLQNGRDMYVDQELDINRLSDYDVDHIVPQSFLKDDSIDNKVLTRSDKARGKSDNVPSEEVVKKMKNYWRQLLNAKLITQRKFDNLTKAERGGLSELDKAGFIKRQLVETRQITKHVAQILDSRMNTKYDENDKLIREVKVITLKSKLVSDFRKDFQFYKVREINNYHHAHDAYLNAVVGTALIKKYPKLESEFVYGDYKVYDVRKMIAKSEQEIGKATAKYFFYSNIMNFFKTEITLANGEIRKRPLIETNGETGEIVWDKGRDFATVRKVLSMPQVNIVKKTEVQTGGFSKESILPKRNSDKLIARKKDWDPKKYGGFDSPTVAYSVLVVAKVEKGKSKKLKSVKELLGITIMERSSFEKNPIDFLEAKGYKEVKKDLIIKLPKYSLFELENGRKRMLASAGELQKGNELALPSKYVNFLYLASHYEKLKGSPEDNEQKQLFVEQHKHYLDEIIEQISEFSKRVILADANLDKVLSAYNKHRDKPIREQAENIIHLFTLTNLGAPAAFKYFDTTIDRKRYTSTKEVLDATLIHQSITGLYETRIDLSQLGGDGGGSSGSSGSSGSSGSSGSSGGTLNIEDEYRLHETSKGPDVPLGSTWLSDFPQAWAETGGMGLAVRQAPLIIPLKATSTPVSIKQYPMSQEARLGIKPHIQRLLDQGILVPCQSPWNTPLLPVKKPGTNDYRPVQDLREVNKRVEDIHPTVPNPYNLLSGLPPSHQWYTVLDLKDAFFCLRLHPTSQSLFAFEWRDPEMGISGQLTWTRLPQGFKNSPTLFNEALHRDLADFRIQHPDLILLQYVDDLLLAATSELDCQQGTRALLQTLGDLGYRASAKKAQICQKQVKYLGYLLKEGQRWLTEARKETVMGQPTPKTPRQLREFLGKAGFCRLFIPGFAEMAAPLYPLTKPGTLFEWGPDQQKAYQEIKQALLTAPALGLPDLTKPFELFVDEKQGYAKGVLTQKLGPWRRPVAYLSKKLDPVAAGWPPCLRMVAAIAVLTKDAGKLTMGQPLVILAPHAVEALVKQPPDRWLSNARMTHYQALLLDTDRVQFGPIVALNPATLLPLPEEGLQHDCLDILAEAHGTRPDLTDQPLPDADHTWYTDGSSFLQEGQRKAGAAVTTETEVVWAKALPAGTSAQRAELIALTQALKMAEGKKLNVYTDSRYAFATAHIHGEIYRRRGWLTSEGKEIKNKDEILALLKALFLPKRLSIIHCPGHQKGNRAEARGNRMADQAAREVATRETPETSTLLAGKRTADGSEFEKRTADGSEFESPKKKAKVE

SEQ ID NO: 2596 - protein, 2088 aa, synthetic construct
MPAAKRVKLDGGDKKYSIGLDIGTNSVGWAVITDEYKVPSKKFKVLGNTDRHSIKKNLIGALLFDSGETAEATRLKRTARRRYTRRKNRICYLQEIFSNEMAKVDDSFFHRLEESFLVEEDKKHERHPIFGNIVDEVAYHEKYPTIYHLRKKLVDSTDKADLRLIYLALAHMIKFRGHFLIEGDLNPDNSDVDKLFIQLVQTYNQLFEENPINASGVDAKAILSARLSKSRRLENLIAQLPGEKKNGLFGNLIALSLGLTPNFKSNFDLAEDAKLQLSKDTYDDDLDNLLAQIGDQYADLFLAAKNLSDAILLSDILRVNTEITKAPLSASMIKRYDEHHQDLTLLKALVRQQLPEKYKEIFFDQSKNGYAGYIDGGASQEEFYKFIKPILEKMDGTEELLVKLNREDLLRKQRTFDNGSIPHQIHLGELHAILRRQEDFYPFLKDNREKIEKILTFRIPYYVGPLARGNSRFAWMTRKSEETITPWNFEEVVDKGASAQSFIERMTNFDKNLPNEKVLPKHSLLYEYFTVYNELTKVKYVTEGMRKPAFLSGEQKKAIVDLLFKTNRKVTVKQLKEDYFKKIECFDSVEISGVEDRFNASLGTYHDLLKIIKDKDFLDNEENEDILEDIVLTLTLFEDREMIEERLKTYAHLFDDKVMKQLKRRRYTGWGRLSRKLINGIRDKQSGKTILDFLKSDGFANRNFMQLIHDDSLTFKEDIQKAQVSGQGDSLHEHIANLAGSPAIKKGILQTVKVVDELVKVMGRHKPENIVIEMARENQTTQKGQKNSRERMKRIEEGIKELGSQILKEHPVENTQLQNEKLYLYYLQNGRDMYVDQELDINRLSDYDVDHIVPQSFLKDDSIDNKVLTRSDKARGKSDNVPSEEVVKKMKNYWRQLLNAKLITQRKFDNLTKAERGGLSELDKAGFIKRQLVETRQITKHVAQILDSRMNTKYDENDKLIREVKVITLKSKLVSDFRKDFQFYKVREINNYHHAHDAYLNAVVGTALIKKYPKLESEFVYGDYKVYDVRKMIAKSEQEIGKATAKYFFYSNIMNFFKTEITLANGEIRKRPLIETNGETGEIVWDKGRDFATVRKVLSMPQVNIVKKTEVQTGGFSKESILPKRNSDKLIARKKDWDPKKYGGFDSPTVAYSVLVVAKVEKGKSKKLKSVKELLGITIMERSSFEKNPIDFLEAKGYKEVKKDLIIKLPKYSLFELENGRKRMLASAGELQKGNELALPSKYVNFLYLASHYEKLKGSPEDNEQKQLFVEQHKHYLDEIIEQISEFSKRVILADANLDKVLSAYNKHRDKPIREQAENIIHLFTLTNLGAPAAFKYFDTTIDRKRYTSTKEVLDATLIHQSITGLYETRIDLSQLGGDGGGGGGGTLNIEDEYRLHETSKGPDVPLGSTWLSDFPQAWAETGGMGLAVRQAPLIIPLKATSTPVSIKQYPMSQEARLGIKPHIQRLLDQGILVPCQSPWNTPLLPVKKPGTNDYRPVQDLREVNKRVEDIHPTVPNPYNLLSGLPPSHQWYTVLDLKDAFFCLRLHPTSQSLFAFEWRDPEMGISGQLTWTRLPQGFKNSPTLFNEALHRDLADFRIQHPDLILLQYVDDLLLAATSELDCQQGTRALLQTLGDLGYRASAKKAQICQKQVKYLGYLLKEGQRWLTEARKETVMGQPTPKTPRQLREFLGKAGFCRLFIPGFAEMAAPLYPLTKPGTLFEWGPDQQKAYQEIKQALLTAPALGLPDLTKPFELFVDEKQGYAKGVLTQKLGPWRRPVAYLSKKLDPVAAGWPPCLRMVAAIAVLTKDAGKLTMGQPLVILAPHAVEALVKQPPDRWLSNARMTHYQALLLDTDRVQFGPIVALNPATLLPLPEEGLQHDCLDILAEAHGTRPDLTDQPLPDADHTWYTDGSSFLQEGQRKAGAAVTTETEVVWAKALPAGTSAQRAELIALTQALKMAEGKKLNVYTDSRYAFATAHIHGEIYRRRGWLTSEGKEIKNKDEILALLKALFLPKRLSIIHCPGHQKGNRAEARGNRMADQAAREVATRETPETSTLLAGKRTADGSEFEKRTADGSEFESPKKKAKVE

SEQ ID NO: 2597 - protein, 2096 aa, synthetic construct
MPAAKRVKLDGGDKKYSIGLDIGTNSVGWAVITDEYKVPSKKFKVLGNTDRHSIKKNLIGALLFDSGETAEATRLKRTARRRYTRRKNRICYLQEIFSNEMAKVDDSFFHRLEESFLVEEDKKHERHPIFGNIVDEVAYHEKYPTIYHLRKKLVDSTDKADLRLIYLALAHMIKFRGHFLIEGDLNPDNSDVDKLFIQLVQTYNQLFEENPINASGVDAKAILSARLSKSRRLENLIAQLPGEKKNGLFGNLIALSLGLTPNFKSNFDLAEDAKLQLSKDTYDDDLDNLLAQIGDQYADLFLAAKNLSDAILLSDILRVNTEITKAPLSASMIKRYDEHHQDLTLLKALVRQQLPEKYKEIFFDQSKNGYAGYIDGGASQEEFYKFIKPILEKMDGTEELLVKLNREDLLRKQRTFDNGSIPHQIHLGELHAILRRQEDFYPFLKDNREKIEKILTFRIPYYVGPLARGNSRFAWMTRKSEETITPWNFEEVVDKGASAQSFIERMTNFDKNLPNEKVLPKHSLLYEYFTVYNELTKVKYVTEGMRKPAFLSGEQKKAIVDLLFKTNRKVTVKQLKEDYFKKIECFDSVEISGVEDRFNASLGTYHDLLKIIKDKDFLDNEENEDILEDIVLTLTLFEDREMIEERLKTYAHLFDDKVMKQLKRRRYTGWGRLSRKLINGIRDKQSGKTILDFLKSDGFANRNFMQLIHDDSLTFKEDIQKAQVSGQGDSLHEHIANLAGSPAIKKGILQTVKVVDELVKVMGRHKPENIVIEMARENQTTQKGQKNSRERMKRIEEGIKELGSQILKEHPVENTQLQNEKLYLYYLQNGRDMYVDQELDINRLSDYDVDHIVPQSFLKDDSIDNKVLTRSDKARGKSDNVPSEEVVKKMKNYWRQLLNAKLITQRKFDNLTKAERGGLSELDKAGFIKRQLVETRQITKHVAQILDSRMNTKYDENDKLIREVKVITLKSKLVSDFRKDFQFYKVREINNYHHAHDAYLNAVVGTALIKKYPKLESEFVYGDYKVYDVRKMIAKSEQEIGKATAKYFFYSNIMNFFKTEITLANGEIRKRPLIETNGETGEIVWDKGRDFATVRKVLSMPQVNIVKKTEVQTGGFSKESILPKRNSDKLIARKKDWDPKKYGGFDSPTVAYSVLVVAKVEKGKSKKLKSVKELLGITIMERSSFEKNPIDFLEAKGYKEVKKDLIIKLPKYSLFELENGRKRMLASAGELQKGNELALPSKYVNFLYLASHYEKLKGSPEDNEQKQLFVEQHKHYLDEIIEQISEFSKRVILADANLDKVLSAYNKHRDKPIREQAENIIHLFTLTNLGAPAAFKYFDTTIDRKRYTSTKEVLDATLIHQSITGLYETRIDLSQLGGDGGGGGGGSEAAAKGGTLNIEDEYRLHETSKGPDVPLGSTWLSDFPQAWAETGGMGLAVRQAPLIIPLKATSTPVSIKQYPMSQEARLGIKPHIQRLLDQGILVPCQSPWNTPLLPVKKPGTNDYRPVQDLREVNKRVEDIHPTVPNPYNLLSGLPPSHQWYTVLDLKDAFFCLRLHPTSQSLFAFEWRDPEMGISGQLTWTRLPQGFKNSPTLFNEALHRDLADFRIQHPDLILLQYVDDLLLAATSELDCQQGTRALLQTLGDLGYRASAKKAQICQKQVKYLGYLLKEGQRWLTEARKETVMGQPTPKTPRQLREFLGKAGFCRLFIPGFAEMAAPLYPLTKPGTLFEWGPDQQKAYQEIKQALLTAPALGLPDLTKPFELFVDEKQGYAKGVLTQKLGPWRRPVAYLSKKLDPVAAGWPPCLRMVAAIAVLTKDAGKLTMGQPLVILAPHAVEALVKQPPDRWLSNARMTHYQALLLDTDRVQFGPIVALNPATLLPLPEEGLQHDCLDILAEAHGTRPDLTDQPLPDADHTWYTDGSSFLQEGQRKAGAAVTTETEVVWAKALPAGTSAQRAELIALTQALKMAEGKKLNVYTDSRYAFATAHIHGEIYRRRGWLTSEGKEIKNKDEILALLKALFLPKRLSIIHCPGHQKGNRAEARGNRMADQAAREVATRETPETSTLLAGKRTADGSEFEKRTADGSEFESPKKKAKVE

SEQ ID NO: 2598 - protein, 2110 aa, synthetic construct
MPAAKRVKLDGGDKKYSIGLDIGTNSVGWAVITDEYKVPSKKFKVLGNTDRHSIKKNLIGALLFDSGETAEATRLKRTARRRYTRRKNRICYLQEIFSNEMAKVDDSFFHRLEESFLVEEDKKHERHPIFGNIVDEVAYHEKYPTIYHLRKKLVDSTDKADLRLIYLALAHMIKFRGHFLIEGDLNPDNSDVDKLFIQLVQTYNQLFEENPINASGVDAKAILSARLSKSRRLENLIAQLPGEKKNGLFGNLIALSLGLTPNFKSNFDLAEDAKLQLSKDTYDDDLDNLLAQIGDQYADLFLAAKNLSDAILLSDILRVNTEITKAPLSASMIKRYDEHHQDLTLLKALVRQQLPEKYKEIFFDQSKNGYAGYIDGGASQEEFYKFIKPILEKMDGTEELLVKLNREDLLRKQRTFDNGSIPHQIHLGELHAILRRQEDFYPFLKDNREKIEKILTFRIPYYVGPLARGNSRFAWMTRKSEETITPWNFEEVVDKGASAQSFIERMTNFDKNLPNEKVLPKHSLLYEYFTVYNELTKVKYVTEGMRKPAFLSGEQKKAIVDLLFKTNRKVTVKQLKEDYFKKIECFDSVEISGVEDRFNASLGTYHDLLKIIKDKDFLDNEENEDILEDIVLTLTLFEDREMIEERLKTYAHLFDDKVMKQLKRRRYTGWGRLSRKLINGIRDKQSGKTILDFLKSDGFANRNFMQLIHDDSLTFKEDIQKAQVSGQGDSLHEHIANLAGSPAIKKGILQTVKVVDELVKVMGRHKPENIVIEMARENQTTQKGQKNSRERMKRIEEGIKELGSQILKEHPVENTQLQNEKLYLYYLQNGRDMYVDQELDINRLSDYDVDHIVPQSFLKDDSIDNKVLTRSDKARGKSDNVPSEEVVKKMKNYWRQLLNAKLITQRKFDNLTKAERGGLSELDKAGFIKRQLVETRQITKHVAQILDSRMNTKYDENDKLIREVKVITLKSKLVSDFRKDFQFYKVREINNYHHAHDAYLNAVVGTALIKKYPKLESEFVYGDYKVYDVRKMIAKSEQEIGKATAKYFFYSNIMNFFKTEITLANGEIRKRPLIETNGETGEIVWDKGRDFATVRKVLSMPQVNIVKKTEVQTGGFSKESILPKRNSDKLIARKKDWDPKKYGGFDSPTVAYSVLVVAKVEKGKSKKLKSVKELLGITIMERSSFEKNPIDFLEAKGYKEVKKDLIIKLPKYSLFELENGRKRMLASAGELQKGNELALPSKYVNFLYLASHYEKLKGSPEDNEQKQLFVEQHKHYLDEIIEQISEFSKRVILADANLDKVLSAYNKHRDKPIREQAENIIHLFTLTNLGAPAAFKYFDTTIDRKRYTSTKEVLDATLIHQSITGLYETRIDLSQLGGDGGGGGGSGGGGSGGGGSGGGGSGGGGSGGTLNIEDEYRLHETSKGPDVPLGSTWLSDFPQAWAETGGMGLAVRQAPLIIPLKATSTPVSIKQYPMSQEARLGIKPHIQRLLDQGILVPCQSPWNTPLLPVKKPGTNDYRPVQDLREVNKRVEDIHPTVPNPYNLLSGLPPSHQWYTVLDLKDAFFCLRLHPTSQSLFAFEWRDPEMGISGQLTWTRLPQGFKNSPTLFNEALHRDLADFRIQHPDLILLQYVDDLLLAATSELDCQQGTRALLQTLGDLGYRASAKKAQICQKQVKYLGYLLKEGQRWLTEARKETVMGQPTPKTPRQLREFLGKAGFCRLFIPGFAEMAAPLYPLTKPGTLFEWGPDQQKAYQEIKQALLTAPALGLPDLTKPFELFVDEKQGYAKGVLTQKLGPWRRPVAYLSKKLDPVAAGWPPCLRMVAAIAVLTKDAGKLTMGQPLVILAPHAVEALVKQPPDRWLSNARMTHYQALLLDTDRVQFGPIVALNPATLLPLPEEGLQHDCLDILAEAHGTRPDLTDQPLPDADHTWYTDGSSFLQEGQRKAGAAVTTETEVVWAKALPAGTSAQRAELIALTQALKMAEGKKLNVYTDSRYAFATAHIHGEIYRRRGWLTSEGKEIKNKDEILALLKALFLPKRLSIIHCPGHQKGNRAEARGNRMADQAAREVATRETPETSTLLAGKRTADGSEFEKRTADGSEFESPKKKAKVE

SEQ ID NO: 2599 - protein, 2096 aa, synthetic construct
MPAAKRVKLDGGDKKYSIGLDIGTNSVGWAVITDEYKVPSKKFKVLGNTDRHSIKKNLIGALLFDSGETAEATRLKRTARRRYTRRKNRICYLQEIFSNEMAKVDDSFFHRLEESFLVEEDKKHERHPIFGNIVDEVAYHEKYPTIYHLRKKLVDSTDKADLRLIYLALAHMIKFRGHFLIEGDLNPDNSDVDKLFIQLVQTYNQLFEENPINASGVDAKAILSARLSKSRRLENLIAQLPGEKKNGLFGNLIALSLGLTPNFKSNFDLAEDAKLQLSKDTYDDDLDNLLAQIGDQYADLFLAAKNLSDAILLSDILRVNTEITKAPLSASMIKRYDEHHQDLTLLKALVRQQLPEKYKEIFFDQSKNGYAGYIDGGASQEEFYKFIKPILEKMDGTEELLVKLNREDLLRKQRTFDNGSIPHQIHLGELHAILRRQEDFYPFLKDNREKIEKILTFRIPYYVGPLARGNSRFAWMTRKSEETITPWNFEEVVDKGASAQSFIERMTNFDKNLPNEKVLPKHSLLYEYFTVYNELTKVKYVTEGMRKPAFLSGEQKKAIVDLLFKTNRKVTVKQLKEDYFKKIECFDSVEISGVEDRFNASLGTYHDLLKIIKDKDFLDNEENEDILEDIVLTLTLFEDREMIEERLKTYAHLFDDKVMKQLKRRRYTGWGRLSRKLINGIRDKQSGKTILDFLKSDGFANRNFMQLIHDDSLTFKEDIQKAQVSGQGDSLHEHIANLAGSPAIKKGILQTVKVVDELVKVMGRHKPENIVIEMARENQTTQKGQKNSRERMKRIEEGIKELGSQILKEHPVENTQLQNEKLYLYYLQNGRDMYVDQELDINRLSDYDVDHIVPQSFLKDDSIDNKVLTRSDKARGKSDNVPSEEVVKKMKNYWRQLLNAKLITQRKFDNLTKAERGGLSELDKAGFIKRQLVETRQITKHVAQILDSRMNTKYDENDKLIREVKVITLKSKLVSDFRKDFQFYKVREINNYHHAHDAYLNAVVGTALIKKYPKLESEFVYGDYKVYDVRKMIAKSEQEIGKATAKYFFYSNIMNFFKTEITLANGEIRKRPLIETNGETGEIVWDKGRDFATVRKVLSMPQVNIVKKTEVQTGGFSKESILPKRNSDKLIARKKDWDPKKYGGFDSPTVAYSVLVVAKVEKGKSKKLKSVKELLGITIMERSSFEKNPIDFLEAKGYKEVKKDLIIKLPKYSLFELENGRKRMLASAGELQKGNELALPSKYVNFLYLASHYEKLKGSPEDNEQKQLFVEQHKHYLDEIIEQISEFSKRVILADANLDKVLSAYNKHRDKPIREQAENIIHLFTLTNLGAPAAFKYFDTTIDRKRYTSTKEVLDATLIHQSITGLYETRIDLSQLGGDGGGSSPAPEAAAKGGTLNIEDEYRLHETSKGPDVPLGSTWLSDFPQAWAETGGMGLAVRQAPLIIPLKATSTPVSIKQYPMSQEARLGIKPHIQRLLDQGILVPCQSPWNTPLLPVKKPGTNDYRPVQDLREVNKRVEDIHPTVPNPYNLLSGLPPSHQWYTVLDLKDAFFCLRLHPTSQSLFAFEWRDPEMGISGQLTWTRLPQGFKNSPTLFNEALHRDLADFRIQHPDLILLQYVDDLLLAATSELDCQQGTRALLQTLGDLGYRASAKKAQICQKQVKYLGYLLKEGQRWLTEARKETVMGQPTPKTPRQLREFLGKAGFCRLFIPGFAEMAAPLYPLTKPGTLFEWGPDQQKAYQEIKQALLTAPALGLPDLTKPFELFVDEKQGYAKGVLTQKLGPWRRPVAYLSKKLDPVAAGWPPCLRMVAAIAVLTKDAGKLTMGQPLVILAPHAVEALVKQPPDRWLSNARMTHYQALLLDTDRVQFGPIVALNPATLLPLPEEGLQHDCLDILAEAHGTRPDLTDQPLPDADHTWYTDGSSFLQEGQRKAGAAVTTETEVVWAKALPAGTSAQRAELIALTQALKMAEGKKLNVYTDSRYAFATAHIHGEIYRRRGWLTSEGKEIKNKDEILALLKALFLPKRLSIIHCPGHQKGNRAEARGNRMADQAAREVATRETPETSTLLAGKRTADGSEFEKRTADGSEFESPKKKAKVE

SEQ ID NO: 2600 - protein, 2093 aa, synthetic construct
MPAAKRVKLDGGDKKYSIGLDIGTNSVGWAVITDEYKVPSKKFKVLGNTDRHSIKKNLIGALLFDSGETAEATRLKRTARRRYTRRKNRICYLQEIFSNEMAKVDDSFFHRLEESFLVEEDKKHERHPIFGNIVDEVAYHEKYPTIYHLRKKLVDSTDKADLRLIYLALAHMIKFRGHFLIEGDLNPDNSDVDKLFIQLVQTYNQLFEENPINASGVDAKAILSARLSKSRRLENLIAQLPGEKKNGLFGNLIALSLGLTPNFKSNFDLAEDAKLQLSKDTYDDDLDNLLAQIGDQYADLFLAAKNLSDAILLSDILRVNTEITKAPLSASMIKRYDEHHQDLTLLKALVRQQLPEKYKEIFFDQSKNGYAGYIDGGASQEEFYKFIKPILEKMDGTEELLVKLNREDLLRKQRTFDNGSIPHQIHLGELHAILRRQEDFYPFLKDNREKIEKILTFRIPYYVGPLARGNSRFAWMTRKSEETITPWNFEEVVDKGASAQSFIERMTNFDKNLPNEKVLPKHSLLYEYFTVYNELTKVKYVTEGMRKPAFLSGEQKKAIVDLLFKTNRKVTVKQLKEDYFKKIECFDSVEISGVEDRFNASLGTYHDLLKIIKDKDFLDNEENEDILEDIVLTLTLFEDREMIEERLKTYAHLFDDKVMKQLKRRRYTGWGRLSRKLINGIRDKQSGKTILDFLKSDGFANRNFMQLIHDDSLTFKEDIQKAQVSGQGDSLHEHIANLAGSPAIKKGILQTVKVVDELVKVMGRHKPENIVIEMARENQTTQKGQKNSRERMKRIEEGIKELGSQILKEHPVENTQLQNEKLYLYYLQNGRDMYVDQELDINRLSDYDVDHIVPQSFLKDDSIDNKVLTRSDKARGKSDNVPSEEVVKKMKNYWRQLLNAKLITQRKFDNLTKAERGGLSELDKAGFIKRQLVETRQITKHVAQILDSRMNTKYDENDKLIREVKVITLKSKLVSDFRKDFQFYKVREINNYHHAHDAYLNAVVGTALIKKYPKLESEFVYGDYKVYDVRKMIAKSEQEIGKATAKYFFYSNIMNFFKTEITLANGEIRKRPLIETNGETGEIVWDKGRDFATVRKVLSMPQVNIVKKTEVQTGGFSKESILPKRNSDKLIARKKDWDPKKYGGFDSPTVAYSVLVVAKVEKGKSKKLKSVKELLGITIMERSSFEKNPIDFLEAKGYKEVKKDLIIKLPKYSLFELENGRKRMLASAGELQKGNELALPSKYVNFLYLASHYEKLKGSPEDNEQKQLFVEQHKHYLDEIIEQISEFSKRVILADANLDKVLSAYNKHRDKPIREQAENIIHLFTLTNLGAPAAFKYFDTTIDRKRYTSTKEVLDATLIHQSITGLYETRIDLSQLGGDGGGGSEAAAKGGTLNIEDEYRLHETSKGPDVPLGSTWLSDFPQAWAETGGMGLAVRQAPLIIPLKATSTPVSIKQYPMSQEARLGIKPHIQRLLDQGILVPCQSPWNTPLLPVKKPGTNDYRPVQDLREVNKRVEDIHPTVPNPYNLLSGLPPSHQWYTVLDLKDAFFCLRLHPTSQSLFAFEWRDPEMGISGQLTWTRLPQGFKNSPTLFNEALHRDLADFRIQHPDLILLQYVDDLLLAATSELDCQQGTRALLQTLGDLGYRASAKKAQICQKQVKYLGYLLKEGQRWLTEARKETVMGQPTPKTPRQLREFLGKAGFCRLFIPGFAEMAAPLYPLTKPGTLFEWGPDQQKAYQEIKQALLTAPALGLPDLTKPFELFVDEKQGYAKGVLTQKLGPWRRPVAYLSKKLDPVAAGWPPCLRMVAAIAVLTKDAGKLTMGQPLVILAPHAVEALVKQPPDRWLSNARMTHYQALLLDTDRVQFGPIVALNPATLLPLPEEGLQHDCLDILAEAHGTRPDLTDQPLPDADHTWYTDGSSFLQEGQRKAGAAVTTETEVVWAKALPAGTSAQRAELIALTQALKMAEGKKLNVYTDSRYAFATAHIHGEIYRRRGWLTSEGKEIKNKDEILALLKALFLPKRLSIIHCPGHQKGNRAEARGNRMADQAAREVATRETPETSTLLAGKRTADGSEFEKRTADGSEFESPKKKAKVE

SEQ ID NO: 2601 - protein, 2094 aa, synthetic construct
MPAAKRVKLDGGDKKYSIGLDIGTNSVGWAVITDEYKVPSKKFKVLGNTDRHSIKKNLIGALLFDSGETAEATRLKRTARRRYTRRKNRICYLQEIFSNEMAKVDDSFFHRLEESFLVEEDKKHERHPIFGNIVDEVAYHEKYPTIYHLRKKLVDSTDKADLRLIYLALAHMIKFRGHFLIEGDLNPDNSDVDKLFIQLVQTYNQLFEENPINASGVDAKAILSARLSKSRRLENLIAQLPGEKKNGLFGNLIALSLGLTPNFKSNFDLAEDAKLQLSKDTYDDDLDNLLAQIGDQYADLFLAAKNLSDAILLSDILRVNTEITKAPLSASMIKRYDEHHQDLTLLKALVRQQLPEKYKEIFFDQSKNGYAGYIDGGASQEEFYKFIKPILEKMDGTEELLVKLNREDLLRKQRTFDNGSIPHQIHLGELHAILRRQEDFYPFLKDNREKIEKILTFRIPYYVGPLARGNSRFAWMTRKSEETITPWNFEEVVDKGASAQSFIERMTNFDKNLPNEKVLPKHSLLYEYFTVYNELTKVKYVTEGMRKPAFLSGEQKKAIVDLLFKTNRKVTVKQLKEDYFKKIECFDSVEISGVEDRFNASLGTYHDLLKIIKDKDFLDNEENEDILEDIVLTLTLFEDREMIEERLKTYAHLFDDKVMKQLKRRRYTGWGRLSRKLINGIRDKQSGKTILDFLKSDGFANRNFMQLIHDDSLTFKEDIQKAQVSGQGDSLHEHIANLAGSPAIKKGILQTVKVVDELVKVMGRHKPENIVIEMARENQTTQKGQKNSRERMKRIEEGIKELGSQILKEHPVENTQLQNEKLYLYYLQNGRDMYVDQELDINRLSDYDVDHIVPQSFLKDDSIDNKVLTRSDKARGKSDNVPSEEVVKKMKNYWRQLLNAKLITQRKFDNLTKAERGGLSELDKAGFIKRQLVETRQITKHVAQILDSRMNTKYDENDKLIREVKVITLKSKLVSDFRKDFQFYKVREINNYHHAHDAYLNAVVGTALIKKYPKLESEFVYGDYKVYDVRKMIAKSEQEIGKATAKYFFYSNIMNFFKTEITLANGEIRKRPLIETNGETGEIVWDKGRDFATVRKVLSMPQVNIVKKTEVQTGGFSKESILPKRNSDKLIARKKDWDPKKYGGFDSPTVAYSVLVVAKVEKGKSKKLKSVKELLGITIMERSSFEKNPIDFLEAKGYKEVKKDLIIKLPKYSLFELENGRKRMLASAGELQKGNELALPSKYVNFLYLASHYEKLKGSPEDNEQKQLFVEQHKHYLDEIIEQISEFSKRVILADANLDKVLSAYNKHRDKPIREQAENIIHLFTLTNLGAPAAFKYFDTTIDRKRYTSTKEVLDATLIHQSITGLYETRIDLSQLGGDGGGGSGGGGSSGGTLNIEDEYRLHETSKGPDVPLGSTWLSDFPQAWAETGGMGLAVRQAPLIIPLKATSTPVSIKQYPMSQEARLGIKPHIQRLLDQGILVPCQSPWNTPLLPVKKPGTNDYRPVQDLREVNKRVEDIHPTVPNPYNLLSGLPPSHQWYTVLDLKDAFFCLRLHPTSQSLFAFEWRDPEMGISGQLTWTRLPQGFKNSPTLFNEALHRDLADFRIQHPDLILLQYVDDLLLAATSELDCQQGTRALLQTLGDLGYRASAKKAQICQKQVKYLGYLLKEGQRWLTEARKETVMGQPTPKTPRQLREFLGKAGFCRLFIPGFAEMAAPLYPLTKPGTLFEWGPDQQKAYQEIKQALLTAPALGLPDLTKPFELFVDEKQGYAKGVLTQKLGPWRRPVAYLSKKLDPVAAGWPPCLRMVAAIAVLTKDAGKLTMGQPLVILAPHAVEALVKQPPDRWLSNARMTHYQALLLDTDRVQFGPIVALNPATLLPLPEEGLQHDCLDILAEAHGTRPDLTDQPLPDADHTWYTDGSSFLQEGQRKAGAAVTTETEVVWAKALPAGTSAQRAELIALTQALKMAEGKKLNVYTDSRYAFATAHIHGEIYRRRGWLTSEGKEIKNKDEILALLKALFLPKRLSIIHCPGHQKGNRAEARGNRMADQAAREVATRETPETSTLLAGKRTADGSEFEKRTADGSEFESPKKKAKVE

SEQ ID NO: 2602 - protein, 2089 aa, synthetic construct
MPAAKRVKLDGGDKKYSIGLDIGTNSVGWAVITDEYKVPSKKFKVLGNTDRHSIKKNLIGALLFDSGETAEATRLKRTARRRYTRRKNRICYLQEIFSNEMAKVDDSFFHRLEESFLVEEDKKHERHPIFGNIVDEVAYHEKYPTIYHLRKKLVDSTDKADLRLIYLALAHMIKFRGHFLIEGDLNPDNSDVDKLFIQLVQTYNQLFEENPINASGVDAKAILSARLSKSRRLENLIAQLPGEKKNGLFGNLIALSLGLTPNFKSNFDLAEDAKLQLSKDTYDDDLDNLLAQIGDQYADLFLAAKNLSDAILLSDILRVNTEITKAPLSASMIKRYDEHHQDLTLLKALVRQQLPEKYKEIFFDQSKNGYAGYIDGGASQEEFYKFIKPILEKMDGTEELLVKLNREDLLRKQRTFDNGSIPHQIHLGELHAILRRQEDFYPFLKDNREKIEKILTFRIPYYVGPLARGNSRFAWMTRKSEETITPWNFEEVVDKGASAQSFIERMTNFDKNLPNEKVLPKHSLLYEYFTVYNELTKVKYVTEGMRKPAFLSGEQKKAIVDLLFKTNRKVTVKQLKEDYFKKIECFDSVEISGVEDRFNASLGTYHDLLKIIKDKDFLDNEENEDILEDIVLTLTLFEDREMIEERLKTYAHLFDDKVMKQLKRRRYTGWGRLSRKLINGIRDKQSGKTILDFLKSDGFANRNFMQLIHDDSLTFKEDIQKAQVSGQGDSLHEHIANLAGSPAIKKGILQTVKVVDELVKVMGRHKPENIVIEMARENQTTQKGQKNSRERMKRIEEGIKELGSQILKEHPVENTQLQNEKLYLYYLQNGRDMYVDQELDINRLSDYDVDHIVPQSFLKDDSIDNKVLTRSDKARGKSDNVPSEEVVKKMKNYWRQLLNAKLITQRKFDNLTKAERGGLSELDKAGFIKRQLVETRQITKHVAQILDSRMNTKYDENDKLIREVKVITLKSKLVSDFRKDFQFYKVREINNYHHAHDAYLNAVVGTALIKKYPKLESEFVYGDYKVYDVRKMIAKSEQEIGKATAKYFFYSNIMNFFKTEITLANGEIRKRPLIETNGETGEIVWDKGRDFATVRKVLSMPQVNIVKKTEVQTGGFSKESILPKRNSDKLIARKKDWDPKKYGGFDSPTVAYSVLVVAKVEKGKSKKLKSVKELLGITIMERSSFEKNPIDFLEAKGYKEVKKDLIIKLPKYSLFELENGRKRMLASAGELQKGNELALPSKYVNFLYLASHYEKLKGSPEDNEQKQLFVEQHKHYLDEIIEQISEFSKRVILADANLDKVLSAYNKHRDKPIREQAENIIHLFTLTNLGAPAAFKYFDTTIDRKRYTSTKEVLDATLIHQSITGLYETRIDLSQLGGDGGGGGGGGTLNIEDEYRLHETSKGPDVPLGSTWLSDFPQAWAETGGMGLAVRQAPLIIPLKATSTPVSIKQYPMSQEARLGIKPHIQRLLDQGILVPCQSPWNTPLLPVKKPGTNDYRPVQDLREVNKRVEDIHPTVPNPYNLLSGLPPSHQWYTVLDLKDAFFCLRLHPTSQSLFAFEWRDPEMGISGQLTWTRLPQGFKNSPTLFNEALHRDLADFRIQHPDLILLQYVDDLLLAATSELDCQQGTRALLQTLGDLGYRASAKKAQICQKQVKYLGYLLKEGQRWLTEARKETVMGQPTPKTPRQLREFLGKAGFCRLFIPGFAEMAAPLYPLTKPGTLFEWGPDQQKAYQEIKQALLTAPALGLPDLTKPFELFVDEKQGYAKGVLTQKLGPWRRPVAYLSKKLDPVAAGWPPCLRMVAAIAVLTKDAGKLTMGQPLVILAPHAVEALVKQPPDRWLSNARMTHYQALLLDTDRVQFGPIVALNPATLLPLPEEGLQHDCLDILAEAHGTRPDLTDQPLPDADHTWYTDGSSFLQEGQRKAGAAVTTETEVVWAKALPAGTSAQRAELIALTQALKMAEGKKLNVYTDSRYAFATAHIHGEIYRRRGWLTSEGKEIKNKDEILALLKALFLPKRLSIIHCPGHQKGNRAEARGNRMADQAAREVATRETPETSTLLAGKRTADGSEFEKRTADGSEFESPKKKAKVE

SEQ ID NO: 2603 - protein, 2096 aa, synthetic construct
MPAAKRVKLDGGDKKYSIGLDIGTNSVGWAVITDEYKVPSKKFKVLGNTDRHSIKKNLIGALLFDSGETAEATRLKRTARRRYTRRKNRICYLQEIFSNEMAKVDDSFFHRLEESFLVEEDKKHERHPIFGNIVDEVAYHEKYPTIYHLRKKLVDSTDKADLRLIYLALAHMIKFRGHFLIEGDLNPDNSDVDKLFIQLVQTYNQLFEENPINASGVDAKAILSARLSKSRRLENLIAQLPGEKKNGLFGNLIALSLGLTPNFKSNFDLAEDAKLQLSKDTYDDDLDNLLAQIGDQYADLFLAAKNLSDAILLSDILRVNTEITKAPLSASMIKRYDEHHQDLTLLKALVRQQLPEKYKEIFFDQSKNGYAGYIDGGASQEEFYKFIKPILEKMDGTEELLVKLNREDLLRKQRTFDNGSIPHQIHLGELHAILRRQEDFYPFLKDNREKIEKILTFRIPYYVGPLARGNSRFAWMTRKSEETITPWNFEEVVDKGASAQSFIERMTNFDKNLPNEKVLPKHSLLYEYFTVYNELTKVKYVTEGMRKPAFLSGEQKKAIVDLLFKTNRKVTVKQLKEDYFKKIECFDSVEISGVEDRFNASLGTYHDLLKIIKDKDFLDNEENEDILEDIVLTLTLFEDREMIEERLKTYAHLFDDKVMKQLKRRRYTGWGRLSRKLINGIRDKQSGKTILDFLKSDGFANRNFMQLIHDDSLTFKEDIQKAQVSGQGDSLHEHIANLAGSPAIKKGILQTVKVVDELVKVMGRHKPENIVIEMARENQTTQKGQKNSRERMKRIEEGIKELGSQILKEHPVENTQLQNEKLYLYYLQNGRDMYVDQELDINRLSDYDVDHIVPQSFLKDDSIDNKVLTRSDKARGKSDNVPSEEVVKKMKNYWRQLLNAKLITQRKFDNLTKAERGGLSELDKAGFIKRQLVETRQITKHVAQILDSRMNTKYDENDKLIREVKVITLKSKLVSDFRKDFQFYKVREINNYHHAHDAYLNAVVGTALIKKYPKLESEFVYGDYKVYDVRKMIAKSEQEIGKATAKYFFYSNIMNFFKTEITLANGEIRKRPLIETNGETGEIVWDKGRDFATVRKVLSMPQVNIVKKTEVQTGGFSKESILPKRNSDKLIARKKDWDPKKYGGFDSPTVAYSVLVVAKVEKGKSKKLKSVKELLGITIMERSSFEKNPIDFLEAKGYKEVKKDLIIKLPKYSLFELENGRKRMLASAGELQKGNELALPSKYVNFLYLASHYEKLKGSPEDNEQKQLFVEQHKHYLDEIIEQISEFSKRVILADANLDKVLSAYNKHRDKPIREQAENIIHLFTLTNLGAPAAFKYFDTTIDRKRYTSTKEVLDATLIHQSITGLYETRIDLSQLGGDGGGGSGGGEAAAKGGTLNIEDEYRLHETSKGPDVPLGSTWLSDFPQAWAETGGMGLAVRQAPLIIPLKATSTPVSIKQYPMSQEARLGIKPHIQRLLDQGILVPCQSPWNTPLLPVKKPGTNDYRPVQDLREVNKRVEDIHPTVPNPYNLLSGLPPSHQWYTVLDLKDAFFCLRLHPTSQSLFAFEWRDPEMGISGQLTWTRLPQGFKNSPTLFNEALHRDLADFRIQHPDLILLQYVDDLLLAATSELDCQQGTRALLQTLGDLGYRASAKKAQICQKQVKYLGYLLKEGQRWLTEARKETVMGQPTPKTPRQLREFLGKAGFCRLFIPGFAEMAAPLYPLTKPGTLFEWGPDQQKAYQEIKQALLTAPALGLPDLTKPFELFVDEKQGYAKGVLTQKLGPWRRPVAYLSKKLDPVAAGWPPCLRMVAAIAVLTKDAGKLTMGQPLVILAPHAVEALVKQPPDRWLSNARMTHYQALLLDTDRVQFGPIVALNPATLLPLPEEGLQHDCLDILAEAHGTRPDLTDQPLPDADHTWYTDGSSFLQEGQRKAGAAVTTETEVVWAKALPAGTSAQRAELIALTQALKMAEGKKLNVYTDSRYAFATAHIHGEIYRRRGWLTSEGKEIKNKDEILALLKALFLPKRLSIIHCPGHQKGNRAEARGNRMADQAAREVATRETPETSTLLAGKRTADGSEFEKRTADGSEFESPKKKAKVE

SEQ ID NO: 2604 - protein, 2091 aa, synthetic construct
MPAAKRVKLDGGDKKYSIGLDIGTNSVGWAVITDEYKVPSKKFKVLGNTDRHSIKKNLIGALLFDSGETAEATRLKRTARRRYTRRKNRICYLQEIFSNEMAKVDDSFFHRLEESFLVEEDKKHERHPIFGNIVDEVAYHEKYPTIYHLRKKLVDSTDKADLRLIYLALAHMIKFRGHFLIEGDLNPDNSDVDKLFIQLVQTYNQLFEENPINASGVDAKAILSARLSKSRRLENLIAQLPGEKKNGLFGNLIALSLGLTPNFKSNFDLAEDAKLQLSKDTYDDDLDNLLAQIGDQYADLFLAAKNLSDAILLSDILRVNTEITKAPLSASMIKRYDEHHQDLTLLKALVRQQLPEKYKEIFFDQSKNGYAGYIDGGASQEEFYKFIKPILEKMDGTEELLVKLNREDLLRKQRTFDNGSIPHQIHLGELHAILRRQEDFYPFLKDNREKIEKILTFRIPYYVGPLARGNSRFAWMTRKSEETITPWNFEEVVDKGASAQSFIERMTNFDKNLPNEKVLPKHSLLYEYFTVYNELTKVKYVTEGMRKPAFLSGEQKKAIVDLLFKTNRKVTVKQLKEDYFKKIECFDSVEISGVEDRFNASLGTYHDLLKIIKDKDFLDNEENEDILEDIVLTLTLFEDREMIEERLKTYAHLFDDKVMKQLKRRRYTGWGRLSRKLINGIRDKQSGKTILDFLKSDGFANRNFMQLIHDDSLTFKEDIQKAQVSGQGDSLHEHIANLAGSPAIKKGILQTVKVVDELVKVMGRHKPENIVIEMARENQTTQKGQKNSRERMKRIEEGIKELGSQILKEHPVENTQLQNEKLYLYYLQNGRDMYVDQELDINRLSDYDVDHIVPQSFLKDDSIDNKVLTRSDKARGKSDNVPSEEVVKKMKNYWRQLLNAKLITQRKFDNLTKAERGGLSELDKAGFIKRQLVETRQITKHVAQILDSRMNTKYDENDKLIREVKVITLKSKLVSDFRKDFQFYKVREINNYHHAHDAYLNAVVGTALIKKYPKLESEFVYGDYKVYDVRKMIAKSEQEIGKATAKYFFYSNIMNFFKTEITLANGEIRKRPLIETNGETGEIVWDKGRDFATVRKVLSMPQVNIVKKTEVQTGGFSKESILPKRNSDKLIARKKDWDPKKYGGFDSPTVAYSVLVVAKVEKGKSKKLKSVKELLGITIMERSSFEKNPIDFLEAKGYKEVKKDLIIKLPKYSLFELENGRKRMLASAGELQKGNELALPSKYVNFLYLASHYEKLKGSPEDNEQKQLFVEQHKHYLDEIIEQISEFSKRVILADANLDKVLSAYNKHRDKPIREQAENIIHLFTLTNLGAPAAFKYFDTTIDRKRYTSTKEVLDATLIHQSITGLYETRIDLSQLGGDGGGGSGGSGGTLNIEDEYRLHETSKGPDVPLGSTWLSDFPQAWAETGGMGLAVRQAPLIIPLKATSTPVSIKQYPMSQEARLGIKPHIQRLLDQGILVPCQSPWNTPLLPVKKPGTNDYRPVQDLREVNKRVEDIHPTVPNPYNLLSGLPPSHQWYTVLDLKDAFFCLRLHPTSQSLFAFEWRDPEMGISGQLTWTRLPQGFKNSPTLFNEALHRDLADFRIQHPDLILLQYVDDLLLAATSELDCQQGTRALLQTLGDLGYRASAKKAQICQKQVKYLGYLLKEGQRWLTEARKETVMGQPTPKTPRQLREFLGKAGFCRLFIPGFAEMAAPLYPLTKPGTLFEWGPDQQKAYQEIKQALLTAPALGLPDLTKPFELFVDEKQGYAKGVLTQKLGPWRRPVAYLSKKLDPVAAGWPPCLRMVAAIAVLTKDAGKLTMGQPLVILAPHAVEALVKQPPDRWLSNARMTHYQALLLDTDRVQFGPIVALNPATLLPLPEEGLQHDCLDILAEAHGTRPDLTDQPLPDADHTWYTDGSSFLQEGQRKAGAAVTTETEVVWAKALPAGTSAQRAELIALTQALKMAEGKKLNVYTDSRYAFATAHIHGEIYRRRGWLTSEGKEIKNKDEILALLKALFLPKRLSIIHCPGHQKGNRAEARGNRMADQAAREVATRETPETSTLLAGKRTADGSEFEKRTADGSEFESPKKKAKVE

SEQ ID NO: 2605 - protein, 2094 aa, synthetic construct
MPAAKRVKLDGGDKKYSIGLDIGTNSVGWAVITDEYKVPSKKFKVLGNTDRHSIKKNLIGALLFDSGETAEATRLKRTARRRYTRRKNRICYLQEIFSNEMAKVDDSFFHRLEESFLVEEDKKHERHPIFGNIVDEVAYHEKYPTIYHLRKKLVDSTDKADLRLIYLALAHMIKFRGHFLIEGDLNPDNSDVDKLFIQLVQTYNQLFEENPINASGVDAKAILSARLSKSRRLENLIAQLPGEKKNGLFGNLIALSLGLTPNFKSNFDLAEDAKLQLSKDTYDDDLDNLLAQIGDQYADLFLAAKNLSDAILLSDILRVNTEITKAPLSASMIKRYDEHHQDLTLLKALVRQQLPEKYKEIFFDQSKNGYAGYIDGGASQEEFYKFIKPILEKMDGTEELLVKLNREDLLRKQRTFDNGSIPHQIHLGELHAILRRQEDFYPFLKDNREKIEKILTFRIPYYVGPLARGNSRFAWMTRKSEETITPWNFEEVVDKGASAQSFIERMTNFDKNLPNEKVLPKHSLLYEYFTVYNELTKVKYVTEGMRKPAFLSGEQKKAIVDLLFKTNRKVTVKQLKEDYFKKIECFDSVEISGVEDRFNASLGTYHDLLKIIKDKDFLDNEENEDILEDIVLTLTLFEDREMIEERLKTYAHLFDDKVMKQLKRRRYTGWGRLSRKLINGIRDKQSGKTILDFLKSDGFANRNFMQLIHDDSLTFKEDIQKAQVSGQGDSLHEHIANLAGSPAIKKGILQTVKVVDELVKVMGRHKPENIVIEMARENQTTQKGQKNSRERMKRIEEGIKELGSQILKEHPVENTQLQNEKLYLYYLQNGRDMYVDQELDINRLSDYDVDHIVPQSFLKDDSIDNKVLTRSDKARGKSDNVPSEEVVKKMKNYWRQLLNAKLITQRKFDNLTKAERGGLSELDKAGFIKRQLVETRQITKHVAQILDSRMNTKYDENDKLIREVKVITLKSKLVSDFRKDFQFYKVREINNYHHAHDAYLNAVVGTALIKKYPKLESEFVYGDYKVYDVRKMIAKSEQEIGKATAKYFFYSNIMNFFKTEITLANGEIRKRPLIETNGETGEIVWDKGRDFATVRKVLSMPQVNIVKKTEVQTGGFSKESILPKRNSDKLIARKKDWDPKKYGGFDSPTVAYSVLVVAKVEKGKSKKLKSVKELLGITIMERSSFEKNPIDFLEAKGYKEVKKDLIIKLPKYSLFELENGRKRMLASAGELQKGNELALPSKYVNFLYLASHYEKLKGSPEDNEQKQLFVEQHKHYLDEIIEQISEFSKRVILADANLDKVLSAYNKHRDKPIREQAENIIHLFTLTNLGAPAAFKYFDTTIDRKRYTSTKEVLDATLIHQSITGLYETRIDLSQLGGDGGGGGGGSGSSGGTLNIEDEYRLHETSKGPDVPLGSTWLSDFPQAWAETGGMGLAVRQAPLIIPLKATSTPVSIKQYPMSQEARLGIKPHIQRLLDQGILVPCQSPWNTPLLPVKKPGTNDYRPVQDLREVNKRVEDIHPTVPNPYNLLSGLPPSHQWYTVLDLKDAFFCLRLHPTSQSLFAFEWRDPEMGISGQLTWTRLPQGFKNSPTLFNEALHRDLADFRIQHPDLILLQYVDDLLLAATSELDCQQGTRALLQTLGDLGYRASAKKAQICQKQVKYLGYLLKEGQRWLTEARKETVMGQPTPKTPRQLREFLGKAGFCRLFIPGFAEMAAPLYPLTKPGTLFEWGPDQQKAYQEIKQALLTAPALGLPDLTKPFELFVDEKQGYAKGVLTQKLGPWRRPVAYLSKKLDPVAAGWPPCLRMVAAIAVLTKDAGKLTMGQPLVILAPHAVEALVKQPPDRWLSNARMTHYQALLLDTDRVQFGPIVALNPATLLPLPEEGLQHDCLDILAEAHGTRPDLTDQPLPDADHTWYTDGSSFLQEGQRKAGAAVTTETEVVWAKALPAGTSAQRAELIALTQALKMAEGKKLNVYTDSRYAFATAHIHGEIYRRRGWLTSEGKEIKNKDEILALLKALFLPKRLSIIHCPGHQKGNRAEARGNRMADQAAREVATRETPETSTLLAGKRTADGSEFEKRTADGSEFESPKKKAKVE

SEQ ID NO: 2606 - protein, 2091 aa, synthetic construct
MPAAKRVKLDGGDKKYSIGLDIGTNSVGWAVITDEYKVPSKKFKVLGNTDRHSIKKNLIGALLFDSGETAEATRLKRTARRRYTRRKNRICYLQEIFSNEMAKVDDSFFHRLEESFLVEEDKKHERHPIFGNIVDEVAYHEKYPTIYHLRKKLVDSTDKADLRLIYLALAHMIKFRGHFLIEGDLNPDNSDVDKLFIQLVQTYNQLFEENPINASGVDAKAILSARLSKSRRLENLIAQLPGEKKNGLFGNLIALSLGLTPNFKSNFDLAEDAKLQLSKDTYDDDLDNLLAQIGDQYADLFLAAKNLSDAILLSDILRVNTEITKAPLSASMIKRYDEHHQDLTLLKALVRQQLPEKYKEIFFDQSKNGYAGYIDGGASQEEFYKFIKPILEKMDGTEELLVKLNREDLLRKQRTFDNGSIPHQIHLGELHAILRRQEDFYPFLKDNREKIEKILTFRIPYYVGPLARGNSRFAWMTRKSEETITPWNFEEVVDKGASAQSFIERMTNFDKNLPNEKVLPKHSLLYEYFTVYNELTKVKYVTEGMRKPAFLSGEQKKAIVDLLFKTNRKVTVKQLKEDYFKKIECFDSVEISGVEDRFNASLGTYHDLLKIIKDKDFLDNEENEDILEDIVLTLTLFEDREMIEERLKTYAHLFDDKVMKQLKRRRYTGWGRLSRKLINGIRDKQSGKTILDFLKSDGFANRNFMQLIHDDSLTFKEDIQKAQVSGQGDSLHEHIANLAGSPAIKKGILQTVKVVDELVKVMGRHKPENIVIEMARENQTTQKGQKNSRERMKRIEEGIKELGSQILKEHPVENTQLQNEKLYLYYLQNGRDMYVDQELDINRLSDYDVDHIVPQSFLKDDSIDNKVLTRSDKARGKSDNVPSEEVVKKMKNYWRQLLNAKLITQRKFDNLTKAERGGLSELDKAGFIKRQLVETRQITKHVAQILDSRMNTKYDENDKLIREVKVITLKSKLVSDFRKDFQFYKVREINNYHHAHDAYLNAVVGTALIKKYPKLESEFVYGDYKVYDVRKMIAKSEQEIGKATAKYFFYSNIMNFFKTEITLANGEIRKRPLIETNGETGEIVWDKGRDFATVRKVLSMPQVNIVKKTEVQTGGFSKESILPKRNSDKLIARKKDWDPKKYGGFDSPTVAYSVLVVAKVEKGKSKKLKSVKELLGITIMERSSFEKNPIDFLEAKGYKEVKKDLIIKLPKYSLFELENGRKRMLASAGELQKGNELALPSKYVNFLYLASHYEKLKGSPEDNEQKQLFVEQHKHYLDEIIEQISEFSKRVILADANLDKVLSAYNKHRDKPIREQAENIIHLFTLTNLGAPAAFKYFDTTIDRKRYTSTKEVLDATLIHQSITGLYETRIDLSQLGGDGGPAPGSSGGTLNIEDEYRLHETSKGPDVPLGSTWLSDFPQAWAETGGMGLAVRQAPLIIPLKATSTPVSIKQYPMSQEARLGIKPHIQRLLDQGILVPCQSPWNTPLLPVKKPGTNDYRPVQDLREVNKRVEDIHPTVPNPYNLLSGLPPSHQWYTVLDLKDAFFCLRLHPTSQSLFAFEWRDPEMGISGQLTWTRLPQGFKNSPTLFNEALHRDLADFRIQHPDLILLQYVDDLLLAATSELDCQQGTRALLQTLGDLGYRASAKKAQICQKQVKYLGYLLKEGQRWLTEARKETVMGQPTPKTPRQLREFLGKAGFCRLFIPGFAEMAAPLYPLTKPGTLFEWGPDQQKAYQEIKQALLTAPALGLPDLTKPFELFVDEKQGYAKGVLTQKLGPWRRPVAYLSKKLDPVAAGWPPCLRMVAAIAVLTKDAGKLTMGQPLVILAPHAVEALVKQPPDRWLSNARMTHYQALLLDTDRVQFGPIVALNPATLLPLPEEGLQHDCLDILAEAHGTRPDLTDQPLPDADHTWYTDGSSFLQEGQRKAGAAVTTETEVVWAKALPAGTSAQRAELIALTQALKMAEGKKLNVYTDSRYAFATAHIHGEIYRRRGWLTSEGKEIKNKDEILALLKALFLPKRLSIIHCPGHQKGNRAEARGNRMADQAAREVATRETPETSTLLAGKRTADGSEFEKRTADGSEFESPKKKAKVE

SEQ ID NO: 2607 - protein, 2093 aa, synthetic construct
MPAAKRVKLDGGDKKYSIGLDIGTNSVGWAVITDEYKVPSKKFKVLGNTDRHSIKKNLIGALLFDSGETAEATRLKRTARRRYTRRKNRICYLQEIFSNEMAKVDDSFFHRLEESFLVEEDKKHERHPIFGNIVDEVAYHEKYPTIYHLRKKLVDSTDKADLRLIYLALAHMIKFRGHFLIEGDLNPDNSDVDKLFIQLVQTYNQLFEENPINASGVDAKAILSARLSKSRRLENLIAQLPGEKKNGLFGNLIALSLGLTPNFKSNFDLAEDAKLQLSKDTYDDDLDNLLAQIGDQYADLFLAAKNLSDAILLSDILRVNTEITKAPLSASMIKRYDEHHQDLTLLKALVRQQLPEKYKEIFFDQSKNGYAGYIDGGASQEEFYKFIKPILEKMDGTEELLVKLNREDLLRKQRTFDNGSIPHQIHLGELHAILRRQEDFYPFLKDNREKIEKILTFRIPYYVGPLARGNSRFAWMTRKSEETITPWNFEEVVDKGASAQSFIERMTNFDKNLPNEKVLPKHSLLYEYFTVYNELTKVKYVTEGMRKPAFLSGEQKKAIVDLLFKTNRKVTVKQLKEDYFKKIECFDSVEISGVEDRFNASLGTYHDLLKIIKDKDFLDNEENEDILEDIVLTLTLFEDREMIEERLKTYAHLFDDKVMKQLKRRRYTGWGRLSRKLINGIRDKQSGKTILDFLKSDGFANRNFMQLIHDDSLTFKEDIQKAQVSGQGDSLHEHIANLAGSPAIKKGILQTVKVVDELVKVMGRHKPENIVIEMARENQTTQKGQKNSRERMKRIEEGIKELGSQILKEHPVENTQLQNEKLYLYYLQNGRDMYVDQELDINRLSDYDVDHIVPQSFLKDDSIDNKVLTRSDKARGKSDNVPSEEVVKKMKNYWRQLLNAKLITQRKFDNLTKAERGGLSELDKAGFIKRQLVETRQITKHVAQILDSRMNTKYDENDKLIREVKVITLKSKLVSDFRKDFQFYKVREINNYHHAHDAYLNAVVGTALIKKYPKLESEFVYGDYKVYDVRKMIAKSEQEIGKATAKYFFYSNIMNFFKTEITLANGEIRKRPLIETNGETGEIVWDKGRDFATVRKVLSMPQVNIVKKTEVQTGGFSKESILPKRNSDKLIARKKDWDPKKYGGFDSPTVAYSVLVVAKVEKGKSKKLKSVKELLGITIMERSSFEKNPIDFLEAKGYKEVKKDLIIKLPKYSLFELENGRKRMLASAGELQKGNELALPSKYVNFLYLASHYEKLKGSPEDNEQKQLFVEQHKHYLDEIIEQISEFSKRVILADANLDKVLSAYNKHRDKPIREQAENIIHLFTLTNLGAPAAFKYFDTTIDRKRYTSTKEVLDATLIHQSITGLYETRIDLSQLGGDGGGGGEAAAKGGTLNIEDEYRLHETSKGPDVPLGSTWLSDFPQAWAETGGMGLAVRQAPLIIPLKATSTPVSIKQYPMSQEARLGIKPHIQRLLDQGILVPCQSPWNTPLLPVKKPGTNDYRPVQDLREVNKRVEDIHPTVPNPYNLLSGLPPSHQWYTVLDLKDAFFCLRLHPTSQSLFAFEWRDPEMGISGQLTWTRLPQGFKNSPTLFNEALHRDLADFRIQHPDLILLQYVDDLLLAATSELDCQQGTRALLQTLGDLGYRASAKKAQICQKQVKYLGYLLKEGQRWLTEARKETVMGQPTPKTPRQLREFLGKAGFCRLFIPGFAEMAAPLYPLTKPGTLFEWGPDQQKAYQEIKQALLTAPALGLPDLTKPFELFVDEKQGYAKGVLTQKLGPWRRPVAYLSKKLDPVAAGWPPCLRMVAAIAVLTKDAGKLTMGQPLVILAPHAVEALVKQPPDRWLSNARMTHYQALLLDTDRVQFGPIVALNPATLLPLPEEGLQHDCLDILAEAHGTRPDLTDQPLPDADHTWYTDGSSFLQEGQRKAGAAVTTETEVVWAKALPAGTSAQRAELIALTQALKMAEGKKLNVYTDSRYAFATAHIHGEIYRRRGWLTSEGKEIKNKDEILALLKALFLPKRLSIIHCPGHQKGNRAEARGNRMADQAAREVATRETPETSTLLAGKRTADGSEFEKRTADGSEFESPKKKAKVE

SEQ ID NO: 2608 - protein, 2096 aa, synthetic construct
MPAAKRVKLDGGDKKYSIGLDIGTNSVGWAVITDEYKVPSKKFKVLGNTDRHSIKKNLIGALLFDSGETAEATRLKRTARRRYTRRKNRICYLQEIFSNEMAKVDDSFFHRLEESFLVEEDKKHERHPIFGNIVDEVAYHEKYPTIYHLRKKLVDSTDKADLRLIYLALAHMIKFRGHFLIEGDLNPDNSDVDKLFIQLVQTYNQLFEENPINASGVDAKAILSARLSKSRRLENLIAQLPGEKKNGLFGNLIALSLGLTPNFKSNFDLAEDAKLQLSKDTYDDDLDNLLAQIGDQYADLFLAAKNLSDAILLSDILRVNTEITKAPLSASMIKRYDEHHQDLTLLKALVRQQLPEKYKEIFFDQSKNGYAGYIDGGASQEEFYKFIKPILEKMDGTEELLVKLNREDLLRKQRTFDNGSIPHQIHLGELHAILRRQEDFYPFLKDNREKIEKILTFRIPYYVGPLARGNSRFAWMTRKSEETITPWNFEEVVDKGASAQSFIERMTNFDKNLPNEKVLPKHSLLYEYFTVYNELTKVKYVTEGMRKPAFLSGEQKKAIVDLLFKTNRKVTVKQLKEDYFKKIECFDSVEISGVEDRFNASLGTYHDLLKIIKDKDFLDNEENEDILEDIVLTLTLFEDREMIEERLKTYAHLFDDKVMKQLKRRRYTGWGRLSRKLINGIRDKQSGKTILDFLKSDGFANRNFMQLIHDDSLTFKEDIQKAQVSGQGDSLHEHIANLAGSPAIKKGILQTVKVVDELVKVMGRHKPENIVIEMARENQTTQKGQKNSRERMKRIEEGIKELGSQILKEHPVENTQLQNEKLYLYYLQNGRDMYVDQELDINRLSDYDVDHIVPQSFLKDDSIDNKVLTRSDKARGKSDNVPSEEVVKKMKNYWRQLLNAKLITQRKFDNLTKAERGGLSELDKAGFIKRQLVETRQITKHVAQILDSRMNTKYDENDKLIREVKVITLKSKLVSDFRKDFQFYKVREINNYHHAHDAYLNAVVGTALIKKYPKLESEFVYGDYKVYDVRKMIAKSEQEIGKATAKYFFYSNIMNFFKTEITLANGEIRKRPLIETNGETGEIVWDKGRDFATVRKVLSMPQVNIVKKTEVQTGGFSKESILPKRNSDKLIARKKDWDPKKYGGFDSPTVAYSVLVVAKVEKGKSKKLKSVKELLGITIMERSSFEKNPIDFLEAKGYKEVKKDLIIKLPKYSLFELENGRKRMLASAGELQKGNELALPSKYVNFLYLASHYEKLKGSPEDNEQKQLFVEQHKHYLDEIIEQISEFSKRVILADANLDKVLSAYNKHRDKPIREQAENIIHLFTLTNLGAPAAFKYFDTTIDRKRYTSTKEVLDATLIHQSITGLYETRIDLSQLGGDGGGGSEAAAKGSSGGTLNIEDEYRLHETSKGPDVPLGSTWLSDFPQAWAETGGMGLAVRQAPLIIPLKATSTPVSIKQYPMSQEARLGIKPHIQRLLDQGILVPCQSPWNTPLLPVKKPGTNDYRPVQDLREVNKRVEDIHPTVPNPYNLLSGLPPSHQWYTVLDLKDAFFCLRLHPTSQSLFAFEWRDPEMGISGQLTWTRLPQGFKNSPTLFNEALHRDLADFRIQHPDLILLQYVDDLLLAATSELDCQQGTRALLQTLGDLGYRASAKKAQICQKQVKYLGYLLKEGQRWLTEARKETVMGQPTPKTPRQLREFLGKAGFCRLFIPGFAEMAAPLYPLTKPGTLFEWGPDQQKAYQEIKQALLTAPALGLPDLTKPFELFVDEKQGYAKGVLTQKLGPWRRPVAYLSKKLDPVAAGWPPCLRMVAAIAVLTKDAGKLTMGQPLVILAPHAVEALVKQPPDRWLSNARMTHYQALLLDTDRVQFGPIVALNPATLLPLPEEGLQHDCLDILAEAHGTRPDLTDQPLPDADHTWYTDGSSFLQEGQRKAGAAVTTETEVVWAKALPAGTSAQRAELIALTQALKMAEGKKLNVYTDSRYAFATAHIHGEIYRRRGWLTSEGKEIKNKDEILALLKALFLPKRLSIIHCPGHQKGNRAEARGNRMADQAAREVATRETPETSTLLAGKRTADGSEFEKRTADGSEFESPKKKAKVE

SEQ ID NO: 2609 - protein, 2118 aa, synthetic construct
MPAAKRVKLDGGDKKYSIGLDIGTNSVGWAVITDEYKVPSKKFKVLGNTDRHSIKKNLIGALLFDSGETAEATRLKRTARRRYTRRKNRICYLQEIFSNEMAKVDDSFFHRLEESFLVEEDKKHERHPIFGNIVDEVAYHEKYPTIYHLRKKLVDSTDKADLRLIYLALAHMIKFRGHFLIEGDLNPDNSDVDKLFIQLVQTYNQLFEENPINASGVDAKAILSARLSKSRRLENLIAQLPGEKKNGLFGNLIALSLGLTPNFKSNFDLAEDAKLQLSKDTYDDDLDNLLAQIGDQYADLFLAAKNLSDAILLSDILRVNTEITKAPLSASMIKRYDEHHQDLTLLKALVRQQLPEKYKEIFFDQSKNGYAGYIDGGASQEEFYKFIKPILEKMDGTEELLVKLNREDLLRKQRTFDNGSIPHQIHLGELHAILRRQEDFYPFLKDNREKIEKILTFRIPYYVGPLARGNSRFAWMTRKSEETITPWNFEEVVDKGASAQSFIERMTNFDKNLPNEKVLPKHSLLYEYFTVYNELTKVKYVTEGMRKPAFLSGEQKKAIVDLLFKTNRKVTVKQLKEDYFKKIECFDSVEISGVEDRFNASLGTYHDLLKIIKDKDFLDNEENEDILEDIVLTLTLFEDREMIEERLKTYAHLFDDKVMKQLKRRRYTGWGRLSRKLINGIRDKQSGKTILDFLKSDGFANRNFMQLIHDDSLTFKEDIQKAQVSGQGDSLHEHIANLAGSPAIKKGILQTVKVVDELVKVMGRHKPENIVIEMARENQTTQKGQKNSRERMKRIEEGIKELGSQILKEHPVENTQLQNEKLYLYYLQNGRDMYVDQELDINRLSDYDVDHIVPQSFLKDDSIDNKVLTRSDKARGKSDNVPSEEVVKKMKNYWRQLLNAKLITQRKFDNLTKAERGGLSELDKAGFIKRQLVETRQITKHVAQILDSRMNTKYDENDKLIREVKVITLKSKLVSDFRKDFQFYKVREINNYHHAHDAYLNAVVGTALIKKYPKLESEFVYGDYKVYDVRKMIAKSEQEIGKATAKYFFYSNIMNFFKTEITLANGEIRKRPLIETNGETGEIVWDKGRDFATVRKVLSMPQVNIVKKTEVQTGGFSKESILPKRNSDKLIARKKDWDPKKYGGFDSPTVAYSVLVVAKVEKGKSKKLKSVKELLGITIMERSSFEKNPIDFLEAKGYKEVKKDLIIKLPKYSLFELENGRKRMLASAGELQKGNELALPSKYVNFLYLASHYEKLKGSPEDNEQKQLFVEQHKHYLDEIIEQISEFSKRVILADANLDKVLSAYNKHRDKPIREQAENIIHLFTLTNLGAPAAFKYFDTTIDRKRYTSTKEVLDATLIHQSITGLYETRIDLSQLGGDGGSGGSSGGSSGSETPGTSESATPESSGGSSGGSSGGTLNIEDEYRLHETSKGPDVPLGSTWLSDFPQAWAETGGMGLAVRQAPLIIPLKATSTPVSIKQYPMSQEARLGIKPHIQRLLDQGILVPCQSPWNTPLLPVKKPGTNDYRPVQDLREVNKRVEDIHPTVPNPYNLLSGLPPSHQWYTVLDLKDAFFCLRLHPTSQSLFAFEWRDPEMGISGQLTWTRLPQGFKNSPTLFNEALHRDLADFRIQHPDLILLQYVDDLLLAATSELDCQQGTRALLQTLGDLGYRASAKKAQICQKQVKYLGYLLKEGQRWLTEARKETVMGQPTPKTPRQLREFLGKAGFCRLFIPGFAEMAAPLYPLTKPGTLFEWGPDQQKAYQEIKQALLTAPALGLPDLTKPFELFVDEKQGYAKGVLTQKLGPWRRPVAYLSKKLDPVAAGWPPCLRMVAAIAVLTKDAGKLTMGQPLVILAPHAVEALVKQPPDRWLSNARMTHYQALLLDTDRVQFGPIVALNPATLLPLPEEGLQHDCLDILAEAHGTRPDLTDQPLPDADHTWYTDGSSFLQEGQRKAGAAVTTETEVVWAKALPAGTSAQRAELIALTQALKMAEGKKLNVYTDSRYAFATAHIHGEIYRRRGWLTSEGKEIKNKDEILALLKALFLPKRLSIIHCPGHQKGNRAEARGNRMADQAAREVATRETPETSTLLAGKRTADGSEFEKRTADGSEFESPKKKAKVE

SEQ ID NO: 2610 - protein, 2125 aa, synthetic construct
MPAAKRVKLDGGDKKYSIGLDIGTNSVGWAVITDEYKVPSKKFKVLGNTDRHSIKKNLIGALLFDSGETAEATRLKRTARRRYTRRKNRICYLQEIFSNEMAKVDDSFFHRLEESFLVEEDKKHERHPIFGNIVDEVAYHEKYPTIYHLRKKLVDSTDKADLRLIYLALAHMIKFRGHFLIEGDLNPDNSDVDKLFIQLVQTYNQLFEENPINASGVDAKAILSARLSKSRRLENLIAQLPGEKKNGLFGNLIALSLGLTPNFKSNFDLAEDAKLQLSKDTYDDDLDNLLAQIGDQYADLFLAAKNLSDAILLSDILRVNTEITKAPLSASMIKRYDEHHQDLTLLKALVRQQLPEKYKEIFFDQSKNGYAGYIDGGASQEEFYKFIKPILEKMDGTEELLVKLNREDLLRKQRTFDNGSIPHQIHLGELHAILRRQEDFYPFLKDNREKIEKILTFRIPYYVGPLARGNSRFAWMTRKSEETITPWNFEEVVDKGASAQSFIERMTNFDKNLPNEKVLPKHSLLYEYFTVYNELTKVKYVTEGMRKPAFLSGEQKKAIVDLLFKTNRKVTVKQLKEDYFKKIECFDSVEISGVEDRFNASLGTYHDLLKIIKDKDFLDNEENEDILEDIVLTLTLFEDREMIEERLKTYAHLFDDKVMKQLKRRRYTGWGRLSRKLINGIRDKQSGKTILDFLKSDGFANRNFMQLIHDDSLTFKEDIQKAQVSGQGDSLHEHIANLAGSPAIKKGILQTVKVVDELVKVMGRHKPENIVIEMARENQTTQKGQKNSRERMKRIEEGIKELGSQILKEHPVENTQLQNEKLYLYYLQNGRDMYVDQELDINRLSDYDVDHIVPQSFLKDDSIDNKVLTRSDKARGKSDNVPSEEVVKKMKNYWRQLLNAKLITQRKFDNLTKAERGGLSELDKAGFIKRQLVETRQITKHVAQILDSRMNTKYDENDKLIREVKVITLKSKLVSDFRKDFQFYKVREINNYHHAHDAYLNAVVGTALIKKYPKLESEFVYGDYKVYDVRKMIAKSEQEIGKATAKYFFYSNIMNFFKTEITLANGEIRKRPLIETNGETGEIVWDKGRDFATVRKVLSMPQVNIVKKTEVQTGGFSKESILPKRNSDKLIARKKDWDPKKYGGFDSPTVAYSVLVVAKVEKGKSKKLKSVKELLGITIMERSSFEKNPIDFLEAKGYKEVKKDLIIKLPKYSLFELENGRKRMLASAGELQKGNELALPSKYVNFLYLASHYEKLKGSPEDNEQKQLFVEQHKHYLDEIIEQISEFSKRVILADANLDKVLSAYNKHRDKPIREQAENIIHLFTLTNLGAPAAFKYFDTTIDRKRYTSTKEVLDATLIHQSITGLYETRIDLSQLGGDGGEAAAKEAAAKEAAAKEAAAKGGTLNIEDEYRLHETSKEPDVSLGSTWLSDFPQAWAETGGMGLAVRQAPLIIPLKATSTPVSIKQYPMSQEARLGIKPHIQRLLDQGILVPCQSPWNTPLLPVKKPGTNDYRPVQDLREVNKRVEDIHPTVPNPYNLLSGLPPSHQWYTVLDLKDAFFCLRLHPTSQPLFAFEWRDPEMGISGQLTWTRLPQGFKNSPTLFNEALHRDLADFRIQHPDLILLQYVDDLLLAATSELDCQQGTRALLQTLGNLGYRASAKKAQICQKQVKYLGYLLKEGQRWLTEARKETVMGQPTPKTPRQLREFLGKAGFCRLFIPGFAEMAAPLYPLTKPGTLFNWGPDQQKAYQEIKQALLTAPALGLPDLTKPFELFVDEKQGYAKGVLTQKLGPWRRPVAYLSKKLDPVAAGWPPCLRMVAAIAVLTKDAGKLTMGQPLVILAPHAVEALVKQPPDRWLSNARMTHYQALLLDTDRVQFGPVVALNPATLLPLPEEGLQHNCLDILAEAHGTRPDLTDQPLPDADHTWYTDGSSLLQEGQRKAGAAVTTETEVIWAKALPAGTSAQRAELIALTQALKMAEGKKLNVYTDSRYAFATAHIHGEIYRRRGWLTSEGKEIKNKDEILALLKALFLPKRLSIIHCPGHQKGHSAEARGNRMADQAARKAAITETPDTSTLLIENSSPSGGSKRTADGSEFEAGKRTADGSEFEKRTADGSEFESPKKKAKVE

SEQ ID NO: 2611 - protein, 2151 aa, synthetic construct
MPAAKRVKLDGGDKKYSIGLDIGTNSVGWAVITDEYKVPSKKFKVLGNTDRHSIKKNLIGALLFDSGETAEATRLKRTARRRYTRRKNRICYLQEIFSNEMAKVDDSFFHRLEESFLVEEDKKHERHPIFGNIVDEVAYHEKYPTIYHLRKKLVDSTDKADLRLIYLALAHMIKFRGHFLIEGDLNPDNSDVDKLFIQLVQTYNQLFEENPINASGVDAKAILSARLSKSRRLENLIAQLPGEKKNGLFGNLIALSLGLTPNFKSNFDLAEDAKLQLSKDTYDDDLDNLLAQIGDQYADLFLAAKNLSDAILLSDILRVNTEITKAPLSASMIKRYDEHHQDLTLLKALVRQQLPEKYKEIFFDQSKNGYAGYIDGGASQEEFYKFIKPILEKMDGTEELLVKLNREDLLRKQRTFDNGSIPHQIHLGELHAILRRQEDFYPFLKDNREKIEKILTFRIPYYVGPLARGNSRFAWMTRKSEETITPWNFEEVVDKGASAQSFIERMTNFDKNLPNEKVLPKHSLLYEYFTVYNELTKVKYVTEGMRKPAFLSGEQKKAIVDLLFKTNRKVTVKQLKEDYFKKIECFDSVEISGVEDRFNASLGTYHDLLKIIKDKDFLDNEENEDILEDIVLTLTLFEDREMIEERLKTYAHLFDDKVMKQLKRRRYTGWGRLSRKLINGIRDKQSGKTILDFLKSDGFANRNFMQLIHDDSLTFKEDIQKAQVSGQGDSLHEHIANLAGSPAIKKGILQTVKVVDELVKVMGRHKPENIVIEMARENQTTQKGQKNSRERMKRIEEGIKELGSQILKEHPVENTQLQNEKLYLYYLQNGRDMYVDQELDINRLSDYDVDHIVPQSFLKDDSIDNKVLTRSDKARGKSDNVPSEEVVKKMKNYWRQLLNAKLITQRKFDNLTKAERGGLSELDKAGFIKRQLVETRQITKHVAQILDSRMNTKYDENDKLIREVKVITLKSKLVSDFRKDFQFYKVREINNYHHAHDAYLNAVVGTALIKKYPKLESEFVYGDYKVYDVRKMIAKSEQEIGKATAKYFFYSNIMNFFKTEITLANGEIRKRPLIETNGETGEIVWDKGRDFATVRKVLSMPQVNIVKKTEVQTGGFSKESILPKRNSDKLIARKKDWDPKKYGGFDSPTVAYSVLVVAKVEKGKSKKLKSVKELLGITIMERSSFEKNPIDFLEAKGYKEVKKDLIIKLPKYSLFELENGRKRMLASAGELQKGNELALPSKYVNFLYLASHYEKLKGSPEDNEQKQLFVEQHKHYLDEIIEQISEFSKRVILADANLDKVLSAYNKHRDKPIREQAENIIHLFTLTNLGAPAAFKYFDTTIDRKRYTSTKEVLDATLIHQSITGLYETRIDLSQLGGDGGAEAAAKEAAAKEAAAKEAAAKALEAEAAAKEAAAKEAAAKEAAAKAGGTLNIEDEYRLHETSKEPDVSLGSTWLSDFPQAWAETGGMGLAVRQAPLIIPLKATSTPVSIKQYPMSQEARLGIKPHIQRLLDQGILVPCQSPWNTPLLPVKKPGTNDYRPVQDLREVNKRVEDIHPTVPNPYNLLSGLPPSHQWYTVLDLKDAFFCLRLHPTSQPLFAFEWRDPEMGISGQLTWTRLPQGFKNSPTLFNEALHRDLADFRIQHPDLILLQYVDDLLLAATSELDCQQGTRALLQTLGNLGYRASAKKAQICQKQVKYLGYLLKEGQRWLTEARKETVMGQPTPKTPRQLREFLGKAGFCRLFIPGFAEMAAPLYPLTKPGTLFNWGPDQQKAYQEIKQALLTAPALGLPDLTKPFELFVDEKQGYAKGVLTQKLGPWRRPVAYLSKKLDPVAAGWPPCLRMVAAIAVLTKDAGKLTMGQPLVILAPHAVEALVKQPPDRWLSNARMTHYQALLLDTDRVQFGPVVALNPATLLPLPEEGLQHNCLDILAEAHGTRPDLTDQPLPDADHTWYTDGSSLLQEGQRKAGAAVTTETEVIWAKALPAGTSAQRAELIALTQALKMAEGKKLNVYTDSRYAFATAHIHGEIYRRRGWLTSEGKEIKNKDEILALLKALFLPKRLSIIHCPGHQKGHSAEARGNRMADQAARKAAITETPDTSTLLIENSSPSGGSKRTADGSEFEAGKRTADGSEFEKRTADGSEFESPKKKAKVE

SEQ ID NO: 2612 - protein, 2123 aa, synthetic construct
MPAAKRVKLDGGDKKYSIGLDIGTNSVGWAVITDEYKVPSKKFKVLGNTDRHSIKKNLIGALLFDSGETAEATRLKRTARRRYTRRKNRICYLQEIFSNEMAKVDDSFFHRLEESFLVEEDKKHERHPIFGNIVDEVAYHEKYPTIYHLRKKLVDSTDKADLRLIYLALAHMIKFRGHFLIEGDLNPDNSDVDKLFIQLVQTYNQLFEENPINASGVDAKAILSARLSKSRRLENLIAQLPGEKKNGLFGNLIALSLGLTPNFKSNFDLAEDAKLQLSKDTYDDDLDNLLAQIGDQYADLFLAAKNLSDAILLSDILRVNTEITKAPLSASMIKRYDEHHQDLTLLKALVRQQLPEKYKEIFFDQSKNGYAGYIDGGASQEEFYKFIKPILEKMDGTEELLVKLNREDLLRKQRTFDNGSIPHQIHLGELHAILRRQEDFYPFLKDNREKIEKILTFRIPYYVGPLARGNSRFAWMTRKSEETITPWNFEEVVDKGASAQSFIERMTNFDKNLPNEKVLPKHSLLYEYFTVYNELTKVKYVTEGMRKPAFLSGEQKKAIVDLLFKTNRKVTVKQLKEDYFKKIECFDSVEISGVEDRFNASLGTYHDLLKIIKDKDFLDNEENEDILEDIVLTLTLFEDREMIEERLKTYAHLFDDKVMKQLKRRRYTGWGRLSRKLINGIRDKQSGKTILDFLKSDGFANRNFMQLIHDDSLTFKEDIQKAQVSGQGDSLHEHIANLAGSPAIKKGILQTVKVVDELVKVMGRHKPENIVIEMARENQTTQKGQKNSRERMKRIEEGIKELGSQILKEHPVENTQLQNEKLYLYYLQNGRDMYVDQELDINRLSDYDVDHIVPQSFLKDDSIDNKVLTRSDKARGKSDNVPSEEVVKKMKNYWRQLLNAKLITQRKFDNLTKAERGGLSELDKAGFIKRQLVETRQITKHVAQILDSRMNTKYDENDKLIREVKVITLKSKLVSDFRKDFQFYKVREINNYHHAHDAYLNAVVGTALIKKYPKLESEFVYGDYKVYDVRKMIAKSEQEIGKATAKYFFYSNIMNFFKTEITLANGEIRKRPLIETNGETGEIVWDKGRDFATVRKVLSMPQVNIVKKTEVQTGGFSKESILPKRNSDKLIARKKDWDPKKYGGFDSPTVAYSVLVVAKVEKGKSKKLKSVKELLGITIMERSSFEKNPIDFLEAKGYKEVKKDLIIKLPKYSLFELENGRKRMLASAGELQKGNELALPSKYVNFLYLASHYEKLKGSPEDNEQKQLFVEQHKHYLDEIIEQISEFSKRVILADANLDKVLSAYNKHRDKPIREQAENIIHLFTLTNLGAPAAFKYFDTTIDRKRYTSTKEVLDATLIHQSITGLYETRIDLSQLGGDGGGSSGSSGSSGSSGSSGSSGGTLNIEDEYRLHETSKEPDVSLGSTWLSDFPQAWAETGGMGLAVRQAPLIIPLKATSTPVSIKQYPMSQEARLGIKPHIQRLLDQGILVPCQSPWNTPLLPVKKPGTNDYRPVQDLREVNKRVEDIHPTVPNPYNLLSGLPPSHQWYTVLDLKDAFFCLRLHPTSQPLFAFEWRDPEMGISGQLTWTRLPQGFKNSPTLFNEALHRDLADFRIQHPDLILLQYVDDLLLAATSELDCQQGTRALLQTLGNLGYRASAKKAQICQKQVKYLGYLLKEGQRWLTEARKETVMGQPTPKTPRQLREFLGKAGFCRLFIPGFAEMAAPLYPLTKPGTLFNWGPDQQKAYQEIKQALLTAPALGLPDLTKPFELFVDEKQGYAKGVLTQKLGPWRRPVAYLSKKLDPVAAGWPPCLRMVAAIAVLTKDAGKLTMGQPLVILAPHAVEALVKQPPDRWLSNARMTHYQALLLDTDRVQFGPVVALNPATLLPLPEEGLQHNCLDILAEAHGTRPDLTDQPLPDADHTWYTDGSSLLQEGQRKAGAAVTTETEVIWAKALPAGTSAQRAELIALTQALKMAEGKKLNVYTDSRYAFATAHIHGEIYRRRGWLTSEGKEIKNKDEILALLKALFLPKRLSIIHCPGHQKGHSAEARGNRMADQAARKAAITETPDTSTLLIENSSPSGGSKRTADGSEFEAGKRTADGSEFEKRTADGSEFESPKKKAKVE

SEQ ID NO: 2613 - protein, 2130 aa, synthetic construct
MPAAKRVKLDGGDKKYSIGLDIGTNSVGWAVITDEYKVPSKKFKVLGNTDRHSIKKNLIGALLFDSGETAEATRLKRTARRRYTRRKNRICYLQEIFSNEMAKVDDSFFHRLEESFLVEEDKKHERHPIFGNIVDEVAYHEKYPTIYHLRKKLVDSTDKADLRLIYLALAHMIKFRGHFLIEGDLNPDNSDVDKLFIQLVQTYNQLFEENPINASGVDAKAILSARLSKSRRLENLIAQLPGEKKNGLFGNLIALSLGLTPNFKSNFDLAEDAKLQLSKDTYDDDLDNLLAQIGDQYADLFLAAKNLSDAILLSDILRVNTEITKAPLSASMIKRYDEHHQDLTLLKALVRQQLPEKYKEIFFDQSKNGYAGYIDGGASQEEFYKFIKPILEKMDGTEELLVKLNREDLLRKQRTFDNGSIPHQIHLGELHAILRRQEDFYPFLKDNREKIEKILTFRIPYYVGPLARGNSRFAWMTRKSEETITPWNFEEVVDKGASAQSFIERMTNFDKNLPNEKVLPKHSLLYEYFTVYNELTKVKYVTEGMRKPAFLSGEQKKAIVDLLFKTNRKVTVKQLKEDYFKKIECFDSVEISGVEDRFNASLGTYHDLLKIIKDKDFLDNEENEDILEDIVLTLTLFEDREMIEERLKTYAHLFDDKVMKQLKRRRYTGWGRLSRKLINGIRDKQSGKTILDFLKSDGFANRNFMQLIHDDSLTFKEDIQKAQVSGQGDSLHEHIANLAGSPAIKKGILQTVKVVDELVKVMGRHKPENIVIEMARENQTTQKGQKNSRERMKRIEEGIKELGSQILKEHPVENTQLQNEKLYLYYLQNGRDMYVDQELDINRLSDYDVDHIVPQSFLKDDSIDNKVLTRSDKARGKSDNVPSEEVVKKMKNYWRQLLNAKLITQRKFDNLTKAERGGLSELDKAGFIKRQLVETRQITKHVAQILDSRMNTKYDENDKLIREVKVITLKSKLVSDFRKDFQFYKVREINNYHHAHDAYLNAVVGTALIKKYPKLESEFVYGDYKVYDVRKMIAKSEQEIGKATAKYFFYSNIMNFFKTEITLANGEIRKRPLIETNGETGEIVWDKGRDFATVRKVLSMPQVNIVKKTEVQTGGFSKESILPKRNSDKLIARKKDWDPKKYGGFDSPTVAYSVLVVAKVEKGKSKKLKSVKELLGITIMERSSFEKNPIDFLEAKGYKEVKKDLIIKLPKYSLFELENGRKRMLASAGELQKGNELALPSKYVNFLYLASHYEKLKGSPEDNEQKQLFVEQHKHYLDEIIEQISEFSKRVILADANLDKVLSAYNKHRDKPIREQAENIIHLFTLTNLGAPAAFKYFDTTIDRKRYTSTKEVLDATLIHQSITGLYETRIDLSQLGGDGGGGGGSGGGGSGGGGSGGGGSGGGGSGGTLNIEDEYRLHETSKEPDVSLGSTWLSDFPQAWAETGGMGLAVRQAPLIIPLKATSTPVSIKQYPMSQEARLGIKPHIQRLLDQGILVPCQSPWNTPLLPVKKPGTNDYRPVQDLREVNKRVEDIHPTVPNPYNLLSGLPPSHQWYTVLDLKDAFFCLRLHPTSQPLFAFEWRDPEMGISGQLTWTRLPQGFKNSPTLFNEALHRDLADFRIQHPDLILLQYVDDLLLAATSELDCQQGTRALLQTLGNLGYRASAKKAQICQKQVKYLGYLLKEGQRWLTEARKETVMGQPTPKTPRQLREFLGKAGFCRLFIPGFAEMAAPLYPLTKPGTLFNWGPDQQKAYQEIKQALLTAPALGLPDLTKPFELFVDEKQGYAKGVLTQKLGPWRRPVAYLSKKLDPVAAGWPPCLRMVAAIAVLTKDAGKLTMGQPLVILAPHAVEALVKQPPDRWLSNARMTHYQALLLDTDRVQFGPVVALNPATLLPLPEEGLQHNCLDILAEAHGTRPDLTDQPLPDADHTWYTDGSSLLQEGQRKAGAAVTTETEVIWAKALPAGTSAQRAELIALTQALKMAEGKKLNVYTDSRYAFATAHIHGEIYRRRGWLTSEGKEIKNKDEILALLKALFLPKRLSIIHCPGHQKGHSAEARGNRMADQAARKAAITETPDTSTLLIENSSPSGGSKRTADGSEFEAGKRTADGSEFEKRTADGSEFESPKKKAKVE

SEQ ID NO: 2614 - protein, 2116 aa, synthetic construct
MPAAKRVKLDGGDKKYSIGLDIGTNSVGWAVITDEYKVPSKKFKVLGNTDRHSIKKNLIGALLFDSGETAEATRLKRTARRRYTRRKNRICYLQEIFSNEMAKVDDSFFHRLEESFLVEEDKKHERHPIFGNIVDEVAYHEKYPTIYHLRKKLVDSTDKADLRLIYLALAHMIKFRGHFLIEGDLNPDNSDVDKLFIQLVQTYNQLFEENPINASGVDAKAILSARLSKSRRLENLIAQLPGEKKNGLFGNLIALSLGLTPNFKSNFDLAEDAKLQLSKDTYDDDLDNLLAQIGDQYADLFLAAKNLSDAILLSDILRVNTEITKAPLSASMIKRYDEHHQDLTLLKALVRQQLPEKYKEIFFDQSKNGYAGYIDGGASQEEFYKFIKPILEKMDGTEELLVKLNREDLLRKQRTFDNGSIPHQIHLGELHAILRRQEDFYPFLKDNREKIEKILTFRIPYYVGPLARGNSRFAWMTRKSEETITPWNFEEVVDKGASAQSFIERMTNFDKNLPNEKVLPKHSLLYEYFTVYNELTKVKYVTEGMRKPAFLSGEQKKAIVDLLFKTNRKVTVKQLKEDYFKKIECFDSVEISGVEDRFNASLGTYHDLLKIIKDKDFLDNEENEDILEDIVLTLTLFEDREMIEERLKTYAHLFDDKVMKQLKRRRYTGWGRLSRKLINGIRDKQSGKTILDFLKSDGFANRNFMQLIHDDSLTFKEDIQKAQVSGQGDSLHEHIANLAGSPAIKKGILQTVKVVDELVKVMGRHKPENIVIEMARENQTTQKGQKNSRERMKRIEEGIKELGSQILKEHPVENTQLQNEKLYLYYLQNGRDMYVDQELDINRLSDYDVDHIVPQSFLKDDSIDNKVLTRSDKARGKSDNVPSEEVVKKMKNYWRQLLNAKLITQRKFDNLTKAERGGLSELDKAGFIKRQLVETRQITKHVAQILDSRMNTKYDENDKLIREVKVITLKSKLVSDFRKDFQFYKVREINNYHHAHDAYLNAVVGTALIKKYPKLESEFVYGDYKVYDVRKMIAKSEQEIGKATAKYFFYSNIMNFFKTEITLANGEIRKRPLIETNGETGEIVWDKGRDFATVRKVLSMPQVNIVKKTEVQTGGFSKESILPKRNSDKLIARKKDWDPKKYGGFDSPTVAYSVLVVAKVEKGKSKKLKSVKELLGITIMERSSFEKNPIDFLEAKGYKEVKKDLIIKLPKYSLFELENGRKRMLASAGELQKGNELALPSKYVNFLYLASHYEKLKGSPEDNEQKQLFVEQHKHYLDEIIEQISEFSKRVILADANLDKVLSAYNKHRDKPIREQAENIIHLFTLTNLGAPAAFKYFDTTIDRKRYTSTKEVLDATLIHQSITGLYETRIDLSQLGGDGGEAAAKGGGPAPGGTLNIEDEYRLHETSKEPDVSLGSTWLSDFPQAWAETGGMGLAVRQAPLIIPLKATSTPVSIKQYPMSQEARLGIKPHIQRLLDQGILVPCQSPWNTPLLPVKKPGTNDYRPVQDLREVNKRVEDIHPTVPNPYNLLSGLPPSHQWYTVLDLKDAFFCLRLHPTSQPLFAFEWRDPEMGISGQLTWTRLPQGFKNSPTLFNEALHRDLADFRIQHPDLILLQYVDDLLLAATSELDCQQGTRALLQTLGNLGYRASAKKAQICQKQVKYLGYLLKEGQRWLTEARKETVMGQPTPKTPRQLREFLGKAGFCRLFIPGFAEMAAPLYPLTKPGTLFNWGPDQQKAYQEIKQALLTAPALGLPDLTKPFELFVDEKQGYAKGVLTQKLGPWRRPVAYLSKKLDPVAAGWPPCLRMVAAIAVLTKDAGKLTMGQPLVILAPHAVEALVKQPPDRWLSNARMTHYQALLLDTDRVQFGPVVALNPATLLPLPEEGLQHNCLDILAEAHGTRPDLTDQPLPDADHTWYTDGSSLLQEGQRKAGAAVTTETEVIWAKALPAGTSAQRAELIALTQALKMAEGKKLNVYTDSRYAFATAHIHGEIYRRRGWLTSEGKEIKNKDEILALLKALFLPKRLSIIHCPGHQKGHSAEARGNRMADQAARKAAITETPDTSTLLIENSSPSGGSKRTADGSEFEAGKRTADGSEFEKRTADGSEFESPKKKAKVE

SEQ ID NO: 2615 - protein, 2125 aa, synthetic construct
MPAAKRVKLDGGDKKYSIGLDIGTNSVGWAVITDEYKVPSKKFKVLGNTDRHSIKKNLIGALLFDSGETAEATRLKRTARRRYTRRKNRICYLQEIFSNEMAKVDDSFFHRLEESFLVEEDKKHERHPIFGNIVDEVAYHEKYPTIYHLRKKLVDSTDKADLRLIYLALAHMIKFRGHFLIEGDLNPDNSDVDKLFIQLVQTYNQLFEENPINASGVDAKAILSARLSKSRRLENLIAQLPGEKKNGLFGNLIALSLGLTPNFKSNFDLAEDAKLQLSKDTYDDDLDNLLAQIGDQYADLFLAAKNLSDAILLSDILRVNTEITKAPLSASMIKRYDEHHQDLTLLKALVRQQLPEKYKEIFFDQSKNGYAGYIDGGASQEEFYKFIKPILEKMDGTEELLVKLNREDLLRKQRTFDNGSIPHQIHLGELHAILRRQEDFYPFLKDNREKIEKILTFRIPYYVGPLARGNSRFAWMTRKSEETITPWNFEEVVDKGASAQSFIERMTNFDKNLPNEKVLPKHSLLYEYFTVYNELTKVKYVTEGMRKPAFLSGEQKKAIVDLLFKTNRKVTVKQLKEDYFKKIECFDSVEISGVEDRFNASLGTYHDLLKIIKDKDFLDNEENEDILEDIVLTLTLFEDREMIEERLKTYAHLFDDKVMKQLKRRRYTGWGRLSRKLINGIRDKQSGKTILDFLKSDGFANRNFMQLIHDDSLTFKEDIQKAQVSGQGDSLHEHIANLAGSPAIKKGILQTVKVVDELVKVMGRHKPENIVIEMARENQTTQKGQKNSRERMKRIEEGIKELGSQILKEHPVENTQLQNEKLYLYYLQNGRDMYVDQELDINRLSDYDVDHIVPQSFLKDDSIDNKVLTRSDKARGKSDNVPSEEVVKKMKNYWRQLLNAKLITQRKFDNLTKAERGGLSELDKAGFIKRQLVETRQITKHVAQILDSRMNTKYDENDKLIREVKVITLKSKLVSDFRKDFQFYKVREINNYHHAHDAYLNAVVGTALIKKYPKLESEFVYGDYKVYDVRKMIAKSEQEIGKATAKYFFYSNIMNFFKTEITLANGEIRKRPLIETNGETGEIVWDKGRDFATVRKVLSMPQVNIVKKTEVQTGGFSKESILPKRNSDKLIARKKDWDPKKYGGFDSPTVAYSVLVVAKVEKGKSKKLKSVKELLGITIMERSSFEKNPIDFLEAKGYKEVKKDLIIKLPKYSLFELENGRKRMLASAGELQKGNELALPSKYVNFLYLASHYEKLKGSPEDNEQKQLFVEQHKHYLDEIIEQISEFSKRVILADANLDKVLSAYNKHRDKPIREQAENIIHLFTLTNLGAPAAFKYFDTTIDRKRYTSTKEVLDATLIHQSITGLYETRIDLSQLGGDGGGGGGSGGGGSGGGGSGGGGSGGTLNIEDEYRLHETSKEPDVSLGSTWLSDFPQAWAETGGMGLAVRQAPLIIPLKATSTPVSIKQYPMSQEARLGIKPHIQRLLDQGILVPCQSPWNTPLLPVKKPGTNDYRPVQDLREVNKRVEDIHPTVPNPYNLLSGLPPSHQWYTVLDLKDAFFCLRLHPTSQPLFAFEWRDPEMGISGQLTWTRLPQGFKNSPTLFNEALHRDLADFRIQHPDLILLQYVDDLLLAATSELDCQQGTRALLQTLGNLGYRASAKKAQICQKQVKYLGYLLKEGQRWLTEARKETVMGQPTPKTPRQLREFLGKAGFCRLFIPGFAEMAAPLYPLTKPGTLFNWGPDQQKAYQEIKQALLTAPALGLPDLTKPFELFVDEKQGYAKGVLTQKLGPWRRPVAYLSKKLDPVAAGWPPCLRMVAAIAVLTKDAGKLTMGQPLVILAPHAVEALVKQPPDRWLSNARMTHYQALLLDTDRVQFGPVVALNPATLLPLPEEGLQHNCLDILAEAHGTRPDLTDQPLPDADHTWYTDGSSLLQEGQRKAGAAVTTETEVIWAKALPAGTSAQRAELIALTQALKMAEGKKLNVYTDSRYAFATAHIHGEIYRRRGWLTSEGKEIKNKDEILALLKALFLPKRLSIIHCPGHQKGHSAEARGNRMADQAARKAAITETPDTSTLLIENSSPSGGSKRTADGSEFEAGKRTADGSEFEKRTADGSEFESPKKKAKVE

SEQ ID NO: 2616 - protein, 2114 aa, synthetic construct
MPAAKRVKLDGGDKKYSIGLDIGTNSVGWAVITDEYKVPSKKFKVLGNTDRHSIKKNLIGALLFDSGETAEATRLKRTARRRYTRRKNRICYLQEIFSNEMAKVDDSFFHRLEESFLVEEDKKHERHPIFGNIVDEVAYHEKYPTIYHLRKKLVDSTDKADLRLIYLALAHMIKFRGHFLIEGDLNPDNSDVDKLFIQLVQTYNQLFEENPINASGVDAKAILSARLSKSRRLENLIAQLPGEKKNGLFGNLIALSLGLTPNFKSNFDLAEDAKLQLSKDTYDDDLDNLLAQIGDQYADLFLAAKNLSDAILLSDILRVNTEITKAPLSASMIKRYDEHHQDLTLLKALVRQQLPEKYKEIFFDQSKNGYAGYIDGGASQEEFYKFIKPILEKMDGTEELLVKLNREDLLRKQRTFDNGSIPHQIHLGELHAILRRQEDFYPFLKDNREKIEKILTFRIPYYVGPLARGNSRFAWMTRKSEETITPWNFEEVVDKGASAQSFIERMTNFDKNLPNEKVLPKHSLLYEYFTVYNELTKVKYVTEGMRKPAFLSGEQKKAIVDLLFKTNRKVTVKQLKEDYFKKIECFDSVEISGVEDRFNASLGTYHDLLKIIKDKDFLDNEENEDILEDIVLTLTLFEDREMIEERLKTYAHLFDDKVMKQLKRRRYTGWGRLSRKLINGIRDKQSGKTILDFLKSDGFANRNFMQLIHDDSLTFKEDIQKAQVSGQGDSLHEHIANLAGSPAIKKGILQTVKVVDELVKVMGRHKPENIVIEMARENQTTQKGQKNSRERMKRIEEGIKELGSQILKEHPVENTQLQNEKLYLYYLQNGRDMYVDQELDINRLSDYDVDHIVPQSFLKDDSIDNKVLTRSDKARGKSDNVPSEEVVKKMKNYWRQLLNAKLITQRKFDNLTKAERGGLSELDKAGFIKRQLVETRQITKHVAQILDSRMNTKYDENDKLIREVKVITLKSKLVSDFRKDFQFYKVREINNYHHAHDAYLNAVVGTALIKKYPKLESEFVYGDYKVYDVRKMIAKSEQEIGKATAKYFFYSNIMNFFKTEITLANGEIRKRPLIETNGETGEIVWDKGRDFATVRKVLSMPQVNIVKKTEVQTGGFSKESILPKRNSDKLIARKKDWDPKKYGGFDSPTVAYSVLVVAKVEKGKSKKLKSVKELLGITIMERSSFEKNPIDFLEAKGYKEVKKDLIIKLPKYSLFELENGRKRMLASAGELQKGNELALPSKYVNFLYLASHYEKLKGSPEDNEQKQLFVEQHKHYLDEIIEQISEFSKRVILADANLDKVLSAYNKHRDKPIREQAENIIHLFTLTNLGAPAAFKYFDTTIDRKRYTSTKEVLDATLIHQSITGLYETRIDLSQLGGDGGPAPGSSGGGGGTLNIEDEYRLHETSKEPDVSLGSTWLSDFPQAWAETGGMGLAVRQAPLIIPLKATSTPVSIKQYPMSQEARLGIKPHIQRLLDQGILVPCQSPWNTPLLPVKKPGTNDYRPVQDLREVNKRVEDIHPTVPNPYNLLSGLPPSHQWYTVLDLKDAFFCLRLHPTSQPLFAFEWRDPEMGISGQLTWTRLPQGFKNSPTLFNEALHRDLADFRIQHPDLILLQYVDDLLLAATSELDCQQGTRALLQTLGNLGYRASAKKAQICQKQVKYLGYLLKEGQRWLTEARKETVMGQPTPKTPRQLREFLGKAGFCRLFIPGFAEMAAPLYPLTKPGTLFNWGPDQQKAYQEIKQALLTAPALGLPDLTKPFELFVDEKQGYAKGVLTQKLGPWRRPVAYLSKKLDPVAAGWPPCLRMVAAIAVLTKDAGKLTMGQPLVILAPHAVEALVKQPPDRWLSNARMTHYQALLLDTDRVQFGPVVALNPATLLPLPEEGLQHNCLDILAEAHGTRPDLTDQPLPDADHTWYTDGSSLLQEGQRKAGAAVTTETEVIWAKALPAGTSAQRAELIALTQALKMAEGKKLNVYTDSRYAFATAHIHGEIYRRRGWLTSEGKEIKNKDEILALLKALFLPKRLSIIHCPGHQKGHSAEARGNRMADQAARKAAITETPDTSTLLIENSSPSGGSKRTADGSEFEAGKRTADGSEFEKRTADGSEFESPKKKAKVE

SEQ ID NO: 2617 - protein, 2114 aa, synthetic construct
MPAAKRVKLDGGDKKYSIGLDIGTNSVGWAVITDEYKVPSKKFKVLGNTDRHSIKKNLIGALLFDSGETAEATRLKRTARRRYTRRKNRICYLQEIFSNEMAKVDDSFFHRLEESFLVEEDKKHERHPIFGNIVDEVAYHEKYPTIYHLRKKLVDSTDKADLRLIYLALAHMIKFRGHFLIEGDLNPDNSDVDKLFIQLVQTYNQLFEENPINASGVDAKAILSARLSKSRRLENLIAQLPGEKKNGLFGNLIALSLGLTPNFKSNFDLAEDAKLQLSKDTYDDDLDNLLAQIGDQYADLFLAAKNLSDAILLSDILRVNTEITKAPLSASMIKRYDEHHQDLTLLKALVRQQLPEKYKEIFFDQSKNGYAGYIDGGASQEEFYKFIKPILEKMDGTEELLVKLNREDLLRKQRTFDNGSIPHQIHLGELHAILRRQEDFYPFLKDNREKIEKILTFRIPYYVGPLARGNSRFAWMTRKSEETITPWNFEEVVDKGASAQSFIERMTNFDKNLPNEKVLPKHSLLYEYFTVYNELTKVKYVTEGMRKPAFLSGEQKKAIVDLLFKTNRKVTVKQLKEDYFKKIECFDSVEISGVEDRFNASLGTYHDLLKIIKDKDFLDNEENEDILEDIVLTLTLFEDREMIEERLKTYAHLFDDKVMKQLKRRRYTGWGRLSRKLINGIRDKQSGKTILDFLKSDGFANRNFMQLIHDDSLTFKEDIQKAQVSGQGDSLHEHIANLAGSPAIKKGILQTVKVVDELVKVMGRHKPENIVIEMARENQTTQKGQKNSRERMKRIEEGIKELGSQILKEHPVENTQLQNEKLYLYYLQNGRDMYVDQELDINRLSDYDVDHIVPQSFLKDDSIDNKVLTRSDKARGKSDNVPSEEVVKKMKNYWRQLLNAKLITQRKFDNLTKAERGGLSELDKAGFIKRQLVETRQITKHVAQILDSRMNTKYDENDKLIREVKVITLKSKLVSDFRKDFQFYKVREINNYHHAHDAYLNAVVGTALIKKYPKLESEFVYGDYKVYDVRKMIAKSEQEIGKATAKYFFYSNIMNFFKTEITLANGEIRKRPLIETNGETGEIVWDKGRDFATVRKVLSMPQVNIVKKTEVQTGGFSKESILPKRNSDKLIARKKDWDPKKYGGFDSPTVAYSVLVVAKVEKGKSKKLKSVKELLGITIMERSSFEKNPIDFLEAKGYKEVKKDLIIKLPKYSLFELENGRKRMLASAGELQKGNELALPSKYVNFLYLASHYEKLKGSPEDNEQKQLFVEQHKHYLDEIIEQISEFSKRVILADANLDKVLSAYNKHRDKPIREQAENIIHLFTLTNLGAPAAFKYFDTTIDRKRYTSTKEVLDATLIHQSITGLYETRIDLSQLGGDGGGSSGGGGGSGGTLNIEDEYRLHETSKEPDVSLGSTWLSDFPQAWAETGGMGLAVRQAPLIIPLKATSTPVSIKQYPMSQEARLGIKPHIQRLLDQGILVPCQSPWNTPLLPVKKPGTNDYRPVQDLREVNKRVEDIHPTVPNPYNLLSGLPPSHQWYTVLDLKDAFFCLRLHPTSQPLFAFEWRDPEMGISGQLTWTRLPQGFKNSPTLFNEALHRDLADFRIQHPDLILLQYVDDLLLAATSELDCQQGTRALLQTLGNLGYRASAKKAQICQKQVKYLGYLLKEGQRWLTEARKETVMGQPTPKTPRQLREFLGKAGFCRLFIPGFAEMAAPLYPLTKPGTLFNWGPDQQKAYQEIKQALLTAPALGLPDLTKPFELFVDEKQGYAKGVLTQKLGPWRRPVAYLSKKLDPVAAGWPPCLRMVAAIAVLTKDAGKLTMGQPLVILAPHAVEALVKQPPDRWLSNARMTHYQALLLDTDRVQFGPVVALNPATLLPLPEEGLQHNCLDILAEAHGTRPDLTDQPLPDADHTWYTDGSSLLQEGQRKAGAAVTTETEVIWAKALPAGTSAQRAELIALTQALKMAEGKKLNVYTDSRYAFATAHIHGEIYRRRGWLTSEGKEIKNKDEILALLKALFLPKRLSIIHCPGHQKGHSAEARGNRMADQAARKAAITETPDTSTLLIENSSPSGGSKRTADGSEFEAGKRTADGSEFEKRTADGSEFESPKKKAKVE

SEQ ID NO: 2618 - protein, 2114 aa, synthetic construct
MPAAKRVKLDGGDKKYSIGLDIGTNSVGWAVITDEYKVPSKKFKVLGNTDRHSIKKNLIGALLFDSGETAEATRLKRTARRRYTRRKNRICYLQEIFSNEMAKVDDSFFHRLEESFLVEEDKKHERHPIFGNIVDEVAYHEKYPTIYHLRKKLVDSTDKADLRLIYLALAHMIKFRGHFLIEGDLNPDNSDVDKLFIQLVQTYNQLFEENPINASGVDAKAILSARLSKSRRLENLIAQLPGEKKNGLFGNLIALSLGLTPNFKSNFDLAEDAKLQLSKDTYDDDLDNLLAQIGDQYADLFLAAKNLSDAILLSDILRVNTEITKAPLSASMIKRYDEHHQDLTLLKALVRQQLPEKYKEIFFDQSKNGYAGYIDGGASQEEFYKFIKPILEKMDGTEELLVKLNREDLLRKQRTFDNGSIPHQIHLGELHAILRRQEDFYPFLKDNREKIEKILTFRIPYYVGPLARGNSRFAWMTRKSEETITPWNFEEVVDKGASAQSFIERMTNFDKNLPNEKVLPKHSLLYEYFTVYNELTKVKYVTEGMRKPAFLSGEQKKAIVDLLFKTNRKVTVKQLKEDYFKKIECFDSVEISGVEDRFNASLGTYHDLLKIIKDKDFLDNEENEDILEDIVLTLTLFEDREMIEERLKTYAHLFDDKVMKQLKRRRYTGWGRLSRKLINGIRDKQSGKTILDFLKSDGFANRNFMQLIHDDSLTFKEDIQKAQVSGQGDSLHEHIANLAGSPAIKKGILQTVKVVDELVKVMGRHKPENIVIEMARENQTTQKGQKNSRERMKRIEEGIKELGSQILKEHPVENTQLQNEKLYLYYLQNGRDMYVDQELDINRLSDYDVDHIVPQSFLKDDSIDNKVLTRSDKARGKSDNVPSEEVVKKMKNYWRQLLNAKLITQRKFDNLTKAERGGLSELDKAGFIKRQLVETRQITKHVAQILDSRMNTKYDENDKLIREVKVITLKSKLVSDFRKDFQFYKVREINNYHHAHDAYLNAVVGTALIKKYPKLESEFVYGDYKVYDVRKMIAKSEQEIGKATAKYFFYSNIMNFFKTEITLANGEIRKRPLIETNGETGEIVWDKGRDFATVRKVLSMPQVNIVKKTEVQTGGFSKESILPKRNSDKLIARKKDWDPKKYGGFDSPTVAYSVLVVAKVEKGKSKKLKSVKELLGITIMERSSFEKNPIDFLEAKGYKEVKKDLIIKLPKYSLFELENGRKRMLASAGELQKGNELALPSKYVNFLYLASHYEKLKGSPEDNEQKQLFVEQHKHYLDEIIEQISEFSKRVILADANLDKVLSAYNKHRDKPIREQAENIIHLFTLTNLGAPAAFKYFDTTIDRKRYTSTKEVLDATLIHQSITGLYETRIDLSQLGGDGGGGGPAPGGSGGTLNIEDEYRLHETSKEPDVSLGSTWLSDFPQAWAETGGMGLAVRQAPLIIPLKATSTPVSIKQYPMSQEARLGIKPHIQRLLDQGILVPCQSPWNTPLLPVKKPGTNDYRPVQDLREVNKRVEDIHPTVPNPYNLLSGLPPSHQWYTVLDLKDAFFCLRLHPTSQPLFAFEWRDPEMGISGQLTWTRLPQGFKNSPTLFNEALHRDLADFRIQHPDLILLQYVDDLLLAATSELDCQQGTRALLQTLGNLGYRASAKKAQICQKQVKYLGYLLKEGQRWLTEARKETVMGQPTPKTPRQLREFLGKAGFCRLFIPGFAEMAAPLYPLTKPGTLFNWGPDQQKAYQEIKQALLTAPALGLPDLTKPFELFVDEKQGYAKGVLTQKLGPWRRPVAYLSKKLDPVAAGWPPCLRMVAAIAVLTKDAGKLTMGQPLVILAPHAVEALVKQPPDRWLSNARMTHYQALLLDTDRVQFGPVVALNPATLLPLPEEGLQHNCLDILAEAHGTRPDLTDQPLPDADHTWYTDGSSLLQEGQRKAGAAVTTETEVIWAKALPAGTSAQRAELIALTQALKMAEGKKLNVYTDSRYAFATAHIHGEIYRRRGWLTSEGKEIKNKDEILALLKALFLPKRLSIIHCPGHQKGHSAEARGNRMADQAARKAAITETPDTSTLLIENSSPSGGSKRTADGSEFEAGKRTADGSEFEKRTADGSEFESPKKKAKVE

SEQ ID NO: 2619 - protein, 2116 aa, synthetic construct
MPAAKRVKLDGGDKKYSIGLDIGTNSVGWAVITDEYKVPSKKFKVLGNTDRHSIKKNLIGALLFDSGETAEATRLKRTARRRYTRRKNRICYLQEIFSNEMAKVDDSFFHRLEESFLVEEDKKHERHPIFGNIVDEVAYHEKYPTIYHLRKKLVDSTDKADLRLIYLALAHMIKFRGHFLIEGDLNPDNSDVDKLFIQLVQTYNQLFEENPINASGVDAKAILSARLSKSRRLENLIAQLPGEKKNGLFGNLIALSLGLTPNFKSNFDLAEDAKLQLSKDTYDDDLDNLLAQIGDQYADLFLAAKNLSDAILLSDILRVNTEITKAPLSASMIKRYDEHHQDLTLLKALVRQQLPEKYKEIFFDQSKNGYAGYIDGGASQEEFYKFIKPILEKMDGTEELLVKLNREDLLRKQRTFDNGSIPHQIHLGELHAILRRQEDFYPFLKDNREKIEKILTFRIPYYVGPLARGNSRFAWMTRKSEETITPWNFEEVVDKGASAQSFIERMTNFDKNLPNEKVLPKHSLLYEYFTVYNELTKVKYVTEGMRKPAFLSGEQKKAIVDLLFKTNRKVTVKQLKEDYFKKIECFDSVEISGVEDRFNASLGTYHDLLKIIKDKDFLDNEENEDILEDIVLTLTLFEDREMIEERLKTYAHLFDDKVMKQLKRRRYTGWGRLSRKLINGIRDKQSGKTILDFLKSDGFANRNFMQLIHDDSLTFKEDIQKAQVSGQGDSLHEHIANLAGSPAIKKGILQTVKVVDELVKVMGRHKPENIVIEMARENQTTQKGQKNSRERMKRIEEGIKELGSQILKEHPVENTQLQNEKLYLYYLQNGRDMYVDQELDINRLSDYDVDHIVPQSFLKDDSIDNKVLTRSDKARGKSDNVPSEEVVKKMKNYWRQLLNAKLITQRKFDNLTKAERGGLSELDKAGFIKRQLVETRQITKHVAQILDSRMNTKYDENDKLIREVKVITLKSKLVSDFRKDFQFYKVREINNYHHAHDAYLNAVVGTALIKKYPKLESEFVYGDYKVYDVRKMIAKSEQEIGKATAKYFFYSNIMNFFKTEITLANGEIRKRPLIETNGETGEIVWDKGRDFATVRKVLSMPQVNIVKKTEVQTGGFSKESILPKRNSDKLIARKKDWDPKKYGGFDSPTVAYSVLVVAKVEKGKSKKLKSVKELLGITIMERSSFEKNPIDFLEAKGYKEVKKDLIIKLPKYSLFELENGRKRMLASAGELQKGNELALPSKYVNFLYLASHYEKLKGSPEDNEQKQLFVEQHKHYLDEIIEQISEFSKRVILADANLDKVLSAYNKHRDKPIREQAENIIHLFTLTNLGAPAAFKYFDTTIDRKRYTSTKEVLDATLIHQSITGLYETRIDLSQLGGDGGPAPAPAPAPAPGGTLNIEDEYRLHETSKEPDVSLGSTWLSDFPQAWAETGGMGLAVRQAPLIIPLKATSTPVSIKQYPMSQEARLGIKPHIQRLLDQGILVPCQSPWNTPLLPVKKPGTNDYRPVQDLREVNKRVEDIHPTVPNPYNLLSGLPPSHQWYTVLDLKDAFFCLRLHPTSQPLFAFEWRDPEMGISGQLTWTRLPQGFKNSPTLFNEALHRDLADFRIQHPDLILLQYVDDLLLAATSELDCQQGTRALLQTLGNLGYRASAKKAQICQKQVKYLGYLLKEGQRWLTEARKETVMGQPTPKTPRQLREFLGKAGFCRLFIPGFAEMAAPLYPLTKPGTLFNWGPDQQKAYQEIKQALLTAPALGLPDLTKPFELFVDEKQGYAKGVLTQKLGPWRRPVAYLSKKLDPVAAGWPPCLRMVAAIAVLTKDAGKLTMGQPLVILAPHAVEALVKQPPDRWLSNARMTHYQALLLDTDRVQFGPVVALNPATLLPLPEEGLQHNCLDILAEAHGTRPDLTDQPLPDADHTWYTDGSSLLQEGQRKAGAAVTTETEVIWAKALPAGTSAQRAELIALTQALKMAEGKKLNVYTDSRYAFATAHIHGEIYRRRGWLTSEGKEIKNKDEILALLKALFLPKRLSIIHCPGHQKGHSAEARGNRMADQAARKAAITETPDTSTLLIENSSPSGGSKRTADGSEFEAGKRTADGSEFEKRTADGSEFESPKKKAKVE

SEQ ID NO: 2620 - protein, 2110 aa, synthetic construct
MPAAKRVKLDGGDKKYSIGLDIGTNSVGWAVITDEYKVPSKKFKVLGNTDRHSIKKNLIGALLFDSGETAEATRLKRTARRRYTRRKNRICYLQEIFSNEMAKVDDSFFHRLEESFLVEEDKKHERHPIFGNIVDEVAYHEKYPTIYHLRKKLVDSTDKADLRLIYLALAHMIKFRGHFLIEGDLNPDNSDVDKLFIQLVQTYNQLFEENPINASGVDAKAILSARLSKSRRLENLIAQLPGEKKNGLFGNLIALSLGLTPNFKSNFDLAEDAKLQLSKDTYDDDLDNLLAQIGDQYADLFLAAKNLSDAILLSDILRVNTEITKAPLSASMIKRYDEHHQDLTLLKALVRQQLPEKYKEIFFDQSKNGYAGYIDGGASQEEFYKFIKPILEKMDGTEELLVKLNREDLLRKQRTFDNGSIPHQIHLGELHAILRRQEDFYPFLKDNREKIEKILTFRIPYYVGPLARGNSRFAWMTRKSEETITPWNFEEVVDKGASAQSFIERMTNFDKNLPNEKVLPKHSLLYEYFTVYNELTKVKYVTEGMRKPAFLSGEQKKAIVDLLFKTNRKVTVKQLKEDYFKKIECFDSVEISGVEDRFNASLGTYHDLLKIIKDKDFLDNEENEDILEDIVLTLTLFEDREMIEERLKTYAHLFDDKVMKQLKRRRYTGWGRLSRKLINGIRDKQSGKTILDFLKSDGFANRNFMQLIHDDSLTFKEDIQKAQVSGQGDSLHEHIANLAGSPAIKKGILQTVKVVDELVKVMGRHKPENIVIEMARENQTTQKGQKNSRERMKRIEEGIKELGSQILKEHPVENTQLQNEKLYLYYLQNGRDMYVDQELDINRLSDYDVDHIVPQSFLKDDSIDNKVLTRSDKARGKSDNVPSEEVVKKMKNYWRQLLNAKLITQRKFDNLTKAERGGLSELDKAGFIKRQLVETRQITKHVAQILDSRMNTKYDENDKLIREVKVITLKSKLVSDFRKDFQFYKVREINNYHHAHDAYLNAVVGTALIKKYPKLESEFVYGDYKVYDVRKMIAKSEQEIGKATAKYFFYSNIMNFFKTEITLANGEIRKRPLIETNGETGEIVWDKGRDFATVRKVLSMPQVNIVKKTEVQTGGFSKESILPKRNSDKLIARKKDWDPKKYGGFDSPTVAYSVLVVAKVEKGKSKKLKSVKELLGITIMERSSFEKNPIDFLEAKGYKEVKKDLIIKLPKYSLFELENGRKRMLASAGELQKGNELALPSKYVNFLYLASHYEKLKGSPEDNEQKQLFVEQHKHYLDEIIEQISEFSKRVILADANLDKVLSAYNKHRDKPIREQAENIIHLFTLTNLGAPAAFKYFDTTIDRKRYTSTKEVLDATLIHQSITGLYETRIDLSQLGGDGGEAAAKGGTLNIEDEYRLHETSKEPDVSLGSTWLSDFPQAWAETGGMGLAVRQAPLIIPLKATSTPVSIKQYPMSQEARLGIKPHIQRLLDQGILVPCQSPWNTPLLPVKKPGTNDYRPVQDLREVNKRVEDIHPTVPNPYNLLSGLPPSHQWYTVLDLKDAFFCLRLHPTSQPLFAFEWRDPEMGISGQLTWTRLPQGFKNSPTLFNEALHRDLADFRIQHPDLILLQYVDDLLLAATSELDCQQGTRALLQTLGNLGYRASAKKAQICQKQVKYLGYLLKEGQRWLTEARKETVMGQPTPKTPRQLREFLGKAGFCRLFIPGFAEMAAPLYPLTKPGTLFNWGPDQQKAYQEIKQALLTAPALGLPDLTKPFELFVDEKQGYAKGVLTQKLGPWRRPVAYLSKKLDPVAAGWPPCLRMVAAIAVLTKDAGKLTMGQPLVILAPHAVEALVKQPPDRWLSNARMTHYQALLLDTDRVQFGPVVALNPATLLPLPEEGLQHNCLDILAEAHGTRPDLTDQPLPDADHTWYTDGSSLLQEGQRKAGAAVTTETEVIWAKALPAGTSAQRAELIALTQALKMAEGKKLNVYTDSRYAFATAHIHGEIYRRRGWLTSEGKEIKNKDEILALLKALFLPKRLSIIHCPGHQKGHSAEARGNRMADQAARKAAITETPDTSTLLIENSSPSGGSKRTADGSEFEAGKRTADGSEFEKRTADGSEFESPKKKAKVE

SEQ ID NO: 2621 - protein, 2111 aa, synthetic construct
MPAAKRVKLDGGDKKYSIGLDIGTNSVGWAVITDEYKVPSKKFKVLGNTDRHSIKKNLIGALLFDSGETAEATRLKRTARRRYTRRKNRICYLQEIFSNEMAKVDDSFFHRLEESFLVEEDKKHERHPIFGNIVDEVAYHEKYPTIYHLRKKLVDSTDKADLRLIYLALAHMIKFRGHFLIEGDLNPDNSDVDKLFIQLVQTYNQLFEENPINASGVDAKAILSARLSKSRRLENLIAQLPGEKKNGLFGNLIALSLGLTPNFKSNFDLAEDAKLQLSKDTYDDDLDNLLAQIGDQYADLFLAAKNLSDAILLSDILRVNTEITKAPLSASMIKRYDEHHQDLTLLKALVRQQLPEKYKEIFFDQSKNGYAGYIDGGASQEEFYKFIKPILEKMDGTEELLVKLNREDLLRKQRTFDNGSIPHQIHLGELHAILRRQEDFYPFLKDNREKIEKILTFRIPYYVGPLARGNSRFAWMTRKSEETITPWNFEEVVDKGASAQSFIERMTNFDKNLPNEKVLPKHSLLYEYFTVYNELTKVKYVTEGMRKPAFLSGEQKKAIVDLLFKTNRKVTVKQLKEDYFKKIECFDSVEISGVEDRFNASLGTYHDLLKIIKDKDFLDNEENEDILEDIVLTLTLFEDREMIEERLKTYAHLFDDKVMKQLKRRRYTGWGRLSRKLINGIRDKQSGKTILDFLKSDGFANRNFMQLIHDDSLTFKEDIQKAQVSGQGDSLHEHIANLAGSPAIKKGILQTVKVVDELVKVMGRHKPENIVIEMARENQTTQKGQKNSRERMKRIEEGIKELGSQILKEHPVENTQLQNEKLYLYYLQNGRDMYVDQELDINRLSDYDVDHIVPQSFLKDDSIDNKVLTRSDKARGKSDNVPSEEVVKKMKNYWRQLLNAKLITQRKFDNLTKAERGGLSELDKAGFIKRQLVETRQITKHVAQILDSRMNTKYDENDKLIREVKVITLKSKLVSDFRKDFQFYKVREINNYHHAHDAYLNAVVGTALIKKYPKLESEFVYGDYKVYDVRKMIAKSEQEIGKATAKYFFYSNIMNFFKTEITLANGEIRKRPLIETNGETGEIVWDKGRDFATVRKVLSMPQVNIVKKTEVQTGGFSKESILPKRNSDKLIARKKDWDPKKYGGFDSPTVAYSVLVVAKVEKGKSKKLKSVKELLGITIMERSSFEKNPIDFLEAKGYKEVKKDLIIKLPKYSLFELENGRKRMLASAGELQKGNELALPSKYVNFLYLASHYEKLKGSPEDNEQKQLFVEQHKHYLDEIIEQISEFSKRVILADANLDKVLSAYNKHRDKPIREQAENIIHLFTLTNLGAPAAFKYFDTTIDRKRYTSTKEVLDATLIHQSITGLYETRIDLSQLGGDGGGGGGSSGGTLNIEDEYRLHETSKEPDVSLGSTWLSDFPQAWAETGGMGLAVRQAPLIIPLKATSTPVSIKQYPMSQEARLGIKPHIQRLLDQGILVPCQSPWNTPLLPVKKPGTNDYRPVQDLREVNKRVEDIHPTVPNPYNLLSGLPPSHQWYTVLDLKDAFFCLRLHPTSQPLFAFEWRDPEMGISGQLTWTRLPQGFKNSPTLFNEALHRDLADFRIQHPDLILLQYVDDLLLAATSELDCQQGTRALLQTLGNLGYRASAKKAQICQKQVKYLGYLLKEGQRWLTEARKETVMGQPTPKTPRQLREFLGKAGFCRLFIPGFAEMAAPLYPLTKPGTLFNWGPDQQKAYQEIKQALLTAPALGLPDLTKPFELFVDEKQGYAKGVLTQKLGPWRRPVAYLSKKLDPVAAGWPPCLRMVAAIAVLTKDAGKLTMGQPLVILAPHAVEALVKQPPDRWLSNARMTHYQALLLDTDRVQFGPVVALNPATLLPLPEEGLQHNCLDILAEAHGTRPDLTDQPLPDADHTWYTDGSSLLQEGQRKAGAAVTTETEVIWAKALPAGTSAQRAELIALTQALKMAEGKKLNVYTDSRYAFATAHIHGEIYRRRGWLTSEGKEIKNKDEILALLKALFLPKRLSIIHCPGHQKGHSAEARGNRMADQAARKAAITETPDTSTLLIENSSPSGGSKRTADGSEFEAGKRTADGSEFEKRTADGSEFESPKKKAKVE

SEQ ID NO: 2622 - protein, 2114 aa, synthetic construct
MPAAKRVKLDGGDKKYSIGLDIGTNSVGWAVITDEYKVPSKKFKVLGNTDRHSIKKNLIGALLFDSGETAEATRLKRTARRRYTRRKNRICYLQEIFSNEMAKVDDSFFHRLEESFLVEEDKKHERHPIFGNIVDEVAYHEKYPTIYHLRKKLVDSTDKADLRLIYLALAHMIKFRGHFLIEGDLNPDNSDVDKLFIQLVQTYNQLFEENPINASGVDAKAILSARLSKSRRLENLIAQLPGEKKNGLFGNLIALSLGLTPNFKSNFDLAEDAKLQLSKDTYDDDLDNLLAQIGDQYADLFLAAKNLSDAILLSDILRVNTEITKAPLSASMIKRYDEHHQDLTLLKALVRQQLPEKYKEIFFDQSKNGYAGYIDGGASQEEFYKFIKPILEKMDGTEELLVKLNREDLLRKQRTFDNGSIPHQIHLGELHAILRRQEDFYPFLKDNREKIEKILTFRIPYYVGPLARGNSRFAWMTRKSEETITPWNFEEVVDKGASAQSFIERMTNFDKNLPNEKVLPKHSLLYEYFTVYNELTKVKYVTEGMRKPAFLSGEQKKAIVDLLFKTNRKVTVKQLKEDYFKKIECFDSVEISGVEDRFNASLGTYHDLLKIIKDKDFLDNEENEDILEDIVLTLTLFEDREMIEERLKTYAHLFDDKVMKQLKRRRYTGWGRLSRKLINGIRDKQSGKTILDFLKSDGFANRNFMQLIHDDSLTFKEDIQKAQVSGQGDSLHEHIANLAGSPAIKKGILQTVKVVDELVKVMGRHKPENIVIEMARENQTTQKGQKNSRERMKRIEEGIKELGSQILKEHPVENTQLQNEKLYLYYLQNGRDMYVDQELDINRLSDYDVDHIVPQSFLKDDSIDNKVLTRSDKARGKSDNVPSEEVVKKMKNYWRQLLNAKLITQRKFDNLTKAERGGLSELDKAGFIKRQLVETRQITKHVAQILDSRMNTKYDENDKLIREVKVITLKSKLVSDFRKDFQFYKVREINNYHHAHDAYLNAVVGTALIKKYPKLESEFVYGDYKVYDVRKMIAKSEQEIGKATAKYFFYSNIMNFFKTEITLANGEIRKRPLIETNGETGEIVWDKGRDFATVRKVLSMPQVNIVKKTEVQTGGFSKESILPKRNSDKLIARKKDWDPKKYGGFDSPTVAYSVLVVAKVEKGKSKKLKSVKELLGITIMERSSFEKNPIDFLEAKGYKEVKKDLIIKLPKYSLFELENGRKRMLASAGELQKGNELALPSKYVNFLYLASHYEKLKGSPEDNEQKQLFVEQHKHYLDEIIEQISEFSKRVILADANLDKVLSAYNKHRDKPIREQAENIIHLFTLTNLGAPAAFKYFDTTIDRKRYTSTKEVLDATLIHQSITGLYETRIDLSQLGGDGGGGSGGGPAPGGTLNIEDEYRLHETSKEPDVSLGSTWLSDFPQAWAETGGMGLAVRQAPLIIPLKATSTPVSIKQYPMSQEARLGIKPHIQRLLDQGILVPCQSPWNTPLLPVKKPGTNDYRPVQDLREVNKRVEDIHPTVPNPYNLLSGLPPSHQWYTVLDLKDAFFCLRLHPTSQPLFAFEWRDPEMGISGQLTWTRLPQGFKNSPTLFNEALHRDLADFRIQHPDLILLQYVDDLLLAATSELDCQQGTRALLQTLGNLGYRASAKKAQICQKQVKYLGYLLKEGQRWLTEARKETVMGQPTPKTPRQLREFLGKAGFCRLFIPGFAEMAAPLYPLTKPGTLFNWGPDQQKAYQEIKQALLTAPALGLPDLTKPFELFVDEKQGYAKGVLTQKLGPWRRPVAYLSKKLDPVAAGWPPCLRMVAAIAVLTKDAGKLTMGQPLVILAPHAVEALVKQPPDRWLSNARMTHYQALLLDTDRVQFGPVVALNPATLLPLPEEGLQHNCLDILAEAHGTRPDLTDQPLPDADHTWYTDGSSLLQEGQRKAGAAVTTETEVIWAKALPAGTSAQRAELIALTQALKMAEGKKLNVYTDSRYAFATAHIHGEIYRRRGWLTSEGKEIKNKDEILALLKALFLPKRLSIIHCPGHQKGHSAEARGNRMADQAARKAAITETPDTSTLLIENSSPSGGSKRTADGSEFEAGKRTADGSEFEKRTADGSEFESPKKKAKVE

SEQ ID NO: 2623 - protein, 2120 aa, synthetic construct
MPAAKRVKLDGGDKKYSIGLDIGTNSVGWAVITDEYKVPSKKFKVLGNTDRHSIKKNLIGALLFDSGETAEATRLKRTARRRYTRRKNRICYLQEIFSNEMAKVDDSFFHRLEESFLVEEDKKHERHPIFGNIVDEVAYHEKYPTIYHLRKKLVDSTDKADLRLIYLALAHMIKFRGHFLIEGDLNPDNSDVDKLFIQLVQTYNQLFEENPINASGVDAKAILSARLSKSRRLENLIAQLPGEKKNGLFGNLIALSLGLTPNFKSNFDLAEDAKLQLSKDTYDDDLDNLLAQIGDQYADLFLAAKNLSDAILLSDILRVNTEITKAPLSASMIKRYDEHHQDLTLLKALVRQQLPEKYKEIFFDQSKNGYAGYIDGGASQEEFYKFIKPILEKMDGTEELLVKLNREDLLRKQRTFDNGSIPHQIHLGELHAILRRQEDFYPFLKDNREKIEKILTFRIPYYVGPLARGNSRFAWMTRKSEETITPWNFEEVVDKGASAQSFIERMTNFDKNLPNEKVLPKHSLLYEYFTVYNELTKVKYVTEGMRKPAFLSGEQKKAIVDLLFKTNRKVTVKQLKEDYFKKIECFDSVEISGVEDRFNASLGTYHDLLKIIKDKDFLDNEENEDILEDIVLTLTLFEDREMIEERLKTYAHLFDDKVMKQLKRRRYTGWGRLSRKLINGIRDKQSGKTILDFLKSDGFANRNFMQLIHDDSLTFKEDIQKAQVSGQGDSLHEHIANLAGSPAIKKGILQTVKVVDELVKVMGRHKPENIVIEMARENQTTQKGQKNSRERMKRIEEGIKELGSQILKEHPVENTQLQNEKLYLYYLQNGRDMYVDQELDINRLSDYDVDHIVPQSFLKDDSIDNKVLTRSDKARGKSDNVPSEEVVKKMKNYWRQLLNAKLITQRKFDNLTKAERGGLSELDKAGFIKRQLVETRQITKHVAQILDSRMNTKYDENDKLIREVKVITLKSKLVSDFRKDFQFYKVREINNYHHAHDAYLNAVVGTALIKKYPKLESEFVYGDYKVYDVRKMIAKSEQEIGKATAKYFFYSNIMNFFKTEITLANGEIRKRPLIETNGETGEIVWDKGRDFATVRKVLSMPQVNIVKKTEVQTGGFSKESILPKRNSDKLIARKKDWDPKKYGGFDSPTVAYSVLVVAKVEKGKSKKLKSVKELLGITIMERSSFEKNPIDFLEAKGYKEVKKDLIIKLPKYSLFELENGRKRMLASAGELQKGNELALPSKYVNFLYLASHYEKLKGSPEDNEQKQLFVEQHKHYLDEIIEQISEFSKRVILADANLDKVLSAYNKHRDKPIREQAENIIHLFTLTNLGAPAAFKYFDTTIDRKRYTSTKEVLDATLIHQSITGLYETRIDLSQLGGDGGEAAAKGGGGSEAAAKGGTLNIEDEYRLHETSKEPDVSLGSTWLSDFPQAWAETGGMGLAVRQAPLIIPLKATSTPVSIKQYPMSQEARLGIKPHIQRLLDQGILVPCQSPWNTPLLPVKKPGTNDYRPVQDLREVNKRVEDIHPTVPNPYNLLSGLPPSHQWYTVLDLKDAFFCLRLHPTSQPLFAFEWRDPEMGISGQLTWTRLPQGFKNSPTLFNEALHRDLADFRIQHPDLILLQYVDDLLLAATSELDCQQGTRALLQTLGNLGYRASAKKAQICQKQVKYLGYLLKEGQRWLTEARKETVMGQPTPKTPRQLREFLGKAGFCRLFIPGFAEMAAPLYPLTKPGTLFNWGPDQQKAYQEIKQALLTAPALGLPDLTKPFELFVDEKQGYAKGVLTQKLGPWRRPVAYLSKKLDPVAAGWPPCLRMVAAIAVLTKDAGKLTMGQPLVILAPHAVEALVKQPPDRWLSNARMTHYQALLLDTDRVQFGPVVALNPATLLPLPEEGLQHNCLDILAEAHGTRPDLTDQPLPDADHTWYTDGSSLLQEGQRKAGAAVTTETEVIWAKALPAGTSAQRAELIALTQALKMAEGKKLNVYTDSRYAFATAHIHGEIYRRRGWLTSEGKEIKNKDEILALLKALFLPKRLSIIHCPGHQKGHSAEARGNRMADQAARKAAITETPDTSTLLIENSSPSGGSKRTADGSEFEAGKRTADGSEFEKRTADGSEFESPKKKAKVE

SEQ ID NO: 2624 - protein, 2108 aa, synthetic construct
MPAAKRVKLDGGDKKYSIGLDIGTNSVGWAVITDEYKVPSKKFKVLGNTDRHSIKKNLIGALLFDSGETAEATRLKRTARRRYTRRKNRICYLQEIFSNEMAKVDDSFFHRLEESFLVEEDKKHERHPIFGNIVDEVAYHEKYPTIYHLRKKLVDSTDKADLRLIYLALAHMIKFRGHFLIEGDLNPDNSDVDKLFIQLVQTYNQLFEENPINASGVDAKAILSARLSKSRRLENLIAQLPGEKKNGLFGNLIALSLGLTPNFKSNFDLAEDAKLQLSKDTYDDDLDNLLAQIGDQYADLFLAAKNLSDAILLSDILRVNTEITKAPLSASMIKRYDEHHQDLTLLKALVRQQLPEKYKEIFFDQSKNGYAGYIDGGASQEEFYKFIKPILEKMDGTEELLVKLNREDLLRKQRTFDNGSIPHQIHLGELHAILRRQEDFYPFLKDNREKIEKILTFRIPYYVGPLARGNSRFAWMTRKSEETITPWNFEEVVDKGASAQSFIERMTNFDKNLPNEKVLPKHSLLYEYFTVYNELTKVKYVTEGMRKPAFLSGEQKKAIVDLLFKTNRKVTVKQLKEDYFKKIECFDSVEISGVEDRFNASLGTYHDLLKIIKDKDFLDNEENEDILEDIVLTLTLFEDREMIEERLKTYAHLFDDKVMKQLKRRRYTGWGRLSRKLINGIRDKQSGKTILDFLKSDGFANRNFMQLIHDDSLTFKEDIQKAQVSGQGDSLHEHIANLAGSPAIKKGILQTVKVVDELVKVMGRHKPENIVIEMARENQTTQKGQKNSRERMKRIEEGIKELGSQILKEHPVENTQLQNEKLYLYYLQNGRDMYVDQELDINRLSDYDVDHIVPQSFLKDDSIDNKVLTRSDKARGKSDNVPSEEVVKKMKNYWRQLLNAKLITQRKFDNLTKAERGGLSELDKAGFIKRQLVETRQITKHVAQILDSRMNTKYDENDKLIREVKVITLKSKLVSDFRKDFQFYKVREINNYHHAHDAYLNAVVGTALIKKYPKLESEFVYGDYKVYDVRKMIAKSEQEIGKATAKYFFYSNIMNFFKTEITLANGEIRKRPLIETNGETGEIVWDKGRDFATVRKVLSMPQVNIVKKTEVQTGGFSKESILPKRNSDKLIARKKDWDPKKYGGFDSPTVAYSVLVVAKVEKGKSKKLKSVKELLGITIMERSSFEKNPIDFLEAKGYKEVKKDLIIKLPKYSLFELENGRKRMLASAGELQKGNELALPSKYVNFLYLASHYEKLKGSPEDNEQKQLFVEQHKHYLDEIIEQISEFSKRVILADANLDKVLSAYNKHRDKPIREQAENIIHLFTLTNLGAPAAFKYFDTTIDRKRYTSTKEVLDATLIHQSITGLYETRIDLSQLGGDGGPAPGGTLNIEDEYRLHETSKEPDVSLGSTWLSDFPQAWAETGGMGLAVRQAPLIIPLKATSTPVSIKQYPMSQEARLGIKPHIQRLLDQGILVPCQSPWNTPLLPVKKPGTNDYRPVQDLREVNKRVEDIHPTVPNPYNLLSGLPPSHQWYTVLDLKDAFFCLRLHPTSQPLFAFEWRDPEMGISGQLTWTRLPQGFKNSPTLFNEALHRDLADFRIQHPDLILLQYVDDLLLAATSELDCQQGTRALLQTLGNLGYRASAKKAQICQKQVKYLGYLLKEGQRWLTEARKETVMGQPTPKTPRQLREFLGKAGFCRLFIPGFAEMAAPLYPLTKPGTLFNWGPDQQKAYQEIKQALLTAPALGLPDLTKPFELFVDEKQGYAKGVLTQKLGPWRRPVAYLSKKLDPVAAGWPPCLRMVAAIAVLTKDAGKLTMGQPLVILAPHAVEALVKQPPDRWLSNARMTHYQALLLDTDRVQFGPVVALNPATLLPLPEEGLQHNCLDILAEAHGTRPDLTDQPLPDADHTWYTDGSSLLQEGQRKAGAAVTTETEVIWAKALPAGTSAQRAELIALTQALKMAEGKKLNVYTDSRYAFATAHIHGEIYRRRGWLTSEGKEIKNKDEILALLKALFLPKRLSIIHCPGHQKGHSAEARGNRMADQAARKAAITETPDTSTLLIENSSPSGGSKRTADGSEFEAGKRTADGSEFEKRTADGSEFESPKKKAKVE

SEQ ID NO: 2625 - protein, 2113 aa, synthetic construct
MPAAKRVKLDGGDKKYSIGLDIGTNSVGWAVITDEYKVPSKKFKVLGNTDRHSIKKNLIGALLFDSGETAEATRLKRTARRRYTRRKNRICYLQEIFSNEMAKVDDSFFHRLEESFLVEEDKKHERHPIFGNIVDEVAYHEKYPTIYHLRKKLVDSTDKADLRLIYLALAHMIKFRGHFLIEGDLNPDNSDVDKLFIQLVQTYNQLFEENPINASGVDAKAILSARLSKSRRLENLIAQLPGEKKNGLFGNLIALSLGLTPNFKSNFDLAEDAKLQLSKDTYDDDLDNLLAQIGDQYADLFLAAKNLSDAILLSDILRVNTEITKAPLSASMIKRYDEHHQDLTLLKALVRQQLPEKYKEIFFDQSKNGYAGYIDGGASQEEFYKFIKPILEKMDGTEELLVKLNREDLLRKQRTFDNGSIPHQIHLGELHAILRRQEDFYPFLKDNREKIEKILTFRIPYYVGPLARGNSRFAWMTRKSEETITPWNFEEVVDKGASAQSFIERMTNFDKNLPNEKVLPKHSLLYEYFTVYNELTKVKYVTEGMRKPAFLSGEQKKAIVDLLFKTNRKVTVKQLKEDYFKKIECFDSVEISGVEDRFNASLGTYHDLLKIIKDKDFLDNEENEDILEDIVLTLTLFEDREMIEERLKTYAHLFDDKVMKQLKRRRYTGWGRLSRKLINGIRDKQSGKTILDFLKSDGFANRNFMQLIHDDSLTFKEDIQKAQVSGQGDSLHEHIANLAGSPAIKKGILQTVKVVDELVKVMGRHKPENIVIEMARENQTTQKGQKNSRERMKRIEEGIKELGSQILKEHPVENTQLQNEKLYLYYLQNGRDMYVDQELDINRLSDYDVDHIVPQSFLKDDSIDNKVLTRSDKARGKSDNVPSEEVVKKMKNYWRQLLNAKLITQRKFDNLTKAERGGLSELDKAGFIKRQLVETRQITKHVAQILDSRMNTKYDENDKLIREVKVITLKSKLVSDFRKDFQFYKVREINNYHHAHDAYLNAVVGTALIKKYPKLESEFVYGDYKVYDVRKMIAKSEQEIGKATAKYFFYSNIMNFFKTEITLANGEIRKRPLIETNGETGEIVWDKGRDFATVRKVLSMPQVNIVKKTEVQTGGFSKESILPKRNSDKLIARKKDWDPKKYGGFDSPTVAYSVLVVAKVEKGKSKKLKSVKELLGITIMERSSFEKNPIDFLEAKGYKEVKKDLIIKLPKYSLFELENGRKRMLASAGELQKGNELALPSKYVNFLYLASHYEKLKGSPEDNEQKQLFVEQHKHYLDEIIEQISEFSKRVILADANLDKVLSAYNKHRDKPIREQAENIIHLFTLTNLGAPAAFKYFDTTIDRKRYTSTKEVLDATLIHQSITGLYETRIDLSQLGGDGGEAAAKGSSGGTLNIEDEYRLHETSKEPDVSLGSTWLSDFPQAWAETGGMGLAVRQAPLIIPLKATSTPVSIKQYPMSQEARLGIKPHIQRLLDQGILVPCQSPWNTPLLPVKKPGTNDYRPVQDLREVNKRVEDIHPTVPNPYNLLSGLPPSHQWYTVLDLKDAFFCLRLHPTSQPLFAFEWRDPEMGISGQLTWTRLPQGFKNSPTLFNEALHRDLADFRIQHPDLILLQYVDDLLLAATSELDCQQGTRALLQTLGNLGYRASAKKAQICQKQVKYLGYLLKEGQRWLTEARKETVMGQPTPKTPRQLREFLGKAGFCRLFIPGFAEMAAPLYPLTKPGTLFNWGPDQQKAYQEIKQALLTAPALGLPDLTKPFELFVDEKQGYAKGVLTQKLGPWRRPVAYLSKKLDPVAAGWPPCLRMVAAIAVLTKDAGKLTMGQPLVILAPHAVEALVKQPPDRWLSNARMTHYQALLLDTDRVQFGPVVALNPATLLPLPEEGLQHNCLDILAEAHGTRPDLTDQPLPDADHTWYTDGSSLLQEGQRKAGAAVTTETEVIWAKALPAGTSAQRAELIALTQALKMAEGKKLNVYTDSRYAFATAHIHGEIYRRRGWLTSEGKEIKNKDEILALLKALFLPKRLSIIHCPGHQKGHSAEARGNRMADQAARKAAITETPDTSTLLIENSSPSGGSKRTADGSEFEAGKRTADGSEFEKRTADGSEFESPKKKAKVE

SEQ ID NO: 2626 - protein, 2113 aa, synthetic construct
MPAAKRVKLDGGDKKYSIGLDIGTNSVGWAVITDEYKVPSKKFKVLGNTDRHSIKKNLIGALLFDSGETAEATRLKRTARRRYTRRKNRICYLQEIFSNEMAKVDDSFFHRLEESFLVEEDKKHERHPIFGNIVDEVAYHEKYPTIYHLRKKLVDSTDKADLRLIYLALAHMIKFRGHFLIEGDLNPDNSDVDKLFIQLVQTYNQLFEENPINASGVDAKAILSARLSKSRRLENLIAQLPGEKKNGLFGNLIALSLGLTPNFKSNFDLAEDAKLQLSKDTYDDDLDNLLAQIGDQYADLFLAAKNLSDAILLSDILRVNTEITKAPLSASMIKRYDEHHQDLTLLKALVRQQLPEKYKEIFFDQSKNGYAGYIDGGASQEEFYKFIKPILEKMDGTEELLVKLNREDLLRKQRTFDNGSIPHQIHLGELHAILRRQEDFYPFLKDNREKIEKILTFRIPYYVGPLARGNSRFAWMTRKSEETITPWNFEEVVDKGASAQSFIERMTNFDKNLPNEKVLPKHSLLYEYFTVYNELTKVKYVTEGMRKPAFLSGEQKKAIVDLLFKTNRKVTVKQLKEDYFKKIECFDSVEISGVEDRFNASLGTYHDLLKIIKDKDFLDNEENEDILEDIVLTLTLFEDREMIEERLKTYAHLFDDKVMKQLKRRRYTGWGRLSRKLINGIRDKQSGKTILDFLKSDGFANRNFMQLIHDDSLTFKEDIQKAQVSGQGDSLHEHIANLAGSPAIKKGILQTVKVVDELVKVMGRHKPENIVIEMARENQTTQKGQKNSRERMKRIEEGIKELGSQILKEHPVENTQLQNEKLYLYYLQNGRDMYVDQELDINRLSDYDVDHIVPQSFLKDDSIDNKVLTRSDKARGKSDNVPSEEVVKKMKNYWRQLLNAKLITQRKFDNLTKAERGGLSELDKAGFIKRQLVETRQITKHVAQILDSRMNTKYDENDKLIREVKVITLKSKLVSDFRKDFQFYKVREINNYHHAHDAYLNAVVGTALIKKYPKLESEFVYGDYKVYDVRKMIAKSEQEIGKATAKYFFYSNIMNFFKTEITLANGEIRKRPLIETNGETGEIVWDKGRDFATVRKVLSMPQVNIVKKTEVQTGGFSKESILPKRNSDKLIARKKDWDPKKYGGFDSPTVAYSVLVVAKVEKGKSKKLKSVKELLGITIMERSSFEKNPIDFLEAKGYKEVKKDLIIKLPKYSLFELENGRKRMLASAGELQKGNELALPSKYVNFLYLASHYEKLKGSPEDNEQKQLFVEQHKHYLDEIIEQISEFSKRVILADANLDKVLSAYNKHRDKPIREQAENIIHLFTLTNLGAPAAFKYFDTTIDRKRYTSTKEVLDATLIHQSITGLYETRIDLSQLGGDGGGGGGGGGGGGTLNIEDEYRLHETSKEPDVSLGSTWLSDFPQAWAETGGMGLAVRQAPLIIPLKATSTPVSIKQYPMSQEARLGIKPHIQRLLDQGILVPCQSPWNTPLLPVKKPGTNDYRPVQDLREVNKRVEDIHPTVPNPYNLLSGLPPSHQWYTVLDLKDAFFCLRLHPTSQPLFAFEWRDPEMGISGQLTWTRLPQGFKNSPTLFNEALHRDLADFRIQHPDLILLQYVDDLLLAATSELDCQQGTRALLQTLGNLGYRASAKKAQICQKQVKYLGYLLKEGQRWLTEARKETVMGQPTPKTPRQLREFLGKAGFCRLFIPGFAEMAAPLYPLTKPGTLFNWGPDQQKAYQEIKQALLTAPALGLPDLTKPFELFVDEKQGYAKGVLTQKLGPWRRPVAYLSKKLDPVAAGWPPCLRMVAAIAVLTKDAGKLTMGQPLVILAPHAVEALVKQPPDRWLSNARMTHYQALLLDTDRVQFGPVVALNPATLLPLPEEGLQHNCLDILAEAHGTRPDLTDQPLPDADHTWYTDGSSLLQEGQRKAGAAVTTETEVIWAKALPAGTSAQRAELIALTQALKMAEGKKLNVYTDSRYAFATAHIHGEIYRRRGWLTSEGKEIKNKDEILALLKALFLPKRLSIIHCPGHQKGHSAEARGNRMADQAARKAAITETPDTSTLLIENSSPSGGSKRTADGSEFEAGKRTADGSEFEKRTADGSEFESPKKKAKVE

SEQ ID NO: 2627 - protein, 2120 aa, synthetic construct
MPAAKRVKLDGGDKKYSIGLDIGTNSVGWAVITDEYKVPSKKFKVLGNTDRHSIKKNLIGALLFDSGETAEATRLKRTARRRYTRRKNRICYLQEIFSNEMAKVDDSFFHRLEESFLVEEDKKHERHPIFGNIVDEVAYHEKYPTIYHLRKKLVDSTDKADLRLIYLALAHMIKFRGHFLIEGDLNPDNSDVDKLFIQLVQTYNQLFEENPINASGVDAKAILSARLSKSRRLENLIAQLPGEKKNGLFGNLIALSLGLTPNFKSNFDLAEDAKLQLSKDTYDDDLDNLLAQIGDQYADLFLAAKNLSDAILLSDILRVNTEITKAPLSASMIKRYDEHHQDLTLLKALVRQQLPEKYKEIFFDQSKNGYAGYIDGGASQEEFYKFIKPILEKMDGTEELLVKLNREDLLRKQRTFDNGSIPHQIHLGELHAILRRQEDFYPFLKDNREKIEKILTFRIPYYVGPLARGNSRFAWMTRKSEETITPWNFEEVVDKGASAQSFIERMTNFDKNLPNEKVLPKHSLLYEYFTVYNELTKVKYVTEGMRKPAFLSGEQKKAIVDLLFKTNRKVTVKQLKEDYFKKIECFDSVEISGVEDRFNASLGTYHDLLKIIKDKDFLDNEENEDILEDIVLTLTLFEDREMIEERLKTYAHLFDDKVMKQLKRRRYTGWGRLSRKLINGIRDKQSGKTILDFLKSDGFANRNFMQLIHDDSLTFKEDIQKAQVSGQGDSLHEHIANLAGSPAIKKGILQTVKVVDELVKVMGRHKPENIVIEMARENQTTQKGQKNSRERMKRIEEGIKELGSQILKEHPVENTQLQNEKLYLYYLQNGRDMYVDQELDINRLSDYDVDHIVPQSFLKDDSIDNKVLTRSDKARGKSDNVPSEEVVKKMKNYWRQLLNAKLITQRKFDNLTKAERGGLSELDKAGFIKRQLVETRQITKHVAQILDSRMNTKYDENDKLIREVKVITLKSKLVSDFRKDFQFYKVREINNYHHAHDAYLNAVVGTALIKKYPKLESEFVYGDYKVYDVRKMIAKSEQEIGKATAKYFFYSNIMNFFKTEITLANGEIRKRPLIETNGETGEIVWDKGRDFATVRKVLSMPQVNIVKKTEVQTGGFSKESILPKRNSDKLIARKKDWDPKKYGGFDSPTVAYSVLVVAKVEKGKSKKLKSVKELLGITIMERSSFEKNPIDFLEAKGYKEVKKDLIIKLPKYSLFELENGRKRMLASAGELQKGNELALPSKYVNFLYLASHYEKLKGSPEDNEQKQLFVEQHKHYLDEIIEQISEFSKRVILADANLDKVLSAYNKHRDKPIREQAENIIHLFTLTNLGAPAAFKYFDTTIDRKRYTSTKEVLDATLIHQSITGLYETRIDLSQLGGDGGEAAAKEAAAKEAAAKGGTLNIEDEYRLHETSKEPDVSLGSTWLSDFPQAWAETGGMGLAVRQAPLIIPLKATSTPVSIKQYPMSQEARLGIKPHIQRLLDQGILVPCQSPWNTPLLPVKKPGTNDYRPVQDLREVNKRVEDIHPTVPNPYNLLSGLPPSHQWYTVLDLKDAFFCLRLHPTSQPLFAFEWRDPEMGISGQLTWTRLPQGFKNSPTLFNEALHRDLADFRIQHPDLILLQYVDDLLLAATSELDCQQGTRALLQTLGNLGYRASAKKAQICQKQVKYLGYLLKEGQRWLTEARKETVMGQPTPKTPRQLREFLGKAGFCRLFIPGFAEMAAPLYPLTKPGTLFNWGPDQQKAYQEIKQALLTAPALGLPDLTKPFELFVDEKQGYAKGVLTQKLGPWRRPVAYLSKKLDPVAAGWPPCLRMVAAIAVLTKDAGKLTMGQPLVILAPHAVEALVKQPPDRWLSNARMTHYQALLLDTDRVQFGPVVALNPATLLPLPEEGLQHNCLDILAEAHGTRPDLTDQPLPDADHTWYTDGSSLLQEGQRKAGAAVTTETEVIWAKALPAGTSAQRAELIALTQALKMAEGKKLNVYTDSRYAFATAHIHGEIYRRRGWLTSEGKEIKNKDEILALLKALFLPKRLSIIHCPGHQKGHSAEARGNRMADQAARKAAITETPDTSTLLIENSSPSGGSKRTADGSEFEAGKRTADGSEFEKRTADGSEFESPKKKAKVE

SEQ ID NO: 2628 - protein, 2116 aa, synthetic construct
MPAAKRVKLDGGDKKYSIGLDIGTNSVGWAVITDEYKVPSKKFKVLGNTDRHSIKKNLIGALLFDSGETAEATRLKRTARRRYTRRKNRICYLQEIFSNEMAKVDDSFFHRLEESFLVEEDKKHERHPIFGNIVDEVAYHEKYPTIYHLRKKLVDSTDKADLRLIYLALAHMIKFRGHFLIEGDLNPDNSDVDKLFIQLVQTYNQLFEENPINASGVDAKAILSARLSKSRRLENLIAQLPGEKKNGLFGNLIALSLGLTPNFKSNFDLAEDAKLQLSKDTYDDDLDNLLAQIGDQYADLFLAAKNLSDAILLSDILRVNTEITKAPLSASMIKRYDEHHQDLTLLKALVRQQLPEKYKEIFFDQSKNGYAGYIDGGASQEEFYKFIKPILEKMDGTEELLVKLNREDLLRKQRTFDNGSIPHQIHLGELHAILRRQEDFYPFLKDNREKIEKILTFRIPYYVGPLARGNSRFAWMTRKSEETITPWNFEEVVDKGASAQSFIERMTNFDKNLPNEKVLPKHSLLYEYFTVYNELTKVKYVTEGMRKPAFLSGEQKKAIVDLLFKTNRKVTVKQLKEDYFKKIECFDSVEISGVEDRFNASLGTYHDLLKIIKDKDFLDNEENEDILEDIVLTLTLFEDREMIEERLKTYAHLFDDKVMKQLKRRRYTGWGRLSRKLINGIRDKQSGKTILDFLKSDGFANRNFMQLIHDDSLTFKEDIQKAQVSGQGDSLHEHIANLAGSPAIKKGILQTVKVVDELVKVMGRHKPENIVIEMARENQTTQKGQKNSRERMKRIEEGIKELGSQILKEHPVENTQLQNEKLYLYYLQNGRDMYVDQELDINRLSDYDVDHIVPQSFLKDDSIDNKVLTRSDKARGKSDNVPSEEVVKKMKNYWRQLLNAKLITQRKFDNLTKAERGGLSELDKAGFIKRQLVETRQITKHVAQILDSRMNTKYDENDKLIREVKVITLKSKLVSDFRKDFQFYKVREINNYHHAHDAYLNAVVGTALIKKYPKLESEFVYGDYKVYDVRKMIAKSEQEIGKATAKYFFYSNIMNFFKTEITLANGEIRKRPLIETNGETGEIVWDKGRDFATVRKVLSMPQVNIVKKTEVQTGGFSKESILPKRNSDKLIARKKDWDPKKYGGFDSPTVAYSVLVVAKVEKGKSKKLKSVKELLGITIMERSSFEKNPIDFLEAKGYKEVKKDLIIKLPKYSLFELENGRKRMLASAGELQKGNELALPSKYVNFLYLASHYEKLKGSPEDNEQKQLFVEQHKHYLDEIIEQISEFSKRVILADANLDKVLSAYNKHRDKPIREQAENIIHLFTLTNLGAPAAFKYFDTTIDRKRYTSTKEVLDATLIHQSITGLYETRIDLSQLGGDGGEAAAKPAPGSSGGTLNIEDEYRLHETSKEPDVSLGSTWLSDFPQAWAETGGMGLAVRQAPLIIPLKATSTPVSIKQYPMSQEARLGIKPHIQRLLDQGILVPCQSPWNTPLLPVKKPGTNDYRPVQDLREVNKRVEDIHPTVPNPYNLLSGLPPSHQWYTVLDLKDAFFCLRLHPTSQPLFAFEWRDPEMGISGQLTWTRLPQGFKNSPTLFNEALHRDLADFRIQHPDLILLQYVDDLLLAATSELDCQQGTRALLQTLGNLGYRASAKKAQICQKQVKYLGYLLKEGQRWLTEARKETVMGQPTPKTPRQLREFLGKAGFCRLFIPGFAEMAAPLYPLTKPGTLFNWGPDQQKAYQEIKQALLTAPALGLPDLTKPFELFVDEKQGYAKGVLTQKLGPWRRPVAYLSKKLDPVAAGWPPCLRMVAAIAVLTKDAGKLTMGQPLVILAPHAVEALVKQPPDRWLSNARMTHYQALLLDTDRVQFGPVVALNPATLLPLPEEGLQHNCLDILAEAHGTRPDLTDQPLPDADHTWYTDGSSLLQEGQRKAGAAVTTETEVIWAKALPAGTSAQRAELIALTQALKMAEGKKLNVYTDSRYAFATAHIHGEIYRRRGWLTSEGKEIKNKDEILALLKALFLPKRLSIIHCPGHQKGHSAEARGNRMADQAARKAAITETPDTSTLLIENSSPSGGSKRTADGSEFEAGKRTADGSEFEKRTADGSEFESPKKKAKVE

SEQ ID NO: 2629 - protein, 2116 aa, synthetic construct
MPAAKRVKLDGGDKKYSIGLDIGTNSVGWAVITDEYKVPSKKFKVLGNTDRHSIKKNLIGALLFDSGETAEATRLKRTARRRYTRRKNRICYLQEIFSNEMAKVDDSFFHRLEESFLVEEDKKHERHPIFGNIVDEVAYHEKYPTIYHLRKKLVDSTDKADLRLIYLALAHMIKFRGHFLIEGDLNPDNSDVDKLFIQLVQTYNQLFEENPINASGVDAKAILSARLSKSRRLENLIAQLPGEKKNGLFGNLIALSLGLTPNFKSNFDLAEDAKLQLSKDTYDDDLDNLLAQIGDQYADLFLAAKNLSDAILLSDILRVNTEITKAPLSASMIKRYDEHHQDLTLLKALVRQQLPEKYKEIFFDQSKNGYAGYIDGGASQEEFYKFIKPILEKMDGTEELLVKLNREDLLRKQRTFDNGSIPHQIHLGELHAILRRQEDFYPFLKDNREKIEKILTFRIPYYVGPLARGNSRFAWMTRKSEETITPWNFEEVVDKGASAQSFIERMTNFDKNLPNEKVLPKHSLLYEYFTVYNELTKVKYVTEGMRKPAFLSGEQKKAIVDLLFKTNRKVTVKQLKEDYFKKIECFDSVEISGVEDRFNASLGTYHDLLKIIKDKDFLDNEENEDILEDIVLTLTLFEDREMIEERLKTYAHLFDDKVMKQLKRRRYTGWGRLSRKLINGIRDKQSGKTILDFLKSDGFANRNFMQLIHDDSLTFKEDIQKAQVSGQGDSLHEHIANLAGSPAIKKGILQTVKVVDELVKVMGRHKPENIVIEMARENQTTQKGQKNSRERMKRIEEGIKELGSQILKEHPVENTQLQNEKLYLYYLQNGRDMYVDQELDINRLSDYDVDHIVPQSFLKDDSIDNKVLTRSDKARGKSDNVPSEEVVKKMKNYWRQLLNAKLITQRKFDNLTKAERGGLSELDKAGFIKRQLVETRQITKHVAQILDSRMNTKYDENDKLIREVKVITLKSKLVSDFRKDFQFYKVREINNYHHAHDAYLNAVVGTALIKKYPKLESEFVYGDYKVYDVRKMIAKSEQEIGKATAKYFFYSNIMNFFKTEITLANGEIRKRPLIETNGETGEIVWDKGRDFATVRKVLSMPQVNIVKKTEVQTGGFSKESILPKRNSDKLIARKKDWDPKKYGGFDSPTVAYSVLVVAKVEKGKSKKLKSVKELLGITIMERSSFEKNPIDFLEAKGYKEVKKDLIIKLPKYSLFELENGRKRMLASAGELQKGNELALPSKYVNFLYLASHYEKLKGSPEDNEQKQLFVEQHKHYLDEIIEQISEFSKRVILADANLDKVLSAYNKHRDKPIREQAENIIHLFTLTNLGAPAAFKYFDTTIDRKRYTSTKEVLDATLIHQSITGLYETRIDLSQLGGDGGGGSEAAAKGGGGGTLNIEDEYRLHETSKEPDVSLGSTWLSDFPQAWAETGGMGLAVRQAPLIIPLKATSTPVSIKQYPMSQEARLGIKPHIQRLLDQGILVPCQSPWNTPLLPVKKPGTNDYRPVQDLREVNKRVEDIHPTVPNPYNLLSGLPPSHQWYTVLDLKDAFFCLRLHPTSQPLFAFEWRDPEMGISGQLTWTRLPQGFKNSPTLFNEALHRDLADFRIQHPDLILLQYVDDLLLAATSELDCQQGTRALLQTLGNLGYRASAKKAQICQKQVKYLGYLLKEGQRWLTEARKETVMGQPTPKTPRQLREFLGKAGFCRLFIPGFAEMAAPLYPLTKPGTLFNWGPDQQKAYQEIKQALLTAPALGLPDLTKPFELFVDEKQGYAKGVLTQKLGPWRRPVAYLSKKLDPVAAGWPPCLRMVAAIAVLTKDAGKLTMGQPLVILAPHAVEALVKQPPDRWLSNARMTHYQALLLDTDRVQFGPVVALNPATLLPLPEEGLQHNCLDILAEAHGTRPDLTDQPLPDADHTWYTDGSSLLQEGQRKAGAAVTTETEVIWAKALPAGTSAQRAELIALTQALKMAEGKKLNVYTDSRYAFATAHIHGEIYRRRGWLTSEGKEIKNKDEILALLKALFLPKRLSIIHCPGHQKGHSAEARGNRMADQAARKAAITETPDTSTLLIENSSPSGGSKRTADGSEFEAGKRTADGSEFEKRTADGSEFESPKKKAKVE

SEQ ID NO: 2630 - protein, 2135 aa, synthetic construct
MPAAKRVKLDGGDKKYSIGLDIGTNSVGWAVITDEYKVPSKKFKVLGNTDRHSIKKNLIGALLFDSGETAEATRLKRTARRRYTRRKNRICYLQEIFSNEMAKVDDSFFHRLEESFLVEEDKKHERHPIFGNIVDEVAYHEKYPTIYHLRKKLVDSTDKADLRLIYLALAHMIKFRGHFLIEGDLNPDNSDVDKLFIQLVQTYNQLFEENPINASGVDAKAILSARLSKSRRLENLIAQLPGEKKNGLFGNLIALSLGLTPNFKSNFDLAEDAKLQLSKDTYDDDLDNLLAQIGDQYADLFLAAKNLSDAILLSDILRVNTEITKAPLSASMIKRYDEHHQDLTLLKALVRQQLPEKYKEIFFDQSKNGYAGYIDGGASQEEFYKFIKPILEKMDGTEELLVKLNREDLLRKQRTFDNGSIPHQIHLGELHAILRRQEDFYPFLKDNREKIEKILTFRIPYYVGPLARGNSRFAWMTRKSEETITPWNFEEVVDKGASAQSFIERMTNFDKNLPNEKVLPKHSLLYEYFTVYNELTKVKYVTEGMRKPAFLSGEQKKAIVDLLFKTNRKVTVKQLKEDYFKKIECFDSVEISGVEDRFNASLGTYHDLLKIIKDKDFLDNEENEDILEDIVLTLTLFEDREMIEERLKTYAHLFDDKVMKQLKRRRYTGWGRLSRKLINGIRDKQSGKTILDFLKSDGFANRNFMQLIHDDSLTFKEDIQKAQVSGQGDSLHEHIANLAGSPAIKKGILQTVKVVDELVKVMGRHKPENIVIEMARENQTTQKGQKNSRERMKRIEEGIKELGSQILKEHPVENTQLQNEKLYLYYLQNGRDMYVDQELDINRLSDYDVDHIVPQSFLKDDSIDNKVLTRSDKARGKSDNVPSEEVVKKMKNYWRQLLNAKLITQRKFDNLTKAERGGLSELDKAGFIKRQLVETRQITKHVAQILDSRMNTKYDENDKLIREVKVITLKSKLVSDFRKDFQFYKVREINNYHHAHDAYLNAVVGTALIKKYPKLESEFVYGDYKVYDVRKMIAKSEQEIGKATAKYFFYSNIMNFFKTEITLANGEIRKRPLIETNGETGEIVWDKGRDFATVRKVLSMPQVNIVKKTEVQTGGFSKESILPKRNSDKLIARKKDWDPKKYGGFDSPTVAYSVLVVAKVEKGKSKKLKSVKELLGITIMERSSFEKNPIDFLEAKGYKEVKKDLIIKLPKYSLFELENGRKRMLASAGELQKGNELALPSKYVNFLYLASHYEKLKGSPEDNEQKQLFVEQHKHYLDEIIEQISEFSKRVILADANLDKVLSAYNKHRDKPIREQAENIIHLFTLTNLGAPAAFKYFDTTIDRKRYTSTKEVLDATLIHQSITGLYETRIDLSQLGGDGGEAAAKEAAAKEAAAKEAAAKEAAAKEAAAKGGTLNIEDEYRLHETSKEPDVSLGSTWLSDFPQAWAETGGMGLAVRQAPLIIPLKATSTPVSIKQYPMSQEARLGIKPHIQRLLDQGILVPCQSPWNTPLLPVKKPGTNDYRPVQDLREVNKRVEDIHPTVPNPYNLLSGLPPSHQWYTVLDLKDAFFCLRLHPTSQPLFAFEWRDPEMGISGQLTWTRLPQGFKNSPTLFNEALHRDLADFRIQHPDLILLQYVDDLLLAATSELDCQQGTRALLQTLGNLGYRASAKKAQICQKQVKYLGYLLKEGQRWLTEARKETVMGQPTPKTPRQLREFLGKAGFCRLFIPGFAEMAAPLYPLTKPGTLFNWGPDQQKAYQEIKQALLTAPALGLPDLTKPFELFVDEKQGYAKGVLTQKLGPWRRPVAYLSKKLDPVAAGWPPCLRMVAAIAVLTKDAGKLTMGQPLVILAPHAVEALVKQPPDRWLSNARMTHYQALLLDTDRVQFGPVVALNPATLLPLPEEGLQHNCLDILAEAHGTRPDLTDQPLPDADHTWYTDGSSLLQEGQRKAGAAVTTETEVIWAKALPAGTSAQRAELIALTQALKMAEGKKLNVYTDSRYAFATAHIHGEIYRRRGWLTSEGKEIKNKDEILALLKALFLPKRLSIIHCPGHQKGHSAEARGNRMADQAARKAAITETPDTSTLLIENSSPSGGSKRTADGSEFEAGKRTADGSEFEKRTADGSEFESPKKKAKVE

SEQ ID NO: 2631 - protein, 2108 aa, synthetic construct
MPAAKRVKLDGGDKKYSIGLDIGTNSVGWAVITDEYKVPSKKFKVLGNTDRHSIKKNLIGALLFDSGETAEATRLKRTARRRYTRRKNRICYLQEIFSNEMAKVDDSFFHRLEESFLVEEDKKHERHPIFGNIVDEVAYHEKYPTIYHLRKKLVDSTDKADLRLIYLALAHMIKFRGHFLIEGDLNPDNSDVDKLFIQLVQTYNQLFEENPINASGVDAKAILSARLSKSRRLENLIAQLPGEKKNGLFGNLIALSLGLTPNFKSNFDLAEDAKLQLSKDTYDDDLDNLLAQIGDQYADLFLAAKNLSDAILLSDILRVNTEITKAPLSASMIKRYDEHHQDLTLLKALVRQQLPEKYKEIFFDQSKNGYAGYIDGGASQEEFYKFIKPILEKMDGTEELLVKLNREDLLRKQRTFDNGSIPHQIHLGELHAILRRQEDFYPFLKDNREKIEKILTFRIPYYVGPLARGNSRFAWMTRKSEETITPWNFEEVVDKGASAQSFIERMTNFDKNLPNEKVLPKHSLLYEYFTVYNELTKVKYVTEGMRKPAFLSGEQKKAIVDLLFKTNRKVTVKQLKEDYFKKIECFDSVEISGVEDRFNASLGTYHDLLKIIKDKDFLDNEENEDILEDIVLTLTLFEDREMIEERLKTYAHLFDDKVMKQLKRRRYTGWGRLSRKLINGIRDKQSGKTILDFLKSDGFANRNFMQLIHDDSLTFKEDIQKAQVSGQGDSLHEHIANLAGSPAIKKGILQTVKVVDELVKVMGRHKPENIVIEMARENQTTQKGQKNSRERMKRIEEGIKELGSQILKEHPVENTQLQNEKLYLYYLQNGRDMYVDQELDINRLSDYDVDHIVPQSFLKDDSIDNKVLTRSDKARGKSDNVPSEEVVKKMKNYWRQLLNAKLITQRKFDNLTKAERGGLSELDKAGFIKRQLVETRQITKHVAQILDSRMNTKYDENDKLIREVKVITLKSKLVSDFRKDFQFYKVREINNYHHAHDAYLNAVVGTALIKKYPKLESEFVYGDYKVYDVRKMIAKSEQEIGKATAKYFFYSNIMNFFKTEITLANGEIRKRPLIETNGETGEIVWDKGRDFATVRKVLSMPQVNIVKKTEVQTGGFSKESILPKRNSDKLIARKKDWDPKKYGGFDSPTVAYSVLVVAKVEKGKSKKLKSVKELLGITIMERSSFEKNPIDFLEAKGYKEVKKDLIIKLPKYSLFELENGRKRMLASAGELQKGNELALPSKYVNFLYLASHYEKLKGSPEDNEQKQLFVEQHKHYLDEIIEQISEFSKRVILADANLDKVLSAYNKHRDKPIREQAENIIHLFTLTNLGAPAAFKYFDTTIDRKRYTSTKEVLDATLIHQSITGLYETRIDLSQLGGDGGGGSGGTLNIEDEYRLHETSKEPDVSLGSTWLSDFPQAWAETGGMGLAVRQAPLIIPLKATSTPVSIKQYPMSQEARLGIKPHIQRLLDQGILVPCQSPWNTPLLPVKKPGTNDYRPVQDLREVNKRVEDIHPTVPNPYNLLSGLPPSHQWYTVLDLKDAFFCLRLHPTSQPLFAFEWRDPEMGISGQLTWTRLPQGFKNSPTLFNEALHRDLADFRIQHPDLILLQYVDDLLLAATSELDCQQGTRALLQTLGNLGYRASAKKAQICQKQVKYLGYLLKEGQRWLTEARKETVMGQPTPKTPRQLREFLGKAGFCRLFIPGFAEMAAPLYPLTKPGTLFNWGPDQQKAYQEIKQALLTAPALGLPDLTKPFELFVDEKQGYAKGVLTQKLGPWRRPVAYLSKKLDPVAAGWPPCLRMVAAIAVLTKDAGKLTMGQPLVILAPHAVEALVKQPPDRWLSNARMTHYQALLLDTDRVQFGPVVALNPATLLPLPEEGLQHNCLDILAEAHGTRPDLTDQPLPDADHTWYTDGSSLLQEGQRKAGAAVTTETEVIWAKALPAGTSAQRAELIALTQALKMAEGKKLNVYTDSRYAFATAHIHGEIYRRRGWLTSEGKEIKNKDEILALLKALFLPKRLSIIHCPGHQKGHSAEARGNRMADQAARKAAITETPDTSTLLIENSSPSGGSKRTADGSEFEAGKRTADGSEFEKRTADGSEFESPKKKAKVE

SEQ ID NO: 2632 - protein, 2114 aa, synthetic construct
MPAAKRVKLDGGDKKYSIGLDIGTNSVGWAVITDEYKVPSKKFKVLGNTDRHSIKKNLIGALLFDSGETAEATRLKRTARRRYTRRKNRICYLQEIFSNEMAKVDDSFFHRLEESFLVEEDKKHERHPIFGNIVDEVAYHEKYPTIYHLRKKLVDSTDKADLRLIYLALAHMIKFRGHFLIEGDLNPDNSDVDKLFIQLVQTYNQLFEENPINASGVDAKAILSARLSKSRRLENLIAQLPGEKKNGLFGNLIALSLGLTPNFKSNFDLAEDAKLQLSKDTYDDDLDNLLAQIGDQYADLFLAAKNLSDAILLSDILRVNTEITKAPLSASMIKRYDEHHQDLTLLKALVRQQLPEKYKEIFFDQSKNGYAGYIDGGASQEEFYKFIKPILEKMDGTEELLVKLNREDLLRKQRTFDNGSIPHQIHLGELHAILRRQEDFYPFLKDNREKIEKILTFRIPYYVGPLARGNSRFAWMTRKSEETITPWNFEEVVDKGASAQSFIERMTNFDKNLPNEKVLPKHSLLYEYFTVYNELTKVKYVTEGMRKPAFLSGEQKKAIVDLLFKTNRKVTVKQLKEDYFKKIECFDSVEISGVEDRFNASLGTYHDLLKIIKDKDFLDNEENEDILEDIVLTLTLFEDREMIEERLKTYAHLFDDKVMKQLKRRRYTGWGRLSRKLINGIRDKQSGKTILDFLKSDGFANRNFMQLIHDDSLTFKEDIQKAQVSGQGDSLHEHIANLAGSPAIKKGILQTVKVVDELVKVMGRHKPENIVIEMARENQTTQKGQKNSRERMKRIEEGIKELGSQILKEHPVENTQLQNEKLYLYYLQNGRDMYVDQELDINRLSDYDVDHIVPQSFLKDDSIDNKVLTRSDKARGKSDNVPSEEVVKKMKNYWRQLLNAKLITQRKFDNLTKAERGGLSELDKAGFIKRQLVETRQITKHVAQILDSRMNTKYDENDKLIREVKVITLKSKLVSDFRKDFQFYKVREINNYHHAHDAYLNAVVGTALIKKYPKLESEFVYGDYKVYDVRKMIAKSEQEIGKATAKYFFYSNIMNFFKTEITLANGEIRKRPLIETNGETGEIVWDKGRDFATVRKVLSMPQVNIVKKTEVQTGGFSKESILPKRNSDKLIARKKDWDPKKYGGFDSPTVAYSVLVVAKVEKGKSKKLKSVKELLGITIMERSSFEKNPIDFLEAKGYKEVKKDLIIKLPKYSLFELENGRKRMLASAGELQKGNELALPSKYVNFLYLASHYEKLKGSPEDNEQKQLFVEQHKHYLDEIIEQISEFSKRVILADANLDKVLSAYNKHRDKPIREQAENIIHLFTLTNLGAPAAFKYFDTTIDRKRYTSTKEVLDATLIHQSITGLYETRIDLSQLGGDGGGGGGSSGGSGGTLNIEDEYRLHETSKEPDVSLGSTWLSDFPQAWAETGGMGLAVRQAPLIIPLKATSTPVSIKQYPMSQEARLGIKPHIQRLLDQGILVPCQSPWNTPLLPVKKPGTNDYRPVQDLREVNKRVEDIHPTVPNPYNLLSGLPPSHQWYTVLDLKDAFFCLRLHPTSQPLFAFEWRDPEMGISGQLTWTRLPQGFKNSPTLFNEALHRDLADFRIQHPDLILLQYVDDLLLAATSELDCQQGTRALLQTLGNLGYRASAKKAQICQKQVKYLGYLLKEGQRWLTEARKETVMGQPTPKTPRQLREFLGKAGFCRLFIPGFAEMAAPLYPLTKPGTLFNWGPDQQKAYQEIKQALLTAPALGLPDLTKPFELFVDEKQGYAKGVLTQKLGPWRRPVAYLSKKLDPVAAGWPPCLRMVAAIAVLTKDAGKLTMGQPLVILAPHAVEALVKQPPDRWLSNARMTHYQALLLDTDRVQFGPVVALNPATLLPLPEEGLQHNCLDILAEAHGTRPDLTDQPLPDADHTWYTDGSSLLQEGQRKAGAAVTTETEVIWAKALPAGTSAQRAELIALTQALKMAEGKKLNVYTDSRYAFATAHIHGEIYRRRGWLTSEGKEIKNKDEILALLKALFLPKRLSIIHCPGHQKGHSAEARGNRMADQAARKAAITETPDTSTLLIENSSPSGGSKRTADGSEFEAGKRTADGSEFEKRTADGSEFESPKKKAKVE

SEQ ID NO: 2633 - protein, 2114 aa, synthetic construct
MPAAKRVKLDGGDKKYSIGLDIGTNSVGWAVITDEYKVPSKKFKVLGNTDRHSIKKNLIGALLFDSGETAEATRLKRTARRRYTRRKNRICYLQEIFSNEMAKVDDSFFHRLEESFLVEEDKKHERHPIFGNIVDEVAYHEKYPTIYHLRKKLVDSTDKADLRLIYLALAHMIKFRGHFLIEGDLNPDNSDVDKLFIQLVQTYNQLFEENPINASGVDAKAILSARLSKSRRLENLIAQLPGEKKNGLFGNLIALSLGLTPNFKSNFDLAEDAKLQLSKDTYDDDLDNLLAQIGDQYADLFLAAKNLSDAILLSDILRVNTEITKAPLSASMIKRYDEHHQDLTLLKALVRQQLPEKYKEIFFDQSKNGYAGYIDGGASQEEFYKFIKPILEKMDGTEELLVKLNREDLLRKQRTFDNGSIPHQIHLGELHAILRRQEDFYPFLKDNREKIEKILTFRIPYYVGPLARGNSRFAWMTRKSEETITPWNFEEVVDKGASAQSFIERMTNFDKNLPNEKVLPKHSLLYEYFTVYNELTKVKYVTEGMRKPAFLSGEQKKAIVDLLFKTNRKVTVKQLKEDYFKKIECFDSVEISGVEDRFNASLGTYHDLLKIIKDKDFLDNEENEDILEDIVLTLTLFEDREMIEERLKTYAHLFDDKVMKQLKRRRYTGWGRLSRKLINGIRDKQSGKTILDFLKSDGFANRNFMQLIHDDSLTFKEDIQKAQVSGQGDSLHEHIANLAGSPAIKKGILQTVKVVDELVKVMGRHKPENIVIEMARENQTTQKGQKNSRERMKRIEEGIKELGSQILKEHPVENTQLQNEKLYLYYLQNGRDMYVDQELDINRLSDYDVDHIVPQSFLKDDSIDNKVLTRSDKARGKSDNVPSEEVVKKMKNYWRQLLNAKLITQRKFDNLTKAERGGLSELDKAGFIKRQLVETRQITKHVAQILDSRMNTKYDENDKLIREVKVITLKSKLVSDFRKDFQFYKVREINNYHHAHDAYLNAVVGTALIKKYPKLESEFVYGDYKVYDVRKMIAKSEQEIGKATAKYFFYSNIMNFFKTEITLANGEIRKRPLIETNGETGEIVWDKGRDFATVRKVLSMPQVNIVKKTEVQTGGFSKESILPKRNSDKLIARKKDWDPKKYGGFDSPTVAYSVLVVAKVEKGKSKKLKSVKELLGITIMERSSFEKNPIDFLEAKGYKEVKKDLIIKLPKYSLFELENGRKRMLASAGELQKGNELALPSKYVNFLYLASHYEKLKGSPEDNEQKQLFVEQHKHYLDEIIEQISEFSKRVILADANLDKVLSAYNKHRDKPIREQAENIIHLFTLTNLGAPAAFKYFDTTIDRKRYTSTKEVLDATLIHQSITGLYETRIDLSQLGGDGGGSSPAPGGGGGTLNIEDEYRLHETSKEPDVSLGSTWLSDFPQAWAETGGMGLAVRQAPLIIPLKATSTPVSIKQYPMSQEARLGIKPHIQRLLDQGILVPCQSPWNTPLLPVKKPGTNDYRPVQDLREVNKRVEDIHPTVPNPYNLLSGLPPSHQWYTVLDLKDAFFCLRLHPTSQPLFAFEWRDPEMGISGQLTWTRLPQGFKNSPTLFNEALHRDLADFRIQHPDLILLQYVDDLLLAATSELDCQQGTRALLQTLGNLGYRASAKKAQICQKQVKYLGYLLKEGQRWLTEARKETVMGQPTPKTPRQLREFLGKAGFCRLFIPGFAEMAAPLYPLTKPGTLFNWGPDQQKAYQEIKQALLTAPALGLPDLTKPFELFVDEKQGYAKGVLTQKLGPWRRPVAYLSKKLDPVAAGWPPCLRMVAAIAVLTKDAGKLTMGQPLVILAPHAVEALVKQPPDRWLSNARMTHYQALLLDTDRVQFGPVVALNPATLLPLPEEGLQHNCLDILAEAHGTRPDLTDQPLPDADHTWYTDGSSLLQEGQRKAGAAVTTETEVIWAKALPAGTSAQRAELIALTQALKMAEGKKLNVYTDSRYAFATAHIHGEIYRRRGWLTSEGKEIKNKDEILALLKALFLPKRLSIIHCPGHQKGHSAEARGNRMADQAARKAAITETPDTSTLLIENSSPSGGSKRTADGSEFEAGKRTADGSEFEKRTADGSEFESPKKKAKVE

SEQ ID NO: 2634 - protein, 2114 aa, synthetic construct
MPAAKRVKLDGGDKKYSIGLDIGTNSVGWAVITDEYKVPSKKFKVLGNTDRHSIKKNLIGALLFDSGETAEATRLKRTARRRYTRRKNRICYLQEIFSNEMAKVDDSFFHRLEESFLVEEDKKHERHPIFGNIVDEVAYHEKYPTIYHLRKKLVDSTDKADLRLIYLALAHMIKFRGHFLIEGDLNPDNSDVDKLFIQLVQTYNQLFEENPINASGVDAKAILSARLSKSRRLENLIAQLPGEKKNGLFGNLIALSLGLTPNFKSNFDLAEDAKLQLSKDTYDDDLDNLLAQIGDQYADLFLAAKNLSDAILLSDILRVNTEITKAPLSASMIKRYDEHHQDLTLLKALVRQQLPEKYKEIFFDQSKNGYAGYIDGGASQEEFYKFIKPILEKMDGTEELLVKLNREDLLRKQRTFDNGSIPHQIHLGELHAILRRQEDFYPFLKDNREKIEKILTFRIPYYVGPLARGNSRFAWMTRKSEETITPWNFEEVVDKGASAQSFIERMTNFDKNLPNEKVLPKHSLLYEYFTVYNELTKVKYVTEGMRKPAFLSGEQKKAIVDLLFKTNRKVTVKQLKEDYFKKIECFDSVEISGVEDRFNASLGTYHDLLKIIKDKDFLDNEENEDILEDIVLTLTLFEDREMIEERLKTYAHLFDDKVMKQLKRRRYTGWGRLSRKLINGIRDKQSGKTILDFLKSDGFANRNFMQLIHDDSLTFKEDIQKAQVSGQGDSLHEHIANLAGSPAIKKGILQTVKVVDELVKVMGRHKPENIVIEMARENQTTQKGQKNSRERMKRIEEGIKELGSQILKEHPVENTQLQNEKLYLYYLQNGRDMYVDQELDINRLSDYDVDHIVPQSFLKDDSIDNKVLTRSDKARGKSDNVPSEEVVKKMKNYWRQLLNAKLITQRKFDNLTKAERGGLSELDKAGFIKRQLVETRQITKHVAQILDSRMNTKYDENDKLIREVKVITLKSKLVSDFRKDFQFYKVREINNYHHAHDAYLNAVVGTALIKKYPKLESEFVYGDYKVYDVRKMIAKSEQEIGKATAKYFFYSNIMNFFKTEITLANGEIRKRPLIETNGETGEIVWDKGRDFATVRKVLSMPQVNIVKKTEVQTGGFSKESILPKRNSDKLIARKKDWDPKKYGGFDSPTVAYSVLVVAKVEKGKSKKLKSVKELLGITIMERSSFEKNPIDFLEAKGYKEVKKDLIIKLPKYSLFELENGRKRMLASAGELQKGNELALPSKYVNFLYLASHYEKLKGSPEDNEQKQLFVEQHKHYLDEIIEQISEFSKRVILADANLDKVLSAYNKHRDKPIREQAENIIHLFTLTNLGAPAAFKYFDTTIDRKRYTSTKEVLDATLIHQSITGLYETRIDLSQLGGDGGGSSGSSGSSGGTLNIEDEYRLHETSKEPDVSLGSTWLSDFPQAWAETGGMGLAVRQAPLIIPLKATSTPVSIKQYPMSQEARLGIKPHIQRLLDQGILVPCQSPWNTPLLPVKKPGTNDYRPVQDLREVNKRVEDIHPTVPNPYNLLSGLPPSHQWYTVLDLKDAFFCLRLHPTSQPLFAFEWRDPEMGISGQLTWTRLPQGFKNSPTLFNEALHRDLADFRIQHPDLILLQYVDDLLLAATSELDCQQGTRALLQTLGNLGYRASAKKAQICQKQVKYLGYLLKEGQRWLTEARKETVMGQPTPKTPRQLREFLGKAGFCRLFIPGFAEMAAPLYPLTKPGTLFNWGPDQQKAYQEIKQALLTAPALGLPDLTKPFELFVDEKQGYAKGVLTQKLGPWRRPVAYLSKKLDPVAAGWPPCLRMVAAIAVLTKDAGKLTMGQPLVILAPHAVEALVKQPPDRWLSNARMTHYQALLLDTDRVQFGPVVALNPATLLPLPEEGLQHNCLDILAEAHGTRPDLTDQPLPDADHTWYTDGSSLLQEGQRKAGAAVTTETEVIWAKALPAGTSAQRAELIALTQALKMAEGKKLNVYTDSRYAFATAHIHGEIYRRRGWLTSEGKEIKNKDEILALLKALFLPKRLSIIHCPGHQKGHSAEARGNRMADQAARKAAITETPDTSTLLIENSSPSGGSKRTADGSEFEAGKRTADGSEFEKRTADGSEFESPKKKAKVE

SEQ ID NO: 2635 - protein, 2112 aa, synthetic construct
MPAAKRVKLDGGDKKYSIGLDIGTNSVGWAVITDEYKVPSKKFKVLGNTDRHSIKKNLIGALLFDSGETAEATRLKRTARRRYTRRKNRICYLQEIFSNEMAKVDDSFFHRLEESFLVEEDKKHERHPIFGNIVDEVAYHEKYPTIYHLRKKLVDSTDKADLRLIYLALAHMIKFRGHFLIEGDLNPDNSDVDKLFIQLVQTYNQLFEENPINASGVDAKAILSARLSKSRRLENLIAQLPGEKKNGLFGNLIALSLGLTPNFKSNFDLAEDAKLQLSKDTYDDDLDNLLAQIGDQYADLFLAAKNLSDAILLSDILRVNTEITKAPLSASMIKRYDEHHQDLTLLKALVRQQLPEKYKEIFFDQSKNGYAGYIDGGASQEEFYKFIKPILEKMDGTEELLVKLNREDLLRKQRTFDNGSIPHQIHLGELHAILRRQEDFYPFLKDNREKIEKILTFRIPYYVGPLARGNSRFAWMTRKSEETITPWNFEEVVDKGASAQSFIERMTNFDKNLPNEKVLPKHSLLYEYFTVYNELTKVKYVTEGMRKPAFLSGEQKKAIVDLLFKTNRKVTVKQLKEDYFKKIECFDSVEISGVEDRFNASLGTYHDLLKIIKDKDFLDNEENEDILEDIVLTLTLFEDREMIEERLKTYAHLFDDKVMKQLKRRRYTGWGRLSRKLINGIRDKQSGKTILDFLKSDGFANRNFMQLIHDDSLTFKEDIQKAQVSGQGDSLHEHIANLAGSPAIKKGILQTVKVVDELVKVMGRHKPENIVIEMARENQTTQKGQKNSRERMKRIEEGIKELGSQILKEHPVENTQLQNEKLYLYYLQNGRDMYVDQELDINRLSDYDVDHIVPQSFLKDDSIDNKVLTRSDKARGKSDNVPSEEVVKKMKNYWRQLLNAKLITQRKFDNLTKAERGGLSELDKAGFIKRQLVETRQITKHVAQILDSRMNTKYDENDKLIREVKVITLKSKLVSDFRKDFQFYKVREINNYHHAHDAYLNAVVGTALIKKYPKLESEFVYGDYKVYDVRKMIAKSEQEIGKATAKYFFYSNIMNFFKTEITLANGEIRKRPLIETNGETGEIVWDKGRDFATVRKVLSMPQVNIVKKTEVQTGGFSKESILPKRNSDKLIARKKDWDPKKYGGFDSPTVAYSVLVVAKVEKGKSKKLKSVKELLGITIMERSSFEKNPIDFLEAKGYKEVKKDLIIKLPKYSLFELENGRKRMLASAGELQKGNELALPSKYVNFLYLASHYEKLKGSPEDNEQKQLFVEQHKHYLDEIIEQISEFSKRVILADANLDKVLSAYNKHRDKPIREQAENIIHLFTLTNLGAPAAFKYFDTTIDRKRYTSTKEVLDATLIHQSITGLYETRIDLSQLGGDGGGGGGGGGGGTLNIEDEYRLHETSKEPDVSLGSTWLSDFPQAWAETGGMGLAVRQAPLIIPLKATSTPVSIKQYPMSQEARLGIKPHIQRLLDQGILVPCQSPWNTPLLPVKKPGTNDYRPVQDLREVNKRVEDIHPTVPNPYNLLSGLPPSHQWYTVLDLKDAFFCLRLHPTSQPLFAFEWRDPEMGISGQLTWTRLPQGFKNSPTLFNEALHRDLADFRIQHPDLILLQYVDDLLLAATSELDCQQGTRALLQTLGNLGYRASAKKAQICQKQVKYLGYLLKEGQRWLTEARKETVMGQPTPKTPRQLREFLGKAGFCRLFIPGFAEMAAPLYPLTKPGTLFNWGPDQQKAYQEIKQALLTAPALGLPDLTKPFELFVDEKQGYAKGVLTQKLGPWRRPVAYLSKKLDPVAAGWPPCLRMVAAIAVLTKDAGKLTMGQPLVILAPHAVEALVKQPPDRWLSNARMTHYQALLLDTDRVQFGPVVALNPATLLPLPEEGLQHNCLDILAEAHGTRPDLTDQPLPDADHTWYTDGSSLLQEGQRKAGAAVTTETEVIWAKALPAGTSAQRAELIALTQALKMAEGKKLNVYTDSRYAFATAHIHGEIYRRRGWLTSEGKEIKNKDEILALLKALFLPKRLSIIHCPGHQKGHSAEARGNRMADQAARKAAITETPDTSTLLIENSSPSGGSKRTADGSEFEAGKRTADGSEFEKRTADGSEFESPKKKAKVE

SEQ ID NO: 2636 - protein, 2120 aa, synthetic construct
MPAAKRVKLDGGDKKYSIGLDIGTNSVGWAVITDEYKVPSKKFKVLGNTDRHSIKKNLIGALLFDSGETAEATRLKRTARRRYTRRKNRICYLQEIFSNEMAKVDDSFFHRLEESFLVEEDKKHERHPIFGNIVDEVAYHEKYPTIYHLRKKLVDSTDKADLRLIYLALAHMIKFRGHFLIEGDLNPDNSDVDKLFIQLVQTYNQLFEENPINASGVDAKAILSARLSKSRRLENLIAQLPGEKKNGLFGNLIALSLGLTPNFKSNFDLAEDAKLQLSKDTYDDDLDNLLAQIGDQYADLFLAAKNLSDAILLSDILRVNTEITKAPLSASMIKRYDEHHQDLTLLKALVRQQLPEKYKEIFFDQSKNGYAGYIDGGASQEEFYKFIKPILEKMDGTEELLVKLNREDLLRKQRTFDNGSIPHQIHLGELHAILRRQEDFYPFLKDNREKIEKILTFRIPYYVGPLARGNSRFAWMTRKSEETITPWNFEEVVDKGASAQSFIERMTNFDKNLPNEKVLPKHSLLYEYFTVYNELTKVKYVTEGMRKPAFLSGEQKKAIVDLLFKTNRKVTVKQLKEDYFKKIECFDSVEISGVEDRFNASLGTYHDLLKIIKDKDFLDNEENEDILEDIVLTLTLFEDREMIEERLKTYAHLFDDKVMKQLKRRRYTGWGRLSRKLINGIRDKQSGKTILDFLKSDGFANRNFMQLIHDDSLTFKEDIQKAQVSGQGDSLHEHIANLAGSPAIKKGILQTVKVVDELVKVMGRHKPENIVIEMARENQTTQKGQKNSRERMKRIEEGIKELGSQILKEHPVENTQLQNEKLYLYYLQNGRDMYVDQELDINRLSDYDVDHIVPQSFLKDDSIDNKVLTRSDKARGKSDNVPSEEVVKKMKNYWRQLLNAKLITQRKFDNLTKAERGGLSELDKAGFIKRQLVETRQITKHVAQILDSRMNTKYDENDKLIREVKVITLKSKLVSDFRKDFQFYKVREINNYHHAHDAYLNAVVGTALIKKYPKLESEFVYGDYKVYDVRKMIAKSEQEIGKATAKYFFYSNIMNFFKTEITLANGEIRKRPLIETNGETGEIVWDKGRDFATVRKVLSMPQVNIVKKTEVQTGGFSKESILPKRNSDKLIARKKDWDPKKYGGFDSPTVAYSVLVVAKVEKGKSKKLKSVKELLGITIMERSSFEKNPIDFLEAKGYKEVKKDLIIKLPKYSLFELENGRKRMLASAGELQKGNELALPSKYVNFLYLASHYEKLKGSPEDNEQKQLFVEQHKHYLDEIIEQISEFSKRVILADANLDKVLSAYNKHRDKPIREQAENIIHLFTLTNLGAPAAFKYFDTTIDRKRYTSTKEVLDATLIHQSITGLYETRIDLSQLGGDGGGGGGSEAAAKGGGGSGGTLNIEDEYRLHETSKEPDVSLGSTWLSDFPQAWAETGGMGLAVRQAPLIIPLKATSTPVSIKQYPMSQEARLGIKPHIQRLLDQGILVPCQSPWNTPLLPVKKPGTNDYRPVQDLREVNKRVEDIHPTVPNPYNLLSGLPPSHQWYTVLDLKDAFFCLRLHPTSQPLFAFEWRDPEMGISGQLTWTRLPQGFKNSPTLFNEALHRDLADFRIQHPDLILLQYVDDLLLAATSELDCQQGTRALLQTLGNLGYRASAKKAQICQKQVKYLGYLLKEGQRWLTEARKETVMGQPTPKTPRQLREFLGKAGFCRLFIPGFAEMAAPLYPLTKPGTLFNWGPDQQKAYQEIKQALLTAPALGLPDLTKPFELFVDEKQGYAKGVLTQKLGPWRRPVAYLSKKLDPVAAGWPPCLRMVAAIAVLTKDAGKLTMGQPLVILAPHAVEALVKQPPDRWLSNARMTHYQALLLDTDRVQFGPVVALNPATLLPLPEEGLQHNCLDILAEAHGTRPDLTDQPLPDADHTWYTDGSSLLQEGQRKAGAAVTTETEVIWAKALPAGTSAQRAELIALTQALKMAEGKKLNVYTDSRYAFATAHIHGEIYRRRGWLTSEGKEIKNKDEILALLKALFLPKRLSIIHCPGHQKGHSAEARGNRMADQAARKAAITETPDTSTLLIENSSPSGGSKRTADGSEFEAGKRTADGSEFEKRTADGSEFESPKKKAKVE

SEQ ID NO: 2637 - protein, 2116 aa, synthetic construct
MPAAKRVKLDGGDKKYSIGLDIGTNSVGWAVITDEYKVPSKKFKVLGNTDRHSIKKNLIGALLFDSGETAEATRLKRTARRRYTRRKNRICYLQEIFSNEMAKVDDSFFHRLEESFLVEEDKKHERHPIFGNIVDEVAYHEKYPTIYHLRKKLVDSTDKADLRLIYLALAHMIKFRGHFLIEGDLNPDNSDVDKLFIQLVQTYNQLFEENPINASGVDAKAILSARLSKSRRLENLIAQLPGEKKNGLFGNLIALSLGLTPNFKSNFDLAEDAKLQLSKDTYDDDLDNLLAQIGDQYADLFLAAKNLSDAILLSDILRVNTEITKAPLSASMIKRYDEHHQDLTLLKALVRQQLPEKYKEIFFDQSKNGYAGYIDGGASQEEFYKFIKPILEKMDGTEELLVKLNREDLLRKQRTFDNGSIPHQIHLGELHAILRRQEDFYPFLKDNREKIEKILTFRIPYYVGPLARGNSRFAWMTRKSEETITPWNFEEVVDKGASAQSFIERMTNFDKNLPNEKVLPKHSLLYEYFTVYNELTKVKYVTEGMRKPAFLSGEQKKAIVDLLFKTNRKVTVKQLKEDYFKKIECFDSVEISGVEDRFNASLGTYHDLLKIIKDKDFLDNEENEDILEDIVLTLTLFEDREMIEERLKTYAHLFDDKVMKQLKRRRYTGWGRLSRKLINGIRDKQSGKTILDFLKSDGFANRNFMQLIHDDSLTFKEDIQKAQVSGQGDSLHEHIANLAGSPAIKKGILQTVKVVDELVKVMGRHKPENIVIEMARENQTTQKGQKNSRERMKRIEEGIKELGSQILKEHPVENTQLQNEKLYLYYLQNGRDMYVDQELDINRLSDYDVDHIVPQSFLKDDSIDNKVLTRSDKARGKSDNVPSEEVVKKMKNYWRQLLNAKLITQRKFDNLTKAERGGLSELDKAGFIKRQLVETRQITKHVAQILDSRMNTKYDENDKLIREVKVITLKSKLVSDFRKDFQFYKVREINNYHHAHDAYLNAVVGTALIKKYPKLESEFVYGDYKVYDVRKMIAKSEQEIGKATAKYFFYSNIMNFFKTEITLANGEIRKRPLIETNGETGEIVWDKGRDFATVRKVLSMPQVNIVKKTEVQTGGFSKESILPKRNSDKLIARKKDWDPKKYGGFDSPTVAYSVLVVAKVEKGKSKKLKSVKELLGITIMERSSFEKNPIDFLEAKGYKEVKKDLIIKLPKYSLFELENGRKRMLASAGELQKGNELALPSKYVNFLYLASHYEKLKGSPEDNEQKQLFVEQHKHYLDEIIEQISEFSKRVILADANLDKVLSAYNKHRDKPIREQAENIIHLFTLTNLGAPAAFKYFDTTIDRKRYTSTKEVLDATLIHQSITGLYETRIDLSQLGGDGGEAAAKGGSGGGGGTLNIEDEYRLHETSKEPDVSLGSTWLSDFPQAWAETGGMGLAVRQAPLIIPLKATSTPVSIKQYPMSQEARLGIKPHIQRLLDQGILVPCQSPWNTPLLPVKKPGTNDYRPVQDLREVNKRVEDIHPTVPNPYNLLSGLPPSHQWYTVLDLKDAFFCLRLHPTSQPLFAFEWRDPEMGISGQLTWTRLPQGFKNSPTLFNEALHRDLADFRIQHPDLILLQYVDDLLLAATSELDCQQGTRALLQTLGNLGYRASAKKAQICQKQVKYLGYLLKEGQRWLTEARKETVMGQPTPKTPRQLREFLGKAGFCRLFIPGFAEMAAPLYPLTKPGTLFNWGPDQQKAYQEIKQALLTAPALGLPDLTKPFELFVDEKQGYAKGVLTQKLGPWRRPVAYLSKKLDPVAAGWPPCLRMVAAIAVLTKDAGKLTMGQPLVILAPHAVEALVKQPPDRWLSNARMTHYQALLLDTDRVQFGPVVALNPATLLPLPEEGLQHNCLDILAEAHGTRPDLTDQPLPDADHTWYTDGSSLLQEGQRKAGAAVTTETEVIWAKALPAGTSAQRAELIALTQALKMAEGKKLNVYTDSRYAFATAHIHGEIYRRRGWLTSEGKEIKNKDEILALLKALFLPKRLSIIHCPGHQKGHSAEARGNRMADQAARKAAITETPDTSTLLIENSSPSGGSKRTADGSEFEAGKRTADGSEFEKRTADGSEFESPKKKAKVE

SEQ ID NO: 2638 - protein, 2116 aa, synthetic construct
MPAAKRVKLDGGDKKYSIGLDIGTNSVGWAVITDEYKVPSKKFKVLGNTDRHSIKKNLIGALLFDSGETAEATRLKRTARRRYTRRKNRICYLQEIFSNEMAKVDDSFFHRLEESFLVEEDKKHERHPIFGNIVDEVAYHEKYPTIYHLRKKLVDSTDKADLRLIYLALAHMIKFRGHFLIEGDLNPDNSDVDKLFIQLVQTYNQLFEENPINASGVDAKAILSARLSKSRRLENLIAQLPGEKKNGLFGNLIALSLGLTPNFKSNFDLAEDAKLQLSKDTYDDDLDNLLAQIGDQYADLFLAAKNLSDAILLSDILRVNTEITKAPLSASMIKRYDEHHQDLTLLKALVRQQLPEKYKEIFFDQSKNGYAGYIDGGASQEEFYKFIKPILEKMDGTEELLVKLNREDLLRKQRTFDNGSIPHQIHLGELHAILRRQEDFYPFLKDNREKIEKILTFRIPYYVGPLARGNSRFAWMTRKSEETITPWNFEEVVDKGASAQSFIERMTNFDKNLPNEKVLPKHSLLYEYFTVYNELTKVKYVTEGMRKPAFLSGEQKKAIVDLLFKTNRKVTVKQLKEDYFKKIECFDSVEISGVEDRFNASLGTYHDLLKIIKDKDFLDNEENEDILEDIVLTLTLFEDREMIEERLKTYAHLFDDKVMKQLKRRRYTGWGRLSRKLINGIRDKQSGKTILDFLKSDGFANRNFMQLIHDDSLTFKEDIQKAQVSGQGDSLHEHIANLAGSPAIKKGILQTVKVVDELVKVMGRHKPENIVIEMARENQTTQKGQKNSRERMKRIEEGIKELGSQILKEHPVENTQLQNEKLYLYYLQNGRDMYVDQELDINRLSDYDVDHIVPQSFLKDDSIDNKVLTRSDKARGKSDNVPSEEVVKKMKNYWRQLLNAKLITQRKFDNLTKAERGGLSELDKAGFIKRQLVETRQITKHVAQILDSRMNTKYDENDKLIREVKVITLKSKLVSDFRKDFQFYKVREINNYHHAHDAYLNAVVGTALIKKYPKLESEFVYGDYKVYDVRKMIAKSEQEIGKATAKYFFYSNIMNFFKTEITLANGEIRKRPLIETNGETGEIVWDKGRDFATVRKVLSMPQVNIVKKTEVQTGGFSKESILPKRNSDKLIARKKDWDPKKYGGFDSPTVAYSVLVVAKVEKGKSKKLKSVKELLGITIMERSSFEKNPIDFLEAKGYKEVKKDLIIKLPKYSLFELENGRKRMLASAGELQKGNELALPSKYVNFLYLASHYEKLKGSPEDNEQKQLFVEQHKHYLDEIIEQISEFSKRVILADANLDKVLSAYNKHRDKPIREQAENIIHLFTLTNLGAPAAFKYFDTTIDRKRYTSTKEVLDATLIHQSITGLYETRIDLSQLGGDGGGGGEAAAKGGSGGTLNIEDEYRLHETSKEPDVSLGSTWLSDFPQAWAETGGMGLAVRQAPLIIPLKATSTPVSIKQYPMSQEARLGIKPHIQRLLDQGILVPCQSPWNTPLLPVKKPGTNDYRPVQDLREVNKRVEDIHPTVPNPYNLLSGLPPSHQWYTVLDLKDAFFCLRLHPTSQPLFAFEWRDPEMGISGQLTWTRLPQGFKNSPTLFNEALHRDLADFRIQHPDLILLQYVDDLLLAATSELDCQQGTRALLQTLGNLGYRASAKKAQICQKQVKYLGYLLKEGQRWLTEARKETVMGQPTPKTPRQLREFLGKAGFCRLFIPGFAEMAAPLYPLTKPGTLFNWGPDQQKAYQEIKQALLTAPALGLPDLTKPFELFVDEKQGYAKGVLTQKLGPWRRPVAYLSKKLDPVAAGWPPCLRMVAAIAVLTKDAGKLTMGQPLVILAPHAVEALVKQPPDRWLSNARMTHYQALLLDTDRVQFGPVVALNPATLLPLPEEGLQHNCLDILAEAHGTRPDLTDQPLPDADHTWYTDGSSLLQEGQRKAGAAVTTETEVIWAKALPAGTSAQRAELIALTQALKMAEGKKLNVYTDSRYAFATAHIHGEIYRRRGWLTSEGKEIKNKDEILALLKALFLPKRLSIIHCPGHQKGHSAEARGNRMADQAARKAAITETPDTSTLLIENSSPSGGSKRTADGSEFEAGKRTADGSEFEKRTADGSEFESPKKKAKVE

SEQ ID NO: 2639 - protein, 2115 aa, synthetic construct
MPAAKRVKLDGGDKKYSIGLDIGTNSVGWAVITDEYKVPSKKFKVLGNTDRHSIKKNLIGALLFDSGETAEATRLKRTARRRYTRRKNRICYLQEIFSNEMAKVDDSFFHRLEESFLVEEDKKHERHPIFGNIVDEVAYHEKYPTIYHLRKKLVDSTDKADLRLIYLALAHMIKFRGHFLIEGDLNPDNSDVDKLFIQLVQTYNQLFEENPINASGVDAKAILSARLSKSRRLENLIAQLPGEKKNGLFGNLIALSLGLTPNFKSNFDLAEDAKLQLSKDTYDDDLDNLLAQIGDQYADLFLAAKNLSDAILLSDILRVNTEITKAPLSASMIKRYDEHHQDLTLLKALVRQQLPEKYKEIFFDQSKNGYAGYIDGGASQEEFYKFIKPILEKMDGTEELLVKLNREDLLRKQRTFDNGSIPHQIHLGELHAILRRQEDFYPFLKDNREKIEKILTFRIPYYVGPLARGNSRFAWMTRKSEETITPWNFEEVVDKGASAQSFIERMTNFDKNLPNEKVLPKHSLLYEYFTVYNELTKVKYVTEGMRKPAFLSGEQKKAIVDLLFKTNRKVTVKQLKEDYFKKIECFDSVEISGVEDRFNASLGTYHDLLKIIKDKDFLDNEENEDILEDIVLTLTLFEDREMIEERLKTYAHLFDDKVMKQLKRRRYTGWGRLSRKLINGIRDKQSGKTILDFLKSDGFANRNFMQLIHDDSLTFKEDIQKAQVSGQGDSLHEHIANLAGSPAIKKGILQTVKVVDELVKVMGRHKPENIVIEMARENQTTQKGQKNSRERMKRIEEGIKELGSQILKEHPVENTQLQNEKLYLYYLQNGRDMYVDQELDINRLSDYDVDHIVPQSFLKDDSIDNKVLTRSDKARGKSDNVPSEEVVKKMKNYWRQLLNAKLITQRKFDNLTKAERGGLSELDKAGFIKRQLVETRQITKHVAQILDSRMNTKYDENDKLIREVKVITLKSKLVSDFRKDFQFYKVREINNYHHAHDAYLNAVVGTALIKKYPKLESEFVYGDYKVYDVRKMIAKSEQEIGKATAKYFFYSNIMNFFKTEITLANGEIRKRPLIETNGETGEIVWDKGRDFATVRKVLSMPQVNIVKKTEVQTGGFSKESILPKRNSDKLIARKKDWDPKKYGGFDSPTVAYSVLVVAKVEKGKSKKLKSVKELLGITIMERSSFEKNPIDFLEAKGYKEVKKDLIIKLPKYSLFELENGRKRMLASAGELQKGNELALPSKYVNFLYLASHYEKLKGSPEDNEQKQLFVEQHKHYLDEIIEQISEFSKRVILADANLDKVLSAYNKHRDKPIREQAENIIHLFTLTNLGAPAAFKYFDTTIDRKRYTSTKEVLDATLIHQSITGLYETRIDLSQLGGDGGGGGGSGGGGSGGTLNIEDEYRLHETSKEPDVSLGSTWLSDFPQAWAETGGMGLAVRQAPLIIPLKATSTPVSIKQYPMSQEARLGIKPHIQRLLDQGILVPCQSPWNTPLLPVKKPGTNDYRPVQDLREVNKRVEDIHPTVPNPYNLLSGLPPSHQWYTVLDLKDAFFCLRLHPTSQPLFAFEWRDPEMGISGQLTWTRLPQGFKNSPTLFNEALHRDLADFRIQHPDLILLQYVDDLLLAATSELDCQQGTRALLQTLGNLGYRASAKKAQICQKQVKYLGYLLKEGQRWLTEARKETVMGQPTPKTPRQLREFLGKAGFCRLFIPGFAEMAAPLYPLTKPGTLFNWGPDQQKAYQEIKQALLTAPALGLPDLTKPFELFVDEKQGYAKGVLTQKLGPWRRPVAYLSKKLDPVAAGWPPCLRMVAAIAVLTKDAGKLTMGQPLVILAPHAVEALVKQPPDRWLSNARMTHYQALLLDTDRVQFGPVVALNPATLLPLPEEGLQHNCLDILAEAHGTRPDLTDQPLPDADHTWYTDGSSLLQEGQRKAGAAVTTETEVIWAKALPAGTSAQRAELIALTQALKMAEGKKLNVYTDSRYAFATAHIHGEIYRRRGWLTSEGKEIKNKDEILALLKALFLPKRLSIIHCPGHQKGHSAEARGNRMADQAARKAAITETPDTSTLLIENSSPSGGSKRTADGSEFEAGKRTADGSEFEKRTADGSEFESPKKKAKVE

SEQ ID NO: 2640 - protein, 2116 aa, synthetic construct
MPAAKRVKLDGGDKKYSIGLDIGTNSVGWAVITDEYKVPSKKFKVLGNTDRHSIKKNLIGALLFDSGETAEATRLKRTARRRYTRRKNRICYLQEIFSNEMAKVDDSFFHRLEESFLVEEDKKHERHPIFGNIVDEVAYHEKYPTIYHLRKKLVDSTDKADLRLIYLALAHMIKFRGHFLIEGDLNPDNSDVDKLFIQLVQTYNQLFEENPINASGVDAKAILSARLSKSRRLENLIAQLPGEKKNGLFGNLIALSLGLTPNFKSNFDLAEDAKLQLSKDTYDDDLDNLLAQIGDQYADLFLAAKNLSDAILLSDILRVNTEITKAPLSASMIKRYDEHHQDLTLLKALVRQQLPEKYKEIFFDQSKNGYAGYIDGGASQEEFYKFIKPILEKMDGTEELLVKLNREDLLRKQRTFDNGSIPHQIHLGELHAILRRQEDFYPFLKDNREKIEKILTFRIPYYVGPLARGNSRFAWMTRKSEETITPWNFEEVVDKGASAQSFIERMTNFDKNLPNEKVLPKHSLLYEYFTVYNELTKVKYVTEGMRKPAFLSGEQKKAIVDLLFKTNRKVTVKQLKEDYFKKIECFDSVEISGVEDRFNASLGTYHDLLKIIKDKDFLDNEENEDILEDIVLTLTLFEDREMIEERLKTYAHLFDDKVMKQLKRRRYTGWGRLSRKLINGIRDKQSGKTILDFLKSDGFANRNFMQLIHDDSLTFKEDIQKAQVSGQGDSLHEHIANLAGSPAIKKGILQTVKVVDELVKVMGRHKPENIVIEMARENQTTQKGQKNSRERMKRIEEGIKELGSQILKEHPVENTQLQNEKLYLYYLQNGRDMYVDQELDINRLSDYDVDHIVPQSFLKDDSIDNKVLTRSDKARGKSDNVPSEEVVKKMKNYWRQLLNAKLITQRKFDNLTKAERGGLSELDKAGFIKRQLVETRQITKHVAQILDSRMNTKYDENDKLIREVKVITLKSKLVSDFRKDFQFYKVREINNYHHAHDAYLNAVVGTALIKKYPKLESEFVYGDYKVYDVRKMIAKSEQEIGKATAKYFFYSNIMNFFKTEITLANGEIRKRPLIETNGETGEIVWDKGRDFATVRKVLSMPQVNIVKKTEVQTGGFSKESILPKRNSDKLIARKKDWDPKKYGGFDSPTVAYSVLVVAKVEKGKSKKLKSVKELLGITIMERSSFEKNPIDFLEAKGYKEVKKDLIIKLPKYSLFELENGRKRMLASAGELQKGNELALPSKYVNFLYLASHYEKLKGSPEDNEQKQLFVEQHKHYLDEIIEQISEFSKRVILADANLDKVLSAYNKHRDKPIREQAENIIHLFTLTNLGAPAAFKYFDTTIDRKRYTSTKEVLDATLIHQSITGLYETRIDLSQLGGDGGPAPGGSEAAAKGGTLNIEDEYRLHETSKEPDVSLGSTWLSDFPQAWAETGGMGLAVRQAPLIIPLKATSTPVSIKQYPMSQEARLGIKPHIQRLLDQGILVPCQSPWNTPLLPVKKPGTNDYRPVQDLREVNKRVEDIHPTVPNPYNLLSGLPPSHQWYTVLDLKDAFFCLRLHPTSQPLFAFEWRDPEMGISGQLTWTRLPQGFKNSPTLFNEALHRDLADFRIQHPDLILLQYVDDLLLAATSELDCQQGTRALLQTLGNLGYRASAKKAQICQKQVKYLGYLLKEGQRWLTEARKETVMGQPTPKTPRQLREFLGKAGFCRLFIPGFAEMAAPLYPLTKPGTLFNWGPDQQKAYQEIKQALLTAPALGLPDLTKPFELFVDEKQGYAKGVLTQKLGPWRRPVAYLSKKLDPVAAGWPPCLRMVAAIAVLTKDAGKLTMGQPLVILAPHAVEALVKQPPDRWLSNARMTHYQALLLDTDRVQFGPVVALNPATLLPLPEEGLQHNCLDILAEAHGTRPDLTDQPLPDADHTWYTDGSSLLQEGQRKAGAAVTTETEVIWAKALPAGTSAQRAELIALTQALKMAEGKKLNVYTDSRYAFATAHIHGEIYRRRGWLTSEGKEIKNKDEILALLKALFLPKRLSIIHCPGHQKGHSAEARGNRMADQAARKAAITETPDTSTLLIENSSPSGGSKRTADGSEFEAGKRTADGSEFEKRTADGSEFESPKKKAKVE

SEQ ID NO: 2641 - protein, 2116 aa, synthetic construct
MPAAKRVKLDGGDKKYSIGLDIGTNSVGWAVITDEYKVPSKKFKVLGNTDRHSIKKNLIGALLFDSGETAEATRLKRTARRRYTRRKNRICYLQEIFSNEMAKVDDSFFHRLEESFLVEEDKKHERHPIFGNIVDEVAYHEKYPTIYHLRKKLVDSTDKADLRLIYLALAHMIKFRGHFLIEGDLNPDNSDVDKLFIQLVQTYNQLFEENPINASGVDAKAILSARLSKSRRLENLIAQLPGEKKNGLFGNLIALSLGLTPNFKSNFDLAEDAKLQLSKDTYDDDLDNLLAQIGDQYADLFLAAKNLSDAILLSDILRVNTEITKAPLSASMIKRYDEHHQDLTLLKALVRQQLPEKYKEIFFDQSKNGYAGYIDGGASQEEFYKFIKPILEKMDGTEELLVKLNREDLLRKQRTFDNGSIPHQIHLGELHAILRRQEDFYPFLKDNREKIEKILTFRIPYYVGPLARGNSRFAWMTRKSEETITPWNFEEVVDKGASAQSFIERMTNFDKNLPNEKVLPKHSLLYEYFTVYNELTKVKYVTEGMRKPAFLSGEQKKAIVDLLFKTNRKVTVKQLKEDYFKKIECFDSVEISGVEDRFNASLGTYHDLLKIIKDKDFLDNEENEDILEDIVLTLTLFEDREMIEERLKTYAHLFDDKVMKQLKRRRYTGWGRLSRKLINGIRDKQSGKTILDFLKSDGFANRNFMQLIHDDSLTFKEDIQKAQVSGQGDSLHEHIANLAGSPAIKKGILQTVKVVDELVKVMGRHKPENIVIEMARENQTTQKGQKNSRERMKRIEEGIKELGSQILKEHPVENTQLQNEKLYLYYLQNGRDMYVDQELDINRLSDYDVDHIVPQSFLKDDSIDNKVLTRSDKARGKSDNVPSEEVVKKMKNYWRQLLNAKLITQRKFDNLTKAERGGLSELDKAGFIKRQLVETRQITKHVAQILDSRMNTKYDENDKLIREVKVITLKSKLVSDFRKDFQFYKVREINNYHHAHDAYLNAVVGTALIKKYPKLESEFVYGDYKVYDVRKMIAKSEQEIGKATAKYFFYSNIMNFFKTEITLANGEIRKRPLIETNGETGEIVWDKGRDFATVRKVLSMPQVNIVKKTEVQTGGFSKESILPKRNSDKLIARKKDWDPKKYGGFDSPTVAYSVLVVAKVEKGKSKKLKSVKELLGITIMERSSFEKNPIDFLEAKGYKEVKKDLIIKLPKYSLFELENGRKRMLASAGELQKGNELALPSKYVNFLYLASHYEKLKGSPEDNEQKQLFVEQHKHYLDEIIEQISEFSKRVILADANLDKVLSAYNKHRDKPIREQAENIIHLFTLTNLGAPAAFKYFDTTIDRKRYTSTKEVLDATLIHQSITGLYETRIDLSQLGGDGGGSSEAAAKPAPGGTLNIEDEYRLHETSKEPDVSLGSTWLSDFPQAWAETGGMGLAVRQAPLIIPLKATSTPVSIKQYPMSQEARLGIKPHIQRLLDQGILVPCQSPWNTPLLPVKKPGTNDYRPVQDLREVNKRVEDIHPTVPNPYNLLSGLPPSHQWYTVLDLKDAFFCLRLHPTSQPLFAFEWRDPEMGISGQLTWTRLPQGFKNSPTLFNEALHRDLADFRIQHPDLILLQYVDDLLLAATSELDCQQGTRALLQTLGNLGYRASAKKAQICQKQVKYLGYLLKEGQRWLTEARKETVMGQPTPKTPRQLREFLGKAGFCRLFIPGFAEMAAPLYPLTKPGTLFNWGPDQQKAYQEIKQALLTAPALGLPDLTKPFELFVDEKQGYAKGVLTQKLGPWRRPVAYLSKKLDPVAAGWPPCLRMVAAIAVLTKDAGKLTMGQPLVILAPHAVEALVKQPPDRWLSNARMTHYQALLLDTDRVQFGPVVALNPATLLPLPEEGLQHNCLDILAEAHGTRPDLTDQPLPDADHTWYTDGSSLLQEGQRKAGAAVTTETEVIWAKALPAGTSAQRAELIALTQALKMAEGKKLNVYTDSRYAFATAHIHGEIYRRRGWLTSEGKEIKNKDEILALLKALFLPKRLSIIHCPGHQKGHSAEARGNRMADQAARKAAITETPDTSTLLIENSSPSGGSKRTADGSEFEAGKRTADGSEFEKRTADGSEFESPKKKAKVE

SEQ ID NO: 2642 - protein, 2111 aa, synthetic construct
MPAAKRVKLDGGDKKYSIGLDIGTNSVGWAVITDEYKVPSKKFKVLGNTDRHSIKKNLIGALLFDSGETAEATRLKRTARRRYTRRKNRICYLQEIFSNEMAKVDDSFFHRLEESFLVEEDKKHERHPIFGNIVDEVAYHEKYPTIYHLRKKLVDSTDKADLRLIYLALAHMIKFRGHFLIEGDLNPDNSDVDKLFIQLVQTYNQLFEENPINASGVDAKAILSARLSKSRRLENLIAQLPGEKKNGLFGNLIALSLGLTPNFKSNFDLAEDAKLQLSKDTYDDDLDNLLAQIGDQYADLFLAAKNLSDAILLSDILRVNTEITKAPLSASMIKRYDEHHQDLTLLKALVRQQLPEKYKEIFFDQSKNGYAGYIDGGASQEEFYKFIKPILEKMDGTEELLVKLNREDLLRKQRTFDNGSIPHQIHLGELHAILRRQEDFYPFLKDNREKIEKILTFRIPYYVGPLARGNSRFAWMTRKSEETITPWNFEEVVDKGASAQSFIERMTNFDKNLPNEKVLPKHSLLYEYFTVYNELTKVKYVTEGMRKPAFLSGEQKKAIVDLLFKTNRKVTVKQLKEDYFKKIECFDSVEISGVEDRFNASLGTYHDLLKIIKDKDFLDNEENEDILEDIVLTLTLFEDREMIEERLKTYAHLFDDKVMKQLKRRRYTGWGRLSRKLINGIRDKQSGKTILDFLKSDGFANRNFMQLIHDDSLTFKEDIQKAQVSGQGDSLHEHIANLAGSPAIKKGILQTVKVVDELVKVMGRHKPENIVIEMARENQTTQKGQKNSRERMKRIEEGIKELGSQILKEHPVENTQLQNEKLYLYYLQNGRDMYVDQELDINRLSDYDVDHIVPQSFLKDDSIDNKVLTRSDKARGKSDNVPSEEVVKKMKNYWRQLLNAKLITQRKFDNLTKAERGGLSELDKAGFIKRQLVETRQITKHVAQILDSRMNTKYDENDKLIREVKVITLKSKLVSDFRKDFQFYKVREINNYHHAHDAYLNAVVGTALIKKYPKLESEFVYGDYKVYDVRKMIAKSEQEIGKATAKYFFYSNIMNFFKTEITLANGEIRKRPLIETNGETGEIVWDKGRDFATVRKVLSMPQVNIVKKTEVQTGGFSKESILPKRNSDKLIARKKDWDPKKYGGFDSPTVAYSVLVVAKVEKGKSKKLKSVKELLGITIMERSSFEKNPIDFLEAKGYKEVKKDLIIKLPKYSLFELENGRKRMLASAGELQKGNELALPSKYVNFLYLASHYEKLKGSPEDNEQKQLFVEQHKHYLDEIIEQISEFSKRVILADANLDKVLSAYNKHRDKPIREQAENIIHLFTLTNLGAPAAFKYFDTTIDRKRYTSTKEVLDATLIHQSITGLYETRIDLSQLGGDGGGGGGGGGGTLNIEDEYRLHETSKEPDVSLGSTWLSDFPQAWAETGGMGLAVRQAPLIIPLKATSTPVSIKQYPMSQEARLGIKPHIQRLLDQGILVPCQSPWNTPLLPVKKPGTNDYRPVQDLREVNKRVEDIHPTVPNPYNLLSGLPPSHQWYTVLDLKDAFFCLRLHPTSQPLFAFEWRDPEMGISGQLTWTRLPQGFKNSPTLFNEALHRDLADFRIQHPDLILLQYVDDLLLAATSELDCQQGTRALLQTLGNLGYRASAKKAQICQKQVKYLGYLLKEGQRWLTEARKETVMGQPTPKTPRQLREFLGKAGFCRLFIPGFAEMAAPLYPLTKPGTLFNWGPDQQKAYQEIKQALLTAPALGLPDLTKPFELFVDEKQGYAKGVLTQKLGPWRRPVAYLSKKLDPVAAGWPPCLRMVAAIAVLTKDAGKLTMGQPLVILAPHAVEALVKQPPDRWLSNARMTHYQALLLDTDRVQFGPVVALNPATLLPLPEEGLQHNCLDILAEAHGTRPDLTDQPLPDADHTWYTDGSSLLQEGQRKAGAAVTTETEVIWAKALPAGTSAQRAELIALTQALKMAEGKKLNVYTDSRYAFATAHIHGEIYRRRGWLTSEGKEIKNKDEILALLKALFLPKRLSIIHCPGHQKGHSAEARGNRMADQAARKAAITETPDTSTLLIENSSPSGGSKRTADGSEFEAGKRTADGSEFEKRTADGSEFESPKKKAKVE

SEQ ID NO: 2643 - protein, 2111 aa, synthetic construct
MPAAKRVKLDGGDKKYSIGLDIGTNSVGWAVITDEYKVPSKKFKVLGNTDRHSIKKNLIGALLFDSGETAEATRLKRTARRRYTRRKNRICYLQEIFSNEMAKVDDSFFHRLEESFLVEEDKKHERHPIFGNIVDEVAYHEKYPTIYHLRKKLVDSTDKADLRLIYLALAHMIKFRGHFLIEGDLNPDNSDVDKLFIQLVQTYNQLFEENPINASGVDAKAILSARLSKSRRLENLIAQLPGEKKNGLFGNLIALSLGLTPNFKSNFDLAEDAKLQLSKDTYDDDLDNLLAQIGDQYADLFLAAKNLSDAILLSDILRVNTEITKAPLSASMIKRYDEHHQDLTLLKALVRQQLPEKYKEIFFDQSKNGYAGYIDGGASQEEFYKFIKPILEKMDGTEELLVKLNREDLLRKQRTFDNGSIPHQIHLGELHAILRRQEDFYPFLKDNREKIEKILTFRIPYYVGPLARGNSRFAWMTRKSEETITPWNFEEVVDKGASAQSFIERMTNFDKNLPNEKVLPKHSLLYEYFTVYNELTKVKYVTEGMRKPAFLSGEQKKAIVDLLFKTNRKVTVKQLKEDYFKKIECFDSVEISGVEDRFNASLGTYHDLLKIIKDKDFLDNEENEDILEDIVLTLTLFEDREMIEERLKTYAHLFDDKVMKQLKRRRYTGWGRLSRKLINGIRDKQSGKTILDFLKSDGFANRNFMQLIHDDSLTFKEDIQKAQVSGQGDSLHEHIANLAGSPAIKKGILQTVKVVDELVKVMGRHKPENIVIEMARENQTTQKGQKNSRERMKRIEEGIKELGSQILKEHPVENTQLQNEKLYLYYLQNGRDMYVDQELDINRLSDYDVDHIVPQSFLKDDSIDNKVLTRSDKARGKSDNVPSEEVVKKMKNYWRQLLNAKLITQRKFDNLTKAERGGLSELDKAGFIKRQLVETRQITKHVAQILDSRMNTKYDENDKLIREVKVITLKSKLVSDFRKDFQFYKVREINNYHHAHDAYLNAVVGTALIKKYPKLESEFVYGDYKVYDVRKMIAKSEQEIGKATAKYFFYSNIMNFFKTEITLANGEIRKRPLIETNGETGEIVWDKGRDFATVRKVLSMPQVNIVKKTEVQTGGFSKESILPKRNSDKLIARKKDWDPKKYGGFDSPTVAYSVLVVAKVEKGKSKKLKSVKELLGITIMERSSFEKNPIDFLEAKGYKEVKKDLIIKLPKYSLFELENGRKRMLASAGELQKGNELALPSKYVNFLYLASHYEKLKGSPEDNEQKQLFVEQHKHYLDEIIEQISEFSKRVILADANLDKVLSAYNKHRDKPIREQAENIIHLFTLTNLGAPAAFKYFDTTIDRKRYTSTKEVLDATLIHQSITGLYETRIDLSQLGGDGGPAPGGSGGTLNIEDEYRLHETSKEPDVSLGSTWLSDFPQAWAETGGMGLAVRQAPLIIPLKATSTPVSIKQYPMSQEARLGIKPHIQRLLDQGILVPCQSPWNTPLLPVKKPGTNDYRPVQDLREVNKRVEDIHPTVPNPYNLLSGLPPSHQWYTVLDLKDAFFCLRLHPTSQPLFAFEWRDPEMGISGQLTWTRLPQGFKNSPTLFNEALHRDLADFRIQHPDLILLQYVDDLLLAATSELDCQQGTRALLQTLGNLGYRASAKKAQICQKQVKYLGYLLKEGQRWLTEARKETVMGQPTPKTPRQLREFLGKAGFCRLFIPGFAEMAAPLYPLTKPGTLFNWGPDQQKAYQEIKQALLTAPALGLPDLTKPFELFVDEKQGYAKGVLTQKLGPWRRPVAYLSKKLDPVAAGWPPCLRMVAAIAVLTKDAGKLTMGQPLVILAPHAVEALVKQPPDRWLSNARMTHYQALLLDTDRVQFGPVVALNPATLLPLPEEGLQHNCLDILAEAHGTRPDLTDQPLPDADHTWYTDGSSLLQEGQRKAGAAVTTETEVIWAKALPAGTSAQRAELIALTQALKMAEGKKLNVYTDSRYAFATAHIHGEIYRRRGWLTSEGKEIKNKDEILALLKALFLPKRLSIIHCPGHQKGHSAEARGNRMADQAARKAAITETPDTSTLLIENSSPSGGSKRTADGSEFEAGKRTADGSEFEKRTADGSEFESPKKKAKVE

SEQ ID NO: 2644 - protein, 2135 aa, synthetic construct
MPAAKRVKLDGGDKKYSIGLDIGTNSVGWAVITDEYKVPSKKFKVLGNTDRHSIKKNLIGALLFDSGETAEATRLKRTARRRYTRRKNRICYLQEIFSNEMAKVDDSFFHRLEESFLVEEDKKHERHPIFGNIVDEVAYHEKYPTIYHLRKKLVDSTDKADLRLIYLALAHMIKFRGHFLIEGDLNPDNSDVDKLFIQLVQTYNQLFEENPINASGVDAKAILSARLSKSRRLENLIAQLPGEKKNGLFGNLIALSLGLTPNFKSNFDLAEDAKLQLSKDTYDDDLDNLLAQIGDQYADLFLAAKNLSDAILLSDILRVNTEITKAPLSASMIKRYDEHHQDLTLLKALVRQQLPEKYKEIFFDQSKNGYAGYIDGGASQEEFYKFIKPILEKMDGTEELLVKLNREDLLRKQRTFDNGSIPHQIHLGELHAILRRQEDFYPFLKDNREKIEKILTFRIPYYVGPLARGNSRFAWMTRKSEETITPWNFEEVVDKGASAQSFIERMTNFDKNLPNEKVLPKHSLLYEYFTVYNELTKVKYVTEGMRKPAFLSGEQKKAIVDLLFKTNRKVTVKQLKEDYFKKIECFDSVEISGVEDRFNASLGTYHDLLKIIKDKDFLDNEENEDILEDIVLTLTLFEDREMIEERLKTYAHLFDDKVMKQLKRRRYTGWGRLSRKLINGIRDKQSGKTILDFLKSDGFANRNFMQLIHDDSLTFKEDIQKAQVSGQGDSLHEHIANLAGSPAIKKGILQTVKVVDELVKVMGRHKPENIVIEMARENQTTQKGQKNSRERMKRIEEGIKELGSQILKEHPVENTQLQNEKLYLYYLQNGRDMYVDQELDINRLSDYDVDHIVPQSFLKDDSIDNKVLTRSDKARGKSDNVPSEEVVKKMKNYWRQLLNAKLITQRKFDNLTKAERGGLSELDKAGFIKRQLVETRQITKHVAQILDSRMNTKYDENDKLIREVKVITLKSKLVSDFRKDFQFYKVREINNYHHAHDAYLNAVVGTALIKKYPKLESEFVYGDYKVYDVRKMIAKSEQEIGKATAKYFFYSNIMNFFKTEITLANGEIRKRPLIETNGETGEIVWDKGRDFATVRKVLSMPQVNIVKKTEVQTGGFSKESILPKRNSDKLIARKKDWDPKKYGGFDSPTVAYSVLVVAKVEKGKSKKLKSVKELLGITIMERSSFEKNPIDFLEAKGYKEVKKDLIIKLPKYSLFELENGRKRMLASAGELQKGNELALPSKYVNFLYLASHYEKLKGSPEDNEQKQLFVEQHKHYLDEIIEQISEFSKRVILADANLDKVLSAYNKHRDKPIREQAENIIHLFTLTNLGAPAAFKYFDTTIDRKRYTSTKEVLDATLIHQSITGLYETRIDLSQLGGDGGGGGGSGGGGSGGGGSGGGGSGGGGSGGGGSGGTLNIEDEYRLHETSKEPDVSLGSTWLSDFPQAWAETGGMGLAVRQAPLIIPLKATSTPVSIKQYPMSQEARLGIKPHIQRLLDQGILVPCQSPWNTPLLPVKKPGTNDYRPVQDLREVNKRVEDIHPTVPNPYNLLSGLPPSHQWYTVLDLKDAFFCLRLHPTSQPLFAFEWRDPEMGISGQLTWTRLPQGFKNSPTLFNEALHRDLADFRIQHPDLILLQYVDDLLLAATSELDCQQGTRALLQTLGNLGYRASAKKAQICQKQVKYLGYLLKEGQRWLTEARKETVMGQPTPKTPRQLREFLGKAGFCRLFIPGFAEMAAPLYPLTKPGTLFNWGPDQQKAYQEIKQALLTAPALGLPDLTKPFELFVDEKQGYAKGVLTQKLGPWRRPVAYLSKKLDPVAAGWPPCLRMVAAIAVLTKDAGKLTMGQPLVILAPHAVEALVKQPPDRWLSNARMTHYQALLLDTDRVQFGPVVALNPATLLPLPEEGLQHNCLDILAEAHGTRPDLTDQPLPDADHTWYTDGSSLLQEGQRKAGAAVTTETEVIWAKALPAGTSAQRAELIALTQALKMAEGKKLNVYTDSRYAFATAHIHGEIYRRRGWLTSEGKEIKNKDEILALLKALFLPKRLSIIHCPGHQKGHSAEARGNRMADQAARKAAITETPDTSTLLIENSSPSGGSKRTADGSEFEAGKRTADGSEFEKRTADGSEFESPKKKAKVE

SEQ ID NO: 2645 - protein, 2116 aa, synthetic construct
MPAAKRVKLDGGDKKYSIGLDIGTNSVGWAVITDEYKVPSKKFKVLGNTDRHSIKKNLIGALLFDSGETAEATRLKRTARRRYTRRKNRICYLQEIFSNEMAKVDDSFFHRLEESFLVEEDKKHERHPIFGNIVDEVAYHEKYPTIYHLRKKLVDSTDKADLRLIYLALAHMIKFRGHFLIEGDLNPDNSDVDKLFIQLVQTYNQLFEENPINASGVDAKAILSARLSKSRRLENLIAQLPGEKKNGLFGNLIALSLGLTPNFKSNFDLAEDAKLQLSKDTYDDDLDNLLAQIGDQYADLFLAAKNLSDAILLSDILRVNTEITKAPLSASMIKRYDEHHQDLTLLKALVRQQLPEKYKEIFFDQSKNGYAGYIDGGASQEEFYKFIKPILEKMDGTEELLVKLNREDLLRKQRTFDNGSIPHQIHLGELHAILRRQEDFYPFLKDNREKIEKILTFRIPYYVGPLARGNSRFAWMTRKSEETITPWNFEEVVDKGASAQSFIERMTNFDKNLPNEKVLPKHSLLYEYFTVYNELTKVKYVTEGMRKPAFLSGEQKKAIVDLLFKTNRKVTVKQLKEDYFKKIECFDSVEISGVEDRFNASLGTYHDLLKIIKDKDFLDNEENEDILEDIVLTLTLFEDREMIEERLKTYAHLFDDKVMKQLKRRRYTGWGRLSRKLINGIRDKQSGKTILDFLKSDGFANRNFMQLIHDDSLTFKEDIQKAQVSGQGDSLHEHIANLAGSPAIKKGILQTVKVVDELVKVMGRHKPENIVIEMARENQTTQKGQKNSRERMKRIEEGIKELGSQILKEHPVENTQLQNEKLYLYYLQNGRDMYVDQELDINRLSDYDVDHIVPQSFLKDDSIDNKVLTRSDKARGKSDNVPSEEVVKKMKNYWRQLLNAKLITQRKFDNLTKAERGGLSELDKAGFIKRQLVETRQITKHVAQILDSRMNTKYDENDKLIREVKVITLKSKLVSDFRKDFQFYKVREINNYHHAHDAYLNAVVGTALIKKYPKLESEFVYGDYKVYDVRKMIAKSEQEIGKATAKYFFYSNIMNFFKTEITLANGEIRKRPLIETNGETGEIVWDKGRDFATVRKVLSMPQVNIVKKTEVQTGGFSKESILPKRNSDKLIARKKDWDPKKYGGFDSPTVAYSVLVVAKVEKGKSKKLKSVKELLGITIMERSSFEKNPIDFLEAKGYKEVKKDLIIKLPKYSLFELENGRKRMLASAGELQKGNELALPSKYVNFLYLASHYEKLKGSPEDNEQKQLFVEQHKHYLDEIIEQISEFSKRVILADANLDKVLSAYNKHRDKPIREQAENIIHLFTLTNLGAPAAFKYFDTTIDRKRYTSTKEVLDATLIHQSITGLYETRIDLSQLGGDGGPAPEAAAKGSSGGTLNIEDEYRLHETSKEPDVSLGSTWLSDFPQAWAETGGMGLAVRQAPLIIPLKATSTPVSIKQYPMSQEARLGIKPHIQRLLDQGILVPCQSPWNTPLLPVKKPGTNDYRPVQDLREVNKRVEDIHPTVPNPYNLLSGLPPSHQWYTVLDLKDAFFCLRLHPTSQPLFAFEWRDPEMGISGQLTWTRLPQGFKNSPTLFNEALHRDLADFRIQHPDLILLQYVDDLLLAATSELDCQQGTRALLQTLGNLGYRASAKKAQICQKQVKYLGYLLKEGQRWLTEARKETVMGQPTPKTPRQLREFLGKAGFCRLFIPGFAEMAAPLYPLTKPGTLFNWGPDQQKAYQEIKQALLTAPALGLPDLTKPFELFVDEKQGYAKGVLTQKLGPWRRPVAYLSKKLDPVAAGWPPCLRMVAAIAVLTKDAGKLTMGQPLVILAPHAVEALVKQPPDRWLSNARMTHYQALLLDTDRVQFGPVVALNPATLLPLPEEGLQHNCLDILAEAHGTRPDLTDQPLPDADHTWYTDGSSLLQEGQRKAGAAVTTETEVIWAKALPAGTSAQRAELIALTQALKMAEGKKLNVYTDSRYAFATAHIHGEIYRRRGWLTSEGKEIKNKDEILALLKALFLPKRLSIIHCPGHQKGHSAEARGNRMADQAARKAAITETPDTSTLLIENSSPSGGSKRTADGSEFEAGKRTADGSEFEKRTADGSEFESPKKKAKVE

SEQ ID NO: 2646 - protein, 2108 aa, synthetic construct
MPAAKRVKLDGGDKKYSIGLDIGTNSVGWAVITDEYKVPSKKFKVLGNTDRHSIKKNLIGALLFDSGETAEATRLKRTARRRYTRRKNRICYLQEIFSNEMAKVDDSFFHRLEESFLVEEDKKHERHPIFGNIVDEVAYHEKYPTIYHLRKKLVDSTDKADLRLIYLALAHMIKFRGHFLIEGDLNPDNSDVDKLFIQLVQTYNQLFEENPINASGVDAKAILSARLSKSRRLENLIAQLPGEKKNGLFGNLIALSLGLTPNFKSNFDLAEDAKLQLSKDTYDDDLDNLLAQIGDQYADLFLAAKNLSDAILLSDILRVNTEITKAPLSASMIKRYDEHHQDLTLLKALVRQQLPEKYKEIFFDQSKNGYAGYIDGGASQEEFYKFIKPILEKMDGTEELLVKLNREDLLRKQRTFDNGSIPHQIHLGELHAILRRQEDFYPFLKDNREKIEKILTFRIPYYVGPLARGNSRFAWMTRKSEETITPWNFEEVVDKGASAQSFIERMTNFDKNLPNEKVLPKHSLLYEYFTVYNELTKVKYVTEGMRKPAFLSGEQKKAIVDLLFKTNRKVTVKQLKEDYFKKIECFDSVEISGVEDRFNASLGTYHDLLKIIKDKDFLDNEENEDILEDIVLTLTLFEDREMIEERLKTYAHLFDDKVMKQLKRRRYTGWGRLSRKLINGIRDKQSGKTILDFLKSDGFANRNFMQLIHDDSLTFKEDIQKAQVSGQGDSLHEHIANLAGSPAIKKGILQTVKVVDELVKVMGRHKPENIVIEMARENQTTQKGQKNSRERMKRIEEGIKELGSQILKEHPVENTQLQNEKLYLYYLQNGRDMYVDQELDINRLSDYDVDHIVPQSFLKDDSIDNKVLTRSDKARGKSDNVPSEEVVKKMKNYWRQLLNAKLITQRKFDNLTKAERGGLSELDKAGFIKRQLVETRQITKHVAQILDSRMNTKYDENDKLIREVKVITLKSKLVSDFRKDFQFYKVREINNYHHAHDAYLNAVVGTALIKKYPKLESEFVYGDYKVYDVRKMIAKSEQEIGKATAKYFFYSNIMNFFKTEITLANGEIRKRPLIETNGETGEIVWDKGRDFATVRKVLSMPQVNIVKKTEVQTGGFSKESILPKRNSDKLIARKKDWDPKKYGGFDSPTVAYSVLVVAKVEKGKSKKLKSVKELLGITIMERSSFEKNPIDFLEAKGYKEVKKDLIIKLPKYSLFELENGRKRMLASAGELQKGNELALPSKYVNFLYLASHYEKLKGSPEDNEQKQLFVEQHKHYLDEIIEQISEFSKRVILADANLDKVLSAYNKHRDKPIREQAENIIHLFTLTNLGAPAAFKYFDTTIDRKRYTSTKEVLDATLIHQSITGLYETRIDLSQLGGDGGGGGGGTLNIEDEYRLHETSKEPDVSLGSTWLSDFPQAWAETGGMGLAVRQAPLIIPLKATSTPVSIKQYPMSQEARLGIKPHIQRLLDQGILVPCQSPWNTPLLPVKKPGTNDYRPVQDLREVNKRVEDIHPTVPNPYNLLSGLPPSHQWYTVLDLKDAFFCLRLHPTSQPLFAFEWRDPEMGISGQLTWTRLPQGFKNSPTLFNEALHRDLADFRIQHPDLILLQYVDDLLLAATSELDCQQGTRALLQTLGNLGYRASAKKAQICQKQVKYLGYLLKEGQRWLTEARKETVMGQPTPKTPRQLREFLGKAGFCRLFIPGFAEMAAPLYPLTKPGTLFNWGPDQQKAYQEIKQALLTAPALGLPDLTKPFELFVDEKQGYAKGVLTQKLGPWRRPVAYLSKKLDPVAAGWPPCLRMVAAIAVLTKDAGKLTMGQPLVILAPHAVEALVKQPPDRWLSNARMTHYQALLLDTDRVQFGPVVALNPATLLPLPEEGLQHNCLDILAEAHGTRPDLTDQPLPDADHTWYTDGSSLLQEGQRKAGAAVTTETEVIWAKALPAGTSAQRAELIALTQALKMAEGKKLNVYTDSRYAFATAHIHGEIYRRRGWLTSEGKEIKNKDEILALLKALFLPKRLSIIHCPGHQKGHSAEARGNRMADQAARKAAITETPDTSTLLIENSSPSGGSKRTADGSEFEAGKRTADGSEFEKRTADGSEFESPKKKAKVE

SEQ ID NO: 2647 - protein, 2115 aa, synthetic construct
MPAAKRVKLDGGDKKYSIGLDIGTNSVGWAVITDEYKVPSKKFKVLGNTDRHSIKKNLIGALLFDSGETAEATRLKRTARRRYTRRKNRICYLQEIFSNEMAKVDDSFFHRLEESFLVEEDKKHERHPIFGNIVDEVAYHEKYPTIYHLRKKLVDSTDKADLRLIYLALAHMIKFRGHFLIEGDLNPDNSDVDKLFIQLVQTYNQLFEENPINASGVDAKAILSARLSKSRRLENLIAQLPGEKKNGLFGNLIALSLGLTPNFKSNFDLAEDAKLQLSKDTYDDDLDNLLAQIGDQYADLFLAAKNLSDAILLSDILRVNTEITKAPLSASMIKRYDEHHQDLTLLKALVRQQLPEKYKEIFFDQSKNGYAGYIDGGASQEEFYKFIKPILEKMDGTEELLVKLNREDLLRKQRTFDNGSIPHQIHLGELHAILRRQEDFYPFLKDNREKIEKILTFRIPYYVGPLARGNSRFAWMTRKSEETITPWNFEEVVDKGASAQSFIERMTNFDKNLPNEKVLPKHSLLYEYFTVYNELTKVKYVTEGMRKPAFLSGEQKKAIVDLLFKTNRKVTVKQLKEDYFKKIECFDSVEISGVEDRFNASLGTYHDLLKIIKDKDFLDNEENEDILEDIVLTLTLFEDREMIEERLKTYAHLFDDKVMKQLKRRRYTGWGRLSRKLINGIRDKQSGKTILDFLKSDGFANRNFMQLIHDDSLTFKEDIQKAQVSGQGDSLHEHIANLAGSPAIKKGILQTVKVVDELVKVMGRHKPENIVIEMARENQTTQKGQKNSRERMKRIEEGIKELGSQILKEHPVENTQLQNEKLYLYYLQNGRDMYVDQELDINRLSDYDVDHIVPQSFLKDDSIDNKVLTRSDKARGKSDNVPSEEVVKKMKNYWRQLLNAKLITQRKFDNLTKAERGGLSELDKAGFIKRQLVETRQITKHVAQILDSRMNTKYDENDKLIREVKVITLKSKLVSDFRKDFQFYKVREINNYHHAHDAYLNAVVGTALIKKYPKLESEFVYGDYKVYDVRKMIAKSEQEIGKATAKYFFYSNIMNFFKTEITLANGEIRKRPLIETNGETGEIVWDKGRDFATVRKVLSMPQVNIVKKTEVQTGGFSKESILPKRNSDKLIARKKDWDPKKYGGFDSPTVAYSVLVVAKVEKGKSKKLKSVKELLGITIMERSSFEKNPIDFLEAKGYKEVKKDLIIKLPKYSLFELENGRKRMLASAGELQKGNELALPSKYVNFLYLASHYEKLKGSPEDNEQKQLFVEQHKHYLDEIIEQISEFSKRVILADANLDKVLSAYNKHRDKPIREQAENIIHLFTLTNLGAPAAFKYFDTTIDRKRYTSTKEVLDATLIHQSITGLYETRIDLSQLGGDGGEAAAKEAAAKGGTLNIEDEYRLHETSKEPDVSLGSTWLSDFPQAWAETGGMGLAVRQAPLIIPLKATSTPVSIKQYPMSQEARLGIKPHIQRLLDQGILVPCQSPWNTPLLPVKKPGTNDYRPVQDLREVNKRVEDIHPTVPNPYNLLSGLPPSHQWYTVLDLKDAFFCLRLHPTSQPLFAFEWRDPEMGISGQLTWTRLPQGFKNSPTLFNEALHRDLADFRIQHPDLILLQYVDDLLLAATSELDCQQGTRALLQTLGNLGYRASAKKAQICQKQVKYLGYLLKEGQRWLTEARKETVMGQPTPKTPRQLREFLGKAGFCRLFIPGFAEMAAPLYPLTKPGTLFNWGPDQQKAYQEIKQALLTAPALGLPDLTKPFELFVDEKQGYAKGVLTQKLGPWRRPVAYLSKKLDPVAAGWPPCLRMVAAIAVLTKDAGKLTMGQPLVILAPHAVEALVKQPPDRWLSNARMTHYQALLLDTDRVQFGPVVALNPATLLPLPEEGLQHNCLDILAEAHGTRPDLTDQPLPDADHTWYTDGSSLLQEGQRKAGAAVTTETEVIWAKALPAGTSAQRAELIALTQALKMAEGKKLNVYTDSRYAFATAHIHGEIYRRRGWLTSEGKEIKNKDEILALLKALFLPKRLSIIHCPGHQKGHSAEARGNRMADQAARKAAITETPDTSTLLIENSSPSGGSKRTADGSEFEAGKRTADGSEFEKRTADGSEFESPKKKAKVE

SEQ ID NO: 2648 - protein, 2116 aa, synthetic construct
MPAAKRVKLDGGDKKYSIGLDIGTNSVGWAVITDEYKVPSKKFKVLGNTDRHSIKKNLIGALLFDSGETAEATRLKRTARRRYTRRKNRICYLQEIFSNEMAKVDDSFFHRLEESFLVEEDKKHERHPIFGNIVDEVAYHEKYPTIYHLRKKLVDSTDKADLRLIYLALAHMIKFRGHFLIEGDLNPDNSDVDKLFIQLVQTYNQLFEENPINASGVDAKAILSARLSKSRRLENLIAQLPGEKKNGLFGNLIALSLGLTPNFKSNFDLAEDAKLQLSKDTYDDDLDNLLAQIGDQYADLFLAAKNLSDAILLSDILRVNTEITKAPLSASMIKRYDEHHQDLTLLKALVRQQLPEKYKEIFFDQSKNGYAGYIDGGASQEEFYKFIKPILEKMDGTEELLVKLNREDLLRKQRTFDNGSIPHQIHLGELHAILRRQEDFYPFLKDNREKIEKILTFRIPYYVGPLARGNSRFAWMTRKSEETITPWNFEEVVDKGASAQSFIERMTNFDKNLPNEKVLPKHSLLYEYFTVYNELTKVKYVTEGMRKPAFLSGEQKKAIVDLLFKTNRKVTVKQLKEDYFKKIECFDSVEISGVEDRFNASLGTYHDLLKIIKDKDFLDNEENEDILEDIVLTLTLFEDREMIEERLKTYAHLFDDKVMKQLKRRRYTGWGRLSRKLINGIRDKQSGKTILDFLKSDGFANRNFMQLIHDDSLTFKEDIQKAQVSGQGDSLHEHIANLAGSPAIKKGILQTVKVVDELVKVMGRHKPENIVIEMARENQTTQKGQKNSRERMKRIEEGIKELGSQILKEHPVENTQLQNEKLYLYYLQNGRDMYVDQELDINRLSDYDVDHIVPQSFLKDDSIDNKVLTRSDKARGKSDNVPSEEVVKKMKNYWRQLLNAKLITQRKFDNLTKAERGGLSELDKAGFIKRQLVETRQITKHVAQILDSRMNTKYDENDKLIREVKVITLKSKLVSDFRKDFQFYKVREINNYHHAHDAYLNAVVGTALIKKYPKLESEFVYGDYKVYDVRKMIAKSEQEIGKATAKYFFYSNIMNFFKTEITLANGEIRKRPLIETNGETGEIVWDKGRDFATVRKVLSMPQVNIVKKTEVQTGGFSKESILPKRNSDKLIARKKDWDPKKYGGFDSPTVAYSVLVVAKVEKGKSKKLKSVKELLGITIMERSSFEKNPIDFLEAKGYKEVKKDLIIKLPKYSLFELENGRKRMLASAGELQKGNELALPSKYVNFLYLASHYEKLKGSPEDNEQKQLFVEQHKHYLDEIIEQISEFSKRVILADANLDKVLSAYNKHRDKPIREQAENIIHLFTLTNLGAPAAFKYFDTTIDRKRYTSTKEVLDATLIHQSITGLYETRIDLSQLGGDGGGSSPAPEAAAKGGTLNIEDEYRLHETSKEPDVSLGSTWLSDFPQAWAETGGMGLAVRQAPLIIPLKATSTPVSIKQYPMSQEARLGIKPHIQRLLDQGILVPCQSPWNTPLLPVKKPGTNDYRPVQDLREVNKRVEDIHPTVPNPYNLLSGLPPSHQWYTVLDLKDAFFCLRLHPTSQPLFAFEWRDPEMGISGQLTWTRLPQGFKNSPTLFNEALHRDLADFRIQHPDLILLQYVDDLLLAATSELDCQQGTRALLQTLGNLGYRASAKKAQICQKQVKYLGYLLKEGQRWLTEARKETVMGQPTPKTPRQLREFLGKAGFCRLFIPGFAEMAAPLYPLTKPGTLFNWGPDQQKAYQEIKQALLTAPALGLPDLTKPFELFVDEKQGYAKGVLTQKLGPWRRPVAYLSKKLDPVAAGWPPCLRMVAAIAVLTKDAGKLTMGQPLVILAPHAVEALVKQPPDRWLSNARMTHYQALLLDTDRVQFGPVVALNPATLLPLPEEGLQHNCLDILAEAHGTRPDLTDQPLPDADHTWYTDGSSLLQEGQRKAGAAVTTETEVIWAKALPAGTSAQRAELIALTQALKMAEGKKLNVYTDSRYAFATAHIHGEIYRRRGWLTSEGKEIKNKDEILALLKALFLPKRLSIIHCPGHQKGHSAEARGNRMADQAARKAAITETPDTSTLLIENSSPSGGSKRTADGSEFEAGKRTADGSEFEKRTADGSEFESPKKKAKVE

SEQ ID NO: 2649 - protein, 2114 aa, synthetic construct
MPAAKRVKLDGGDKKYSIGLDIGTNSVGWAVITDEYKVPSKKFKVLGNTDRHSIKKNLIGALLFDSGETAEATRLKRTARRRYTRRKNRICYLQEIFSNEMAKVDDSFFHRLEESFLVEEDKKHERHPIFGNIVDEVAYHEKYPTIYHLRKKLVDSTDKADLRLIYLALAHMIKFRGHFLIEGDLNPDNSDVDKLFIQLVQTYNQLFEENPINASGVDAKAILSARLSKSRRLENLIAQLPGEKKNGLFGNLIALSLGLTPNFKSNFDLAEDAKLQLSKDTYDDDLDNLLAQIGDQYADLFLAAKNLSDAILLSDILRVNTEITKAPLSASMIKRYDEHHQDLTLLKALVRQQLPEKYKEIFFDQSKNGYAGYIDGGASQEEFYKFIKPILEKMDGTEELLVKLNREDLLRKQRTFDNGSIPHQIHLGELHAILRRQEDFYPFLKDNREKIEKILTFRIPYYVGPLARGNSRFAWMTRKSEETITPWNFEEVVDKGASAQSFIERMTNFDKNLPNEKVLPKHSLLYEYFTVYNELTKVKYVTEGMRKPAFLSGEQKKAIVDLLFKTNRKVTVKQLKEDYFKKIECFDSVEISGVEDRFNASLGTYHDLLKIIKDKDFLDNEENEDILEDIVLTLTLFEDREMIEERLKTYAHLFDDKVMKQLKRRRYTGWGRLSRKLINGIRDKQSGKTILDFLKSDGFANRNFMQLIHDDSLTFKEDIQKAQVSGQGDSLHEHIANLAGSPAIKKGILQTVKVVDELVKVMGRHKPENIVIEMARENQTTQKGQKNSRERMKRIEEGIKELGSQILKEHPVENTQLQNEKLYLYYLQNGRDMYVDQELDINRLSDYDVDHIVPQSFLKDDSIDNKVLTRSDKARGKSDNVPSEEVVKKMKNYWRQLLNAKLITQRKFDNLTKAERGGLSELDKAGFIKRQLVETRQITKHVAQILDSRMNTKYDENDKLIREVKVITLKSKLVSDFRKDFQFYKVREINNYHHAHDAYLNAVVGTALIKKYPKLESEFVYGDYKVYDVRKMIAKSEQEIGKATAKYFFYSNIMNFFKTEITLANGEIRKRPLIETNGETGEIVWDKGRDFATVRKVLSMPQVNIVKKTEVQTGGFSKESILPKRNSDKLIARKKDWDPKKYGGFDSPTVAYSVLVVAKVEKGKSKKLKSVKELLGITIMERSSFEKNPIDFLEAKGYKEVKKDLIIKLPKYSLFELENGRKRMLASAGELQKGNELALPSKYVNFLYLASHYEKLKGSPEDNEQKQLFVEQHKHYLDEIIEQISEFSKRVILADANLDKVLSAYNKHRDKPIREQAENIIHLFTLTNLGAPAAFKYFDTTIDRKRYTSTKEVLDATLIHQSITGLYETRIDLSQLGGDGGPAPGGSGGGGGTLNIEDEYRLHETSKEPDVSLGSTWLSDFPQAWAETGGMGLAVRQAPLIIPLKATSTPVSIKQYPMSQEARLGIKPHIQRLLDQGILVPCQSPWNTPLLPVKKPGTNDYRPVQDLREVNKRVEDIHPTVPNPYNLLSGLPPSHQWYTVLDLKDAFFCLRLHPTSQPLFAFEWRDPEMGISGQLTWTRLPQGFKNSPTLFNEALHRDLADFRIQHPDLILLQYVDDLLLAATSELDCQQGTRALLQTLGNLGYRASAKKAQICQKQVKYLGYLLKEGQRWLTEARKETVMGQPTPKTPRQLREFLGKAGFCRLFIPGFAEMAAPLYPLTKPGTLFNWGPDQQKAYQEIKQALLTAPALGLPDLTKPFELFVDEKQGYAKGVLTQKLGPWRRPVAYLSKKLDPVAAGWPPCLRMVAAIAVLTKDAGKLTMGQPLVILAPHAVEALVKQPPDRWLSNARMTHYQALLLDTDRVQFGPVVALNPATLLPLPEEGLQHNCLDILAEAHGTRPDLTDQPLPDADHTWYTDGSSLLQEGQRKAGAAVTTETEVIWAKALPAGTSAQRAELIALTQALKMAEGKKLNVYTDSRYAFATAHIHGEIYRRRGWLTSEGKEIKNKDEILALLKALFLPKRLSIIHCPGHQKGHSAEARGNRMADQAARKAAITETPDTSTLLIENSSPSGGSKRTADGSEFEAGKRTADGSEFEKRTADGSEFESPKKKAKVE

SEQ ID NO: 2650 - protein, 2114 aa, synthetic construct
MPAAKRVKLDGGDKKYSIGLDIGTNSVGWAVITDEYKVPSKKFKVLGNTDRHSIKKNLIGALLFDSGETAEATRLKRTARRRYTRRKNRICYLQEIFSNEMAKVDDSFFHRLEESFLVEEDKKHERHPIFGNIVDEVAYHEKYPTIYHLRKKLVDSTDKADLRLIYLALAHMIKFRGHFLIEGDLNPDNSDVDKLFIQLVQTYNQLFEENPINASGVDAKAILSARLSKSRRLENLIAQLPGEKKNGLFGNLIALSLGLTPNFKSNFDLAEDAKLQLSKDTYDDDLDNLLAQIGDQYADLFLAAKNLSDAILLSDILRVNTEITKAPLSASMIKRYDEHHQDLTLLKALVRQQLPEKYKEIFFDQSKNGYAGYIDGGASQEEFYKFIKPILEKMDGTEELLVKLNREDLLRKQRTFDNGSIPHQIHLGELHAILRRQEDFYPFLKDNREKIEKILTFRIPYYVGPLARGNSRFAWMTRKSEETITPWNFEEVVDKGASAQSFIERMTNFDKNLPNEKVLPKHSLLYEYFTVYNELTKVKYVTEGMRKPAFLSGEQKKAIVDLLFKTNRKVTVKQLKEDYFKKIECFDSVEISGVEDRFNASLGTYHDLLKIIKDKDFLDNEENEDILEDIVLTLTLFEDREMIEERLKTYAHLFDDKVMKQLKRRRYTGWGRLSRKLINGIRDKQSGKTILDFLKSDGFANRNFMQLIHDDSLTFKEDIQKAQVSGQGDSLHEHIANLAGSPAIKKGILQTVKVVDELVKVMGRHKPENIVIEMARENQTTQKGQKNSRERMKRIEEGIKELGSQILKEHPVENTQLQNEKLYLYYLQNGRDMYVDQELDINRLSDYDVDHIVPQSFLKDDSIDNKVLTRSDKARGKSDNVPSEEVVKKMKNYWRQLLNAKLITQRKFDNLTKAERGGLSELDKAGFIKRQLVETRQITKHVAQILDSRMNTKYDENDKLIREVKVITLKSKLVSDFRKDFQFYKVREINNYHHAHDAYLNAVVGTALIKKYPKLESEFVYGDYKVYDVRKMIAKSEQEIGKATAKYFFYSNIMNFFKTEITLANGEIRKRPLIETNGETGEIVWDKGRDFATVRKVLSMPQVNIVKKTEVQTGGFSKESILPKRNSDKLIARKKDWDPKKYGGFDSPTVAYSVLVVAKVEKGKSKKLKSVKELLGITIMERSSFEKNPIDFLEAKGYKEVKKDLIIKLPKYSLFELENGRKRMLASAGELQKGNELALPSKYVNFLYLASHYEKLKGSPEDNEQKQLFVEQHKHYLDEIIEQISEFSKRVILADANLDKVLSAYNKHRDKPIREQAENIIHLFTLTNLGAPAAFKYFDTTIDRKRYTSTKEVLDATLIHQSITGLYETRIDLSQLGGDGGPAPGGGGGSGGTLNIEDEYRLHETSKEPDVSLGSTWLSDFPQAWAETGGMGLAVRQAPLIIPLKATSTPVSIKQYPMSQEARLGIKPHIQRLLDQGILVPCQSPWNTPLLPVKKPGTNDYRPVQDLREVNKRVEDIHPTVPNPYNLLSGLPPSHQWYTVLDLKDAFFCLRLHPTSQPLFAFEWRDPEMGISGQLTWTRLPQGFKNSPTLFNEALHRDLADFRIQHPDLILLQYVDDLLLAATSELDCQQGTRALLQTLGNLGYRASAKKAQICQKQVKYLGYLLKEGQRWLTEARKETVMGQPTPKTPRQLREFLGKAGFCRLFIPGFAEMAAPLYPLTKPGTLFNWGPDQQKAYQEIKQALLTAPALGLPDLTKPFELFVDEKQGYAKGVLTQKLGPWRRPVAYLSKKLDPVAAGWPPCLRMVAAIAVLTKDAGKLTMGQPLVILAPHAVEALVKQPPDRWLSNARMTHYQALLLDTDRVQFGPVVALNPATLLPLPEEGLQHNCLDILAEAHGTRPDLTDQPLPDADHTWYTDGSSLLQEGQRKAGAAVTTETEVIWAKALPAGTSAQRAELIALTQALKMAEGKKLNVYTDSRYAFATAHIHGEIYRRRGWLTSEGKEIKNKDEILALLKALFLPKRLSIIHCPGHQKGHSAEARGNRMADQAARKAAITETPDTSTLLIENSSPSGGSKRTADGSEFEAGKRTADGSEFEKRTADGSEFESPKKKAKVE

SEQ ID NO: 2651 - protein, 2116 aa, synthetic construct
MPAAKRVKLDGGDKKYSIGLDIGTNSVGWAVITDEYKVPSKKFKVLGNTDRHSIKKNLIGALLFDSGETAEATRLKRTARRRYTRRKNRICYLQEIFSNEMAKVDDSFFHRLEESFLVEEDKKHERHPIFGNIVDEVAYHEKYPTIYHLRKKLVDSTDKADLRLIYLALAHMIKFRGHFLIEGDLNPDNSDVDKLFIQLVQTYNQLFEENPINASGVDAKAILSARLSKSRRLENLIAQLPGEKKNGLFGNLIALSLGLTPNFKSNFDLAEDAKLQLSKDTYDDDLDNLLAQIGDQYADLFLAAKNLSDAILLSDILRVNTEITKAPLSASMIKRYDEHHQDLTLLKALVRQQLPEKYKEIFFDQSKNGYAGYIDGGASQEEFYKFIKPILEKMDGTEELLVKLNREDLLRKQRTFDNGSIPHQIHLGELHAILRRQEDFYPFLKDNREKIEKILTFRIPYYVGPLARGNSRFAWMTRKSEETITPWNFEEVVDKGASAQSFIERMTNFDKNLPNEKVLPKHSLLYEYFTVYNELTKVKYVTEGMRKPAFLSGEQKKAIVDLLFKTNRKVTVKQLKEDYFKKIECFDSVEISGVEDRFNASLGTYHDLLKIIKDKDFLDNEENEDILEDIVLTLTLFEDREMIEERLKTYAHLFDDKVMKQLKRRRYTGWGRLSRKLINGIRDKQSGKTILDFLKSDGFANRNFMQLIHDDSLTFKEDIQKAQVSGQGDSLHEHIANLAGSPAIKKGILQTVKVVDELVKVMGRHKPENIVIEMARENQTTQKGQKNSRERMKRIEEGIKELGSQILKEHPVENTQLQNEKLYLYYLQNGRDMYVDQELDINRLSDYDVDHIVPQSFLKDDSIDNKVLTRSDKARGKSDNVPSEEVVKKMKNYWRQLLNAKLITQRKFDNLTKAERGGLSELDKAGFIKRQLVETRQITKHVAQILDSRMNTKYDENDKLIREVKVITLKSKLVSDFRKDFQFYKVREINNYHHAHDAYLNAVVGTALIKKYPKLESEFVYGDYKVYDVRKMIAKSEQEIGKATAKYFFYSNIMNFFKTEITLANGEIRKRPLIETNGETGEIVWDKGRDFATVRKVLSMPQVNIVKKTEVQTGGFSKESILPKRNSDKLIARKKDWDPKKYGGFDSPTVAYSVLVVAKVEKGKSKKLKSVKELLGITIMERSSFEKNPIDFLEAKGYKEVKKDLIIKLPKYSLFELENGRKRMLASAGELQKGNELALPSKYVNFLYLASHYEKLKGSPEDNEQKQLFVEQHKHYLDEIIEQISEFSKRVILADANLDKVLSAYNKHRDKPIREQAENIIHLFTLTNLGAPAAFKYFDTTIDRKRYTSTKEVLDATLIHQSITGLYETRIDLSQLGGDGGPAPGSSEAAAKGGTLNIEDEYRLHETSKEPDVSLGSTWLSDFPQAWAETGGMGLAVRQAPLIIPLKATSTPVSIKQYPMSQEARLGIKPHIQRLLDQGILVPCQSPWNTPLLPVKKPGTNDYRPVQDLREVNKRVEDIHPTVPNPYNLLSGLPPSHQWYTVLDLKDAFFCLRLHPTSQPLFAFEWRDPEMGISGQLTWTRLPQGFKNSPTLFNEALHRDLADFRIQHPDLILLQYVDDLLLAATSELDCQQGTRALLQTLGNLGYRASAKKAQICQKQVKYLGYLLKEGQRWLTEARKETVMGQPTPKTPRQLREFLGKAGFCRLFIPGFAEMAAPLYPLTKPGTLFNWGPDQQKAYQEIKQALLTAPALGLPDLTKPFELFVDEKQGYAKGVLTQKLGPWRRPVAYLSKKLDPVAAGWPPCLRMVAAIAVLTKDAGKLTMGQPLVILAPHAVEALVKQPPDRWLSNARMTHYQALLLDTDRVQFGPVVALNPATLLPLPEEGLQHNCLDILAEAHGTRPDLTDQPLPDADHTWYTDGSSLLQEGQRKAGAAVTTETEVIWAKALPAGTSAQRAELIALTQALKMAEGKKLNVYTDSRYAFATAHIHGEIYRRRGWLTSEGKEIKNKDEILALLKALFLPKRLSIIHCPGHQKGHSAEARGNRMADQAARKAAITETPDTSTLLIENSSPSGGSKRTADGSEFEAGKRTADGSEFEKRTADGSEFESPKKKAKVE

SEQ ID NO: 2652 - protein, 2116 aa, synthetic construct
MPAAKRVKLDGGDKKYSIGLDIGTNSVGWAVITDEYKVPSKKFKVLGNTDRHSIKKNLIGALLFDSGETAEATRLKRTARRRYTRRKNRICYLQEIFSNEMAKVDDSFFHRLEESFLVEEDKKHERHPIFGNIVDEVAYHEKYPTIYHLRKKLVDSTDKADLRLIYLALAHMIKFRGHFLIEGDLNPDNSDVDKLFIQLVQTYNQLFEENPINASGVDAKAILSARLSKSRRLENLIAQLPGEKKNGLFGNLIALSLGLTPNFKSNFDLAEDAKLQLSKDTYDDDLDNLLAQIGDQYADLFLAAKNLSDAILLSDILRVNTEITKAPLSASMIKRYDEHHQDLTLLKALVRQQLPEKYKEIFFDQSKNGYAGYIDGGASQEEFYKFIKPILEKMDGTEELLVKLNREDLLRKQRTFDNGSIPHQIHLGELHAILRRQEDFYPFLKDNREKIEKILTFRIPYYVGPLARGNSRFAWMTRKSEETITPWNFEEVVDKGASAQSFIERMTNFDKNLPNEKVLPKHSLLYEYFTVYNELTKVKYVTEGMRKPAFLSGEQKKAIVDLLFKTNRKVTVKQLKEDYFKKIECFDSVEISGVEDRFNASLGTYHDLLKIIKDKDFLDNEENEDILEDIVLTLTLFEDREMIEERLKTYAHLFDDKVMKQLKRRRYTGWGRLSRKLINGIRDKQSGKTILDFLKSDGFANRNFMQLIHDDSLTFKEDIQKAQVSGQGDSLHEHIANLAGSPAIKKGILQTVKVVDELVKVMGRHKPENIVIEMARENQTTQKGQKNSRERMKRIEEGIKELGSQILKEHPVENTQLQNEKLYLYYLQNGRDMYVDQELDINRLSDYDVDHIVPQSFLKDDSIDNKVLTRSDKARGKSDNVPSEEVVKKMKNYWRQLLNAKLITQRKFDNLTKAERGGLSELDKAGFIKRQLVETRQITKHVAQILDSRMNTKYDENDKLIREVKVITLKSKLVSDFRKDFQFYKVREINNYHHAHDAYLNAVVGTALIKKYPKLESEFVYGDYKVYDVRKMIAKSEQEIGKATAKYFFYSNIMNFFKTEITLANGEIRKRPLIETNGETGEIVWDKGRDFATVRKVLSMPQVNIVKKTEVQTGGFSKESILPKRNSDKLIARKKDWDPKKYGGFDSPTVAYSVLVVAKVEKGKSKKLKSVKELLGITIMERSSFEKNPIDFLEAKGYKEVKKDLIIKLPKYSLFELENGRKRMLASAGELQKGNELALPSKYVNFLYLASHYEKLKGSPEDNEQKQLFVEQHKHYLDEIIEQISEFSKRVILADANLDKVLSAYNKHRDKPIREQAENIIHLFTLTNLGAPAAFKYFDTTIDRKRYTSTKEVLDATLIHQSITGLYETRIDLSQLGGDGGGSSGGGEAAAKGGTLNIEDEYRLHETSKEPDVSLGSTWLSDFPQAWAETGGMGLAVRQAPLIIPLKATSTPVSIKQYPMSQEARLGIKPHIQRLLDQGILVPCQSPWNTPLLPVKKPGTNDYRPVQDLREVNKRVEDIHPTVPNPYNLLSGLPPSHQWYTVLDLKDAFFCLRLHPTSQPLFAFEWRDPEMGISGQLTWTRLPQGFKNSPTLFNEALHRDLADFRIQHPDLILLQYVDDLLLAATSELDCQQGTRALLQTLGNLGYRASAKKAQICQKQVKYLGYLLKEGQRWLTEARKETVMGQPTPKTPRQLREFLGKAGFCRLFIPGFAEMAAPLYPLTKPGTLFNWGPDQQKAYQEIKQALLTAPALGLPDLTKPFELFVDEKQGYAKGVLTQKLGPWRRPVAYLSKKLDPVAAGWPPCLRMVAAIAVLTKDAGKLTMGQPLVILAPHAVEALVKQPPDRWLSNARMTHYQALLLDTDRVQFGPVVALNPATLLPLPEEGLQHNCLDILAEAHGTRPDLTDQPLPDADHTWYTDGSSLLQEGQRKAGAAVTTETEVIWAKALPAGTSAQRAELIALTQALKMAEGKKLNVYTDSRYAFATAHIHGEIYRRRGWLTSEGKEIKNKDEILALLKALFLPKRLSIIHCPGHQKGHSAEARGNRMADQAARKAAITETPDTSTLLIENSSPSGGSKRTADGSEFEAGKRTADGSEFEKRTADGSEFESPKKKAKVE

SEQ ID NO: 2653 - protein, 2111 aa, synthetic construct
MPAAKRVKLDGGDKKYSIGLDIGTNSVGWAVITDEYKVPSKKFKVLGNTDRHSIKKNLIGALLFDSGETAEATRLKRTARRRYTRRKNRICYLQEIFSNEMAKVDDSFFHRLEESFLVEEDKKHERHPIFGNIVDEVAYHEKYPTIYHLRKKLVDSTDKADLRLIYLALAHMIKFRGHFLIEGDLNPDNSDVDKLFIQLVQTYNQLFEENPINASGVDAKAILSARLSKSRRLENLIAQLPGEKKNGLFGNLIALSLGLTPNFKSNFDLAEDAKLQLSKDTYDDDLDNLLAQIGDQYADLFLAAKNLSDAILLSDILRVNTEITKAPLSASMIKRYDEHHQDLTLLKALVRQQLPEKYKEIFFDQSKNGYAGYIDGGASQEEFYKFIKPILEKMDGTEELLVKLNREDLLRKQRTFDNGSIPHQIHLGELHAILRRQEDFYPFLKDNREKIEKILTFRIPYYVGPLARGNSRFAWMTRKSEETITPWNFEEVVDKGASAQSFIERMTNFDKNLPNEKVLPKHSLLYEYFTVYNELTKVKYVTEGMRKPAFLSGEQKKAIVDLLFKTNRKVTVKQLKEDYFKKIECFDSVEISGVEDRFNASLGTYHDLLKIIKDKDFLDNEENEDILEDIVLTLTLFEDREMIEERLKTYAHLFDDKVMKQLKRRRYTGWGRLSRKLINGIRDKQSGKTILDFLKSDGFANRNFMQLIHDDSLTFKEDIQKAQVSGQGDSLHEHIANLAGSPAIKKGILQTVKVVDELVKVMGRHKPENIVIEMARENQTTQKGQKNSRERMKRIEEGIKELGSQILKEHPVENTQLQNEKLYLYYLQNGRDMYVDQELDINRLSDYDVDHIVPQSFLKDDSIDNKVLTRSDKARGKSDNVPSEEVVKKMKNYWRQLLNAKLITQRKFDNLTKAERGGLSELDKAGFIKRQLVETRQITKHVAQILDSRMNTKYDENDKLIREVKVITLKSKLVSDFRKDFQFYKVREINNYHHAHDAYLNAVVGTALIKKYPKLESEFVYGDYKVYDVRKMIAKSEQEIGKATAKYFFYSNIMNFFKTEITLANGEIRKRPLIETNGETGEIVWDKGRDFATVRKVLSMPQVNIVKKTEVQTGGFSKESILPKRNSDKLIARKKDWDPKKYGGFDSPTVAYSVLVVAKVEKGKSKKLKSVKELLGITIMERSSFEKNPIDFLEAKGYKEVKKDLIIKLPKYSLFELENGRKRMLASAGELQKGNELALPSKYVNFLYLASHYEKLKGSPEDNEQKQLFVEQHKHYLDEIIEQISEFSKRVILADANLDKVLSAYNKHRDKPIREQAENIIHLFTLTNLGAPAAFKYFDTTIDRKRYTSTKEVLDATLIHQSITGLYETRIDLSQLGGDGGGGSGGGGGTLNIEDEYRLHETSKEPDVSLGSTWLSDFPQAWAETGGMGLAVRQAPLIIPLKATSTPVSIKQYPMSQEARLGIKPHIQRLLDQGILVPCQSPWNTPLLPVKKPGTNDYRPVQDLREVNKRVEDIHPTVPNPYNLLSGLPPSHQWYTVLDLKDAFFCLRLHPTSQPLFAFEWRDPEMGISGQLTWTRLPQGFKNSPTLFNEALHRDLADFRIQHPDLILLQYVDDLLLAATSELDCQQGTRALLQTLGNLGYRASAKKAQICQKQVKYLGYLLKEGQRWLTEARKETVMGQPTPKTPRQLREFLGKAGFCRLFIPGFAEMAAPLYPLTKPGTLFNWGPDQQKAYQEIKQALLTAPALGLPDLTKPFELFVDEKQGYAKGVLTQKLGPWRRPVAYLSKKLDPVAAGWPPCLRMVAAIAVLTKDAGKLTMGQPLVILAPHAVEALVKQPPDRWLSNARMTHYQALLLDTDRVQFGPVVALNPATLLPLPEEGLQHNCLDILAEAHGTRPDLTDQPLPDADHTWYTDGSSLLQEGQRKAGAAVTTETEVIWAKALPAGTSAQRAELIALTQALKMAEGKKLNVYTDSRYAFATAHIHGEIYRRRGWLTSEGKEIKNKDEILALLKALFLPKRLSIIHCPGHQKGHSAEARGNRMADQAARKAAITETPDTSTLLIENSSPSGGSKRTADGSEFEAGKRTADGSEFEKRTADGSEFESPKKKAKVE

SEQ ID NO: 2654 - protein, 2116 aa, synthetic construct
MPAAKRVKLDGGDKKYSIGLDIGTNSVGWAVITDEYKVPSKKFKVLGNTDRHSIKKNLIGALLFDSGETAEATRLKRTARRRYTRRKNRICYLQEIFSNEMAKVDDSFFHRLEESFLVEEDKKHERHPIFGNIVDEVAYHEKYPTIYHLRKKLVDSTDKADLRLIYLALAHMIKFRGHFLIEGDLNPDNSDVDKLFIQLVQTYNQLFEENPINASGVDAKAILSARLSKSRRLENLIAQLPGEKKNGLFGNLIALSLGLTPNFKSNFDLAEDAKLQLSKDTYDDDLDNLLAQIGDQYADLFLAAKNLSDAILLSDILRVNTEITKAPLSASMIKRYDEHHQDLTLLKALVRQQLPEKYKEIFFDQSKNGYAGYIDGGASQEEFYKFIKPILEKMDGTEELLVKLNREDLLRKQRTFDNGSIPHQIHLGELHAILRRQEDFYPFLKDNREKIEKILTFRIPYYVGPLARGNSRFAWMTRKSEETITPWNFEEVVDKGASAQSFIERMTNFDKNLPNEKVLPKHSLLYEYFTVYNELTKVKYVTEGMRKPAFLSGEQKKAIVDLLFKTNRKVTVKQLKEDYFKKIECFDSVEISGVEDRFNASLGTYHDLLKIIKDKDFLDNEENEDILEDIVLTLTLFEDREMIEERLKTYAHLFDDKVMKQLKRRRYTGWGRLSRKLINGIRDKQSGKTILDFLKSDGFANRNFMQLIHDDSLTFKEDIQKAQVSGQGDSLHEHIANLAGSPAIKKGILQTVKVVDELVKVMGRHKPENIVIEMARENQTTQKGQKNSRERMKRIEEGIKELGSQILKEHPVENTQLQNEKLYLYYLQNGRDMYVDQELDINRLSDYDVDHIVPQSFLKDDSIDNKVLTRSDKARGKSDNVPSEEVVKKMKNYWRQLLNAKLITQRKFDNLTKAERGGLSELDKAGFIKRQLVETRQITKHVAQILDSRMNTKYDENDKLIREVKVITLKSKLVSDFRKDFQFYKVREINNYHHAHDAYLNAVVGTALIKKYPKLESEFVYGDYKVYDVRKMIAKSEQEIGKATAKYFFYSNIMNFFKTEITLANGEIRKRPLIETNGETGEIVWDKGRDFATVRKVLSMPQVNIVKKTEVQTGGFSKESILPKRNSDKLIARKKDWDPKKYGGFDSPTVAYSVLVVAKVEKGKSKKLKSVKELLGITIMERSSFEKNPIDFLEAKGYKEVKKDLIIKLPKYSLFELENGRKRMLASAGELQKGNELALPSKYVNFLYLASHYEKLKGSPEDNEQKQLFVEQHKHYLDEIIEQISEFSKRVILADANLDKVLSAYNKHRDKPIREQAENIIHLFTLTNLGAPAAFKYFDTTIDRKRYTSTKEVLDATLIHQSITGLYETRIDLSQLGGDGGEAAAKGGSPAPGGTLNIEDEYRLHETSKEPDVSLGSTWLSDFPQAWAETGGMGLAVRQAPLIIPLKATSTPVSIKQYPMSQEARLGIKPHIQRLLDQGILVPCQSPWNTPLLPVKKPGTNDYRPVQDLREVNKRVEDIHPTVPNPYNLLSGLPPSHQWYTVLDLKDAFFCLRLHPTSQPLFAFEWRDPEMGISGQLTWTRLPQGFKNSPTLFNEALHRDLADFRIQHPDLILLQYVDDLLLAATSELDCQQGTRALLQTLGNLGYRASAKKAQICQKQVKYLGYLLKEGQRWLTEARKETVMGQPTPKTPRQLREFLGKAGFCRLFIPGFAEMAAPLYPLTKPGTLFNWGPDQQKAYQEIKQALLTAPALGLPDLTKPFELFVDEKQGYAKGVLTQKLGPWRRPVAYLSKKLDPVAAGWPPCLRMVAAIAVLTKDAGKLTMGQPLVILAPHAVEALVKQPPDRWLSNARMTHYQALLLDTDRVQFGPVVALNPATLLPLPEEGLQHNCLDILAEAHGTRPDLTDQPLPDADHTWYTDGSSLLQEGQRKAGAAVTTETEVIWAKALPAGTSAQRAELIALTQALKMAEGKKLNVYTDSRYAFATAHIHGEIYRRRGWLTSEGKEIKNKDEILALLKALFLPKRLSIIHCPGHQKGHSAEARGNRMADQAARKAAITETPDTSTLLIENSSPSGGSKRTADGSEFEAGKRTADGSEFEKRTADGSEFESPKKKAKVE

SEQ ID NO: 2655 - protein, 2108 aa, synthetic construct
MPAAKRVKLDGGDKKYSIGLDIGTNSVGWAVITDEYKVPSKKFKVLGNTDRHSIKKNLIGALLFDSGETAEATRLKRTARRRYTRRKNRICYLQEIFSNEMAKVDDSFFHRLEESFLVEEDKKHERHPIFGNIVDEVAYHEKYPTIYHLRKKLVDSTDKADLRLIYLALAHMIKFRGHFLIEGDLNPDNSDVDKLFIQLVQTYNQLFEENPINASGVDAKAILSARLSKSRRLENLIAQLPGEKKNGLFGNLIALSLGLTPNFKSNFDLAEDAKLQLSKDTYDDDLDNLLAQIGDQYADLFLAAKNLSDAILLSDILRVNTEITKAPLSASMIKRYDEHHQDLTLLKALVRQQLPEKYKEIFFDQSKNGYAGYIDGGASQEEFYKFIKPILEKMDGTEELLVKLNREDLLRKQRTFDNGSIPHQIHLGELHAILRRQEDFYPFLKDNREKIEKILTFRIPYYVGPLARGNSRFAWMTRKSEETITPWNFEEVVDKGASAQSFIERMTNFDKNLPNEKVLPKHSLLYEYFTVYNELTKVKYVTEGMRKPAFLSGEQKKAIVDLLFKTNRKVTVKQLKEDYFKKIECFDSVEISGVEDRFNASLGTYHDLLKIIKDKDFLDNEENEDILEDIVLTLTLFEDREMIEERLKTYAHLFDDKVMKQLKRRRYTGWGRLSRKLINGIRDKQSGKTILDFLKSDGFANRNFMQLIHDDSLTFKEDIQKAQVSGQGDSLHEHIANLAGSPAIKKGILQTVKVVDELVKVMGRHKPENIVIEMARENQTTQKGQKNSRERMKRIEEGIKELGSQILKEHPVENTQLQNEKLYLYYLQNGRDMYVDQELDINRLSDYDVDHIVPQSFLKDDSIDNKVLTRSDKARGKSDNVPSEEVVKKMKNYWRQLLNAKLITQRKFDNLTKAERGGLSELDKAGFIKRQLVETRQITKHVAQILDSRMNTKYDENDKLIREVKVITLKSKLVSDFRKDFQFYKVREINNYHHAHDAYLNAVVGTALIKKYPKLESEFVYGDYKVYDVRKMIAKSEQEIGKATAKYFFYSNIMNFFKTEITLANGEIRKRPLIETNGETGEIVWDKGRDFATVRKVLSMPQVNIVKKTEVQTGGFSKESILPKRNSDKLIARKKDWDPKKYGGFDSPTVAYSVLVVAKVEKGKSKKLKSVKELLGITIMERSSFEKNPIDFLEAKGYKEVKKDLIIKLPKYSLFELENGRKRMLASAGELQKGNELALPSKYVNFLYLASHYEKLKGSPEDNEQKQLFVEQHKHYLDEIIEQISEFSKRVILADANLDKVLSAYNKHRDKPIREQAENIIHLFTLTNLGAPAAFKYFDTTIDRKRYTSTKEVLDATLIHQSITGLYETRIDLSQLGGDGGGSSGGTLNIEDEYRLHETSKEPDVSLGSTWLSDFPQAWAETGGMGLAVRQAPLIIPLKATSTPVSIKQYPMSQEARLGIKPHIQRLLDQGILVPCQSPWNTPLLPVKKPGTNDYRPVQDLREVNKRVEDIHPTVPNPYNLLSGLPPSHQWYTVLDLKDAFFCLRLHPTSQPLFAFEWRDPEMGISGQLTWTRLPQGFKNSPTLFNEALHRDLADFRIQHPDLILLQYVDDLLLAATSELDCQQGTRALLQTLGNLGYRASAKKAQICQKQVKYLGYLLKEGQRWLTEARKETVMGQPTPKTPRQLREFLGKAGFCRLFIPGFAEMAAPLYPLTKPGTLFNWGPDQQKAYQEIKQALLTAPALGLPDLTKPFELFVDEKQGYAKGVLTQKLGPWRRPVAYLSKKLDPVAAGWPPCLRMVAAIAVLTKDAGKLTMGQPLVILAPHAVEALVKQPPDRWLSNARMTHYQALLLDTDRVQFGPVVALNPATLLPLPEEGLQHNCLDILAEAHGTRPDLTDQPLPDADHTWYTDGSSLLQEGQRKAGAAVTTETEVIWAKALPAGTSAQRAELIALTQALKMAEGKKLNVYTDSRYAFATAHIHGEIYRRRGWLTSEGKEIKNKDEILALLKALFLPKRLSIIHCPGHQKGHSAEARGNRMADQAARKAAITETPDTSTLLIENSSPSGGSKRTADGSEFEAGKRTADGSEFEKRTADGSEFESPKKKAKVE

SEQ ID NO: 2656 - protein, 2114 aa, synthetic construct
MPAAKRVKLDGGDKKYSIGLDIGTNSVGWAVITDEYKVPSKKFKVLGNTDRHSIKKNLIGALLFDSGETAEATRLKRTARRRYTRRKNRICYLQEIFSNEMAKVDDSFFHRLEESFLVEEDKKHERHPIFGNIVDEVAYHEKYPTIYHLRKKLVDSTDKADLRLIYLALAHMIKFRGHFLIEGDLNPDNSDVDKLFIQLVQTYNQLFEENPINASGVDAKAILSARLSKSRRLENLIAQLPGEKKNGLFGNLIALSLGLTPNFKSNFDLAEDAKLQLSKDTYDDDLDNLLAQIGDQYADLFLAAKNLSDAILLSDILRVNTEITKAPLSASMIKRYDEHHQDLTLLKALVRQQLPEKYKEIFFDQSKNGYAGYIDGGASQEEFYKFIKPILEKMDGTEELLVKLNREDLLRKQRTFDNGSIPHQIHLGELHAILRRQEDFYPFLKDNREKIEKILTFRIPYYVGPLARGNSRFAWMTRKSEETITPWNFEEVVDKGASAQSFIERMTNFDKNLPNEKVLPKHSLLYEYFTVYNELTKVKYVTEGMRKPAFLSGEQKKAIVDLLFKTNRKVTVKQLKEDYFKKIECFDSVEISGVEDRFNASLGTYHDLLKIIKDKDFLDNEENEDILEDIVLTLTLFEDREMIEERLKTYAHLFDDKVMKQLKRRRYTGWGRLSRKLINGIRDKQSGKTILDFLKSDGFANRNFMQLIHDDSLTFKEDIQKAQVSGQGDSLHEHIANLAGSPAIKKGILQTVKVVDELVKVMGRHKPENIVIEMARENQTTQKGQKNSRERMKRIEEGIKELGSQILKEHPVENTQLQNEKLYLYYLQNGRDMYVDQELDINRLSDYDVDHIVPQSFLKDDSIDNKVLTRSDKARGKSDNVPSEEVVKKMKNYWRQLLNAKLITQRKFDNLTKAERGGLSELDKAGFIKRQLVETRQITKHVAQILDSRMNTKYDENDKLIREVKVITLKSKLVSDFRKDFQFYKVREINNYHHAHDAYLNAVVGTALIKKYPKLESEFVYGDYKVYDVRKMIAKSEQEIGKATAKYFFYSNIMNFFKTEITLANGEIRKRPLIETNGETGEIVWDKGRDFATVRKVLSMPQVNIVKKTEVQTGGFSKESILPKRNSDKLIARKKDWDPKKYGGFDSPTVAYSVLVVAKVEKGKSKKLKSVKELLGITIMERSSFEKNPIDFLEAKGYKEVKKDLIIKLPKYSLFELENGRKRMLASAGELQKGNELALPSKYVNFLYLASHYEKLKGSPEDNEQKQLFVEQHKHYLDEIIEQISEFSKRVILADANLDKVLSAYNKHRDKPIREQAENIIHLFTLTNLGAPAAFKYFDTTIDRKRYTSTKEVLDATLIHQSITGLYETRIDLSQLGGDGGPAPAPAPAPGGTLNIEDEYRLHETSKEPDVSLGSTWLSDFPQAWAETGGMGLAVRQAPLIIPLKATSTPVSIKQYPMSQEARLGIKPHIQRLLDQGILVPCQSPWNTPLLPVKKPGTNDYRPVQDLREVNKRVEDIHPTVPNPYNLLSGLPPSHQWYTVLDLKDAFFCLRLHPTSQPLFAFEWRDPEMGISGQLTWTRLPQGFKNSPTLFNEALHRDLADFRIQHPDLILLQYVDDLLLAATSELDCQQGTRALLQTLGNLGYRASAKKAQICQKQVKYLGYLLKEGQRWLTEARKETVMGQPTPKTPRQLREFLGKAGFCRLFIPGFAEMAAPLYPLTKPGTLFNWGPDQQKAYQEIKQALLTAPALGLPDLTKPFELFVDEKQGYAKGVLTQKLGPWRRPVAYLSKKLDPVAAGWPPCLRMVAAIAVLTKDAGKLTMGQPLVILAPHAVEALVKQPPDRWLSNARMTHYQALLLDTDRVQFGPVVALNPATLLPLPEEGLQHNCLDILAEAHGTRPDLTDQPLPDADHTWYTDGSSLLQEGQRKAGAAVTTETEVIWAKALPAGTSAQRAELIALTQALKMAEGKKLNVYTDSRYAFATAHIHGEIYRRRGWLTSEGKEIKNKDEILALLKALFLPKRLSIIHCPGHQKGHSAEARGNRMADQAARKAAITETPDTSTLLIENSSPSGGSKRTADGSEFEAGKRTADGSEFEKRTADGSEFESPKKKAKVE

SEQ ID NO: 2657 - protein, 2113 aa, synthetic construct
MPAAKRVKLDGGDKKYSIGLDIGTNSVGWAVITDEYKVPSKKFKVLGNTDRHSIKKNLIGALLFDSGETAEATRLKRTARRRYTRRKNRICYLQEIFSNEMAKVDDSFFHRLEESFLVEEDKKHERHPIFGNIVDEVAYHEKYPTIYHLRKKLVDSTDKADLRLIYLALAHMIKFRGHFLIEGDLNPDNSDVDKLFIQLVQTYNQLFEENPINASGVDAKAILSARLSKSRRLENLIAQLPGEKKNGLFGNLIALSLGLTPNFKSNFDLAEDAKLQLSKDTYDDDLDNLLAQIGDQYADLFLAAKNLSDAILLSDILRVNTEITKAPLSASMIKRYDEHHQDLTLLKALVRQQLPEKYKEIFFDQSKNGYAGYIDGGASQEEFYKFIKPILEKMDGTEELLVKLNREDLLRKQRTFDNGSIPHQIHLGELHAILRRQEDFYPFLKDNREKIEKILTFRIPYYVGPLARGNSRFAWMTRKSEETITPWNFEEVVDKGASAQSFIERMTNFDKNLPNEKVLPKHSLLYEYFTVYNELTKVKYVTEGMRKPAFLSGEQKKAIVDLLFKTNRKVTVKQLKEDYFKKIECFDSVEISGVEDRFNASLGTYHDLLKIIKDKDFLDNEENEDILEDIVLTLTLFEDREMIEERLKTYAHLFDDKVMKQLKRRRYTGWGRLSRKLINGIRDKQSGKTILDFLKSDGFANRNFMQLIHDDSLTFKEDIQKAQVSGQGDSLHEHIANLAGSPAIKKGILQTVKVVDELVKVMGRHKPENIVIEMARENQTTQKGQKNSRERMKRIEEGIKELGSQILKEHPVENTQLQNEKLYLYYLQNGRDMYVDQELDINRLSDYDVDHIVPQSFLKDDSIDNKVLTRSDKARGKSDNVPSEEVVKKMKNYWRQLLNAKLITQRKFDNLTKAERGGLSELDKAGFIKRQLVETRQITKHVAQILDSRMNTKYDENDKLIREVKVITLKSKLVSDFRKDFQFYKVREINNYHHAHDAYLNAVVGTALIKKYPKLESEFVYGDYKVYDVRKMIAKSEQEIGKATAKYFFYSNIMNFFKTEITLANGEIRKRPLIETNGETGEIVWDKGRDFATVRKVLSMPQVNIVKKTEVQTGGFSKESILPKRNSDKLIARKKDWDPKKYGGFDSPTVAYSVLVVAKVEKGKSKKLKSVKELLGITIMERSSFEKNPIDFLEAKGYKEVKKDLIIKLPKYSLFELENGRKRMLASAGELQKGNELALPSKYVNFLYLASHYEKLKGSPEDNEQKQLFVEQHKHYLDEIIEQISEFSKRVILADANLDKVLSAYNKHRDKPIREQAENIIHLFTLTNLGAPAAFKYFDTTIDRKRYTSTKEVLDATLIHQSITGLYETRIDLSQLGGDGGEAAAKGGSGGTLNIEDEYRLHETSKEPDVSLGSTWLSDFPQAWAETGGMGLAVRQAPLIIPLKATSTPVSIKQYPMSQEARLGIKPHIQRLLDQGILVPCQSPWNTPLLPVKKPGTNDYRPVQDLREVNKRVEDIHPTVPNPYNLLSGLPPSHQWYTVLDLKDAFFCLRLHPTSQPLFAFEWRDPEMGISGQLTWTRLPQGFKNSPTLFNEALHRDLADFRIQHPDLILLQYVDDLLLAATSELDCQQGTRALLQTLGNLGYRASAKKAQICQKQVKYLGYLLKEGQRWLTEARKETVMGQPTPKTPRQLREFLGKAGFCRLFIPGFAEMAAPLYPLTKPGTLFNWGPDQQKAYQEIKQALLTAPALGLPDLTKPFELFVDEKQGYAKGVLTQKLGPWRRPVAYLSKKLDPVAAGWPPCLRMVAAIAVLTKDAGKLTMGQPLVILAPHAVEALVKQPPDRWLSNARMTHYQALLLDTDRVQFGPVVALNPATLLPLPEEGLQHNCLDILAEAHGTRPDLTDQPLPDADHTWYTDGSSLLQEGQRKAGAAVTTETEVIWAKALPAGTSAQRAELIALTQALKMAEGKKLNVYTDSRYAFATAHIHGEIYRRRGWLTSEGKEIKNKDEILALLKALFLPKRLSIIHCPGHQKGHSAEARGNRMADQAARKAAITETPDTSTLLIENSSPSGGSKRTADGSEFEAGKRTADGSEFEKRTADGSEFESPKKKAKVE

SEQ ID NO: 2658 - protein, 2116 aa, synthetic construct
MPAAKRVKLDGGDKKYSIGLDIGTNSVGWAVITDEYKVPSKKFKVLGNTDRHSIKKNLIGALLFDSGETAEATRLKRTARRRYTRRKNRICYLQEIFSNEMAKVDDSFFHRLEESFLVEEDKKHERHPIFGNIVDEVAYHEKYPTIYHLRKKLVDSTDKADLRLIYLALAHMIKFRGHFLIEGDLNPDNSDVDKLFIQLVQTYNQLFEENPINASGVDAKAILSARLSKSRRLENLIAQLPGEKKNGLFGNLIALSLGLTPNFKSNFDLAEDAKLQLSKDTYDDDLDNLLAQIGDQYADLFLAAKNLSDAILLSDILRVNTEITKAPLSASMIKRYDEHHQDLTLLKALVRQQLPEKYKEIFFDQSKNGYAGYIDGGASQEEFYKFIKPILEKMDGTEELLVKLNREDLLRKQRTFDNGSIPHQIHLGELHAILRRQEDFYPFLKDNREKIEKILTFRIPYYVGPLARGNSRFAWMTRKSEETITPWNFEEVVDKGASAQSFIERMTNFDKNLPNEKVLPKHSLLYEYFTVYNELTKVKYVTEGMRKPAFLSGEQKKAIVDLLFKTNRKVTVKQLKEDYFKKIECFDSVEISGVEDRFNASLGTYHDLLKIIKDKDFLDNEENEDILEDIVLTLTLFEDREMIEERLKTYAHLFDDKVMKQLKRRRYTGWGRLSRKLINGIRDKQSGKTILDFLKSDGFANRNFMQLIHDDSLTFKEDIQKAQVSGQGDSLHEHIANLAGSPAIKKGILQTVKVVDELVKVMGRHKPENIVIEMARENQTTQKGQKNSRERMKRIEEGIKELGSQILKEHPVENTQLQNEKLYLYYLQNGRDMYVDQELDINRLSDYDVDHIVPQSFLKDDSIDNKVLTRSDKARGKSDNVPSEEVVKKMKNYWRQLLNAKLITQRKFDNLTKAERGGLSELDKAGFIKRQLVETRQITKHVAQILDSRMNTKYDENDKLIREVKVITLKSKLVSDFRKDFQFYKVREINNYHHAHDAYLNAVVGTALIKKYPKLESEFVYGDYKVYDVRKMIAKSEQEIGKATAKYFFYSNIMNFFKTEITLANGEIRKRPLIETNGETGEIVWDKGRDFATVRKVLSMPQVNIVKKTEVQTGGFSKESILPKRNSDKLIARKKDWDPKKYGGFDSPTVAYSVLVVAKVEKGKSKKLKSVKELLGITIMERSSFEKNPIDFLEAKGYKEVKKDLIIKLPKYSLFELENGRKRMLASAGELQKGNELALPSKYVNFLYLASHYEKLKGSPEDNEQKQLFVEQHKHYLDEIIEQISEFSKRVILADANLDKVLSAYNKHRDKPIREQAENIIHLFTLTNLGAPAAFKYFDTTIDRKRYTSTKEVLDATLIHQSITGLYETRIDLSQLGGDGGEAAAKGSSPAPGGTLNIEDEYRLHETSKEPDVSLGSTWLSDFPQAWAETGGMGLAVRQAPLIIPLKATSTPVSIKQYPMSQEARLGIKPHIQRLLDQGILVPCQSPWNTPLLPVKKPGTNDYRPVQDLREVNKRVEDIHPTVPNPYNLLSGLPPSHQWYTVLDLKDAFFCLRLHPTSQPLFAFEWRDPEMGISGQLTWTRLPQGFKNSPTLFNEALHRDLADFRIQHPDLILLQYVDDLLLAATSELDCQQGTRALLQTLGNLGYRASAKKAQICQKQVKYLGYLLKEGQRWLTEARKETVMGQPTPKTPRQLREFLGKAGFCRLFIPGFAEMAAPLYPLTKPGTLFNWGPDQQKAYQEIKQALLTAPALGLPDLTKPFELFVDEKQGYAKGVLTQKLGPWRRPVAYLSKKLDPVAAGWPPCLRMVAAIAVLTKDAGKLTMGQPLVILAPHAVEALVKQPPDRWLSNARMTHYQALLLDTDRVQFGPVVALNPATLLPLPEEGLQHNCLDILAEAHGTRPDLTDQPLPDADHTWYTDGSSLLQEGQRKAGAAVTTETEVIWAKALPAGTSAQRAELIALTQALKMAEGKKLNVYTDSRYAFATAHIHGEIYRRRGWLTSEGKEIKNKDEILALLKALFLPKRLSIIHCPGHQKGHSAEARGNRMADQAARKAAITETPDTSTLLIENSSPSGGSKRTADGSEFEAGKRTADGSEFEKRTADGSEFESPKKKAKVE

SEQ ID NO: 2659 - protein, 2113 aa, synthetic construct
MPAAKRVKLDGGDKKYSIGLDIGTNSVGWAVITDEYKVPSKKFKVLGNTDRHSIKKNLIGALLFDSGETAEATRLKRTARRRYTRRKNRICYLQEIFSNEMAKVDDSFFHRLEESFLVEEDKKHERHPIFGNIVDEVAYHEKYPTIYHLRKKLVDSTDKADLRLIYLALAHMIKFRGHFLIEGDLNPDNSDVDKLFIQLVQTYNQLFEENPINASGVDAKAILSARLSKSRRLENLIAQLPGEKKNGLFGNLIALSLGLTPNFKSNFDLAEDAKLQLSKDTYDDDLDNLLAQIGDQYADLFLAAKNLSDAILLSDILRVNTEITKAPLSASMIKRYDEHHQDLTLLKALVRQQLPEKYKEIFFDQSKNGYAGYIDGGASQEEFYKFIKPILEKMDGTEELLVKLNREDLLRKQRTFDNGSIPHQIHLGELHAILRRQEDFYPFLKDNREKIEKILTFRIPYYVGPLARGNSRFAWMTRKSEETITPWNFEEVVDKGASAQSFIERMTNFDKNLPNEKVLPKHSLLYEYFTVYNELTKVKYVTEGMRKPAFLSGEQKKAIVDLLFKTNRKVTVKQLKEDYFKKIECFDSVEISGVEDRFNASLGTYHDLLKIIKDKDFLDNEENEDILEDIVLTLTLFEDREMIEERLKTYAHLFDDKVMKQLKRRRYTGWGRLSRKLINGIRDKQSGKTILDFLKSDGFANRNFMQLIHDDSLTFKEDIQKAQVSGQGDSLHEHIANLAGSPAIKKGILQTVKVVDELVKVMGRHKPENIVIEMARENQTTQKGQKNSRERMKRIEEGIKELGSQILKEHPVENTQLQNEKLYLYYLQNGRDMYVDQELDINRLSDYDVDHIVPQSFLKDDSIDNKVLTRSDKARGKSDNVPSEEVVKKMKNYWRQLLNAKLITQRKFDNLTKAERGGLSELDKAGFIKRQLVETRQITKHVAQILDSRMNTKYDENDKLIREVKVITLKSKLVSDFRKDFQFYKVREINNYHHAHDAYLNAVVGTALIKKYPKLESEFVYGDYKVYDVRKMIAKSEQEIGKATAKYFFYSNIMNFFKTEITLANGEIRKRPLIETNGETGEIVWDKGRDFATVRKVLSMPQVNIVKKTEVQTGGFSKESILPKRNSDKLIARKKDWDPKKYGGFDSPTVAYSVLVVAKVEKGKSKKLKSVKELLGITIMERSSFEKNPIDFLEAKGYKEVKKDLIIKLPKYSLFELENGRKRMLASAGELQKGNELALPSKYVNFLYLASHYEKLKGSPEDNEQKQLFVEQHKHYLDEIIEQISEFSKRVILADANLDKVLSAYNKHRDKPIREQAENIIHLFTLTNLGAPAAFKYFDTTIDRKRYTSTKEVLDATLIHQSITGLYETRIDLSQLGGDGGEAAAKGGGGGTLNIEDEYRLHETSKEPDVSLGSTWLSDFPQAWAETGGMGLAVRQAPLIIPLKATSTPVSIKQYPMSQEARLGIKPHIQRLLDQGILVPCQSPWNTPLLPVKKPGTNDYRPVQDLREVNKRVEDIHPTVPNPYNLLSGLPPSHQWYTVLDLKDAFFCLRLHPTSQPLFAFEWRDPEMGISGQLTWTRLPQGFKNSPTLFNEALHRDLADFRIQHPDLILLQYVDDLLLAATSELDCQQGTRALLQTLGNLGYRASAKKAQICQKQVKYLGYLLKEGQRWLTEARKETVMGQPTPKTPRQLREFLGKAGFCRLFIPGFAEMAAPLYPLTKPGTLFNWGPDQQKAYQEIKQALLTAPALGLPDLTKPFELFVDEKQGYAKGVLTQKLGPWRRPVAYLSKKLDPVAAGWPPCLRMVAAIAVLTKDAGKLTMGQPLVILAPHAVEALVKQPPDRWLSNARMTHYQALLLDTDRVQFGPVVALNPATLLPLPEEGLQHNCLDILAEAHGTRPDLTDQPLPDADHTWYTDGSSLLQEGQRKAGAAVTTETEVIWAKALPAGTSAQRAELIALTQALKMAEGKKLNVYTDSRYAFATAHIHGEIYRRRGWLTSEGKEIKNKDEILALLKALFLPKRLSIIHCPGHQKGHSAEARGNRMADQAARKAAITETPDTSTLLIENSSPSGGSKRTADGSEFEAGKRTADGSEFEKRTADGSEFESPKKKAKVE

SEQ ID NO: 2660 - protein, 2116 aa, synthetic construct
MPAAKRVKLDGGDKKYSIGLDIGTNSVGWAVITDEYKVPSKKFKVLGNTDRHSIKKNLIGALLFDSGETAEATRLKRTARRRYTRRKNRICYLQEIFSNEMAKVDDSFFHRLEESFLVEEDKKHERHPIFGNIVDEVAYHEKYPTIYHLRKKLVDSTDKADLRLIYLALAHMIKFRGHFLIEGDLNPDNSDVDKLFIQLVQTYNQLFEENPINASGVDAKAILSARLSKSRRLENLIAQLPGEKKNGLFGNLIALSLGLTPNFKSNFDLAEDAKLQLSKDTYDDDLDNLLAQIGDQYADLFLAAKNLSDAILLSDILRVNTEITKAPLSASMIKRYDEHHQDLTLLKALVRQQLPEKYKEIFFDQSKNGYAGYIDGGASQEEFYKFIKPILEKMDGTEELLVKLNREDLLRKQRTFDNGSIPHQIHLGELHAILRRQEDFYPFLKDNREKIEKILTFRIPYYVGPLARGNSRFAWMTRKSEETITPWNFEEVVDKGASAQSFIERMTNFDKNLPNEKVLPKHSLLYEYFTVYNELTKVKYVTEGMRKPAFLSGEQKKAIVDLLFKTNRKVTVKQLKEDYFKKIECFDSVEISGVEDRFNASLGTYHDLLKIIKDKDFLDNEENEDILEDIVLTLTLFEDREMIEERLKTYAHLFDDKVMKQLKRRRYTGWGRLSRKLINGIRDKQSGKTILDFLKSDGFANRNFMQLIHDDSLTFKEDIQKAQVSGQGDSLHEHIANLAGSPAIKKGILQTVKVVDELVKVMGRHKPENIVIEMARENQTTQKGQKNSRERMKRIEEGIKELGSQILKEHPVENTQLQNEKLYLYYLQNGRDMYVDQELDINRLSDYDVDHIVPQSFLKDDSIDNKVLTRSDKARGKSDNVPSEEVVKKMKNYWRQLLNAKLITQRKFDNLTKAERGGLSELDKAGFIKRQLVETRQITKHVAQILDSRMNTKYDENDKLIREVKVITLKSKLVSDFRKDFQFYKVREINNYHHAHDAYLNAVVGTALIKKYPKLESEFVYGDYKVYDVRKMIAKSEQEIGKATAKYFFYSNIMNFFKTEITLANGEIRKRPLIETNGETGEIVWDKGRDFATVRKVLSMPQVNIVKKTEVQTGGFSKESILPKRNSDKLIARKKDWDPKKYGGFDSPTVAYSVLVVAKVEKGKSKKLKSVKELLGITIMERSSFEKNPIDFLEAKGYKEVKKDLIIKLPKYSLFELENGRKRMLASAGELQKGNELALPSKYVNFLYLASHYEKLKGSPEDNEQKQLFVEQHKHYLDEIIEQISEFSKRVILADANLDKVLSAYNKHRDKPIREQAENIIHLFTLTNLGAPAAFKYFDTTIDRKRYTSTKEVLDATLIHQSITGLYETRIDLSQLGGDGGGGSGSSEAAAKGGTLNIEDEYRLHETSKEPDVSLGSTWLSDFPQAWAETGGMGLAVRQAPLIIPLKATSTPVSIKQYPMSQEARLGIKPHIQRLLDQGILVPCQSPWNTPLLPVKKPGTNDYRPVQDLREVNKRVEDIHPTVPNPYNLLSGLPPSHQWYTVLDLKDAFFCLRLHPTSQPLFAFEWRDPEMGISGQLTWTRLPQGFKNSPTLFNEALHRDLADFRIQHPDLILLQYVDDLLLAATSELDCQQGTRALLQTLGNLGYRASAKKAQICQKQVKYLGYLLKEGQRWLTEARKETVMGQPTPKTPRQLREFLGKAGFCRLFIPGFAEMAAPLYPLTKPGTLFNWGPDQQKAYQEIKQALLTAPALGLPDLTKPFELFVDEKQGYAKGVLTQKLGPWRRPVAYLSKKLDPVAAGWPPCLRMVAAIAVLTKDAGKLTMGQPLVILAPHAVEALVKQPPDRWLSNARMTHYQALLLDTDRVQFGPVVALNPATLLPLPEEGLQHNCLDILAEAHGTRPDLTDQPLPDADHTWYTDGSSLLQEGQRKAGAAVTTETEVIWAKALPAGTSAQRAELIALTQALKMAEGKKLNVYTDSRYAFATAHIHGEIYRRRGWLTSEGKEIKNKDEILALLKALFLPKRLSIIHCPGHQKGHSAEARGNRMADQAARKAAITETPDTSTLLIENSSPSGGSKRTADGSEFEAGKRTADGSEFEKRTADGSEFESPKKKAKVE

SEQ ID NO: 2661 - protein, 2116 aa, synthetic construct
MPAAKRVKLDGGDKKYSIGLDIGTNSVGWAVITDEYKVPSKKFKVLGNTDRHSIKKNLIGALLFDSGETAEATRLKRTARRRYTRRKNRICYLQEIFSNEMAKVDDSFFHRLEESFLVEEDKKHERHPIFGNIVDEVAYHEKYPTIYHLRKKLVDSTDKADLRLIYLALAHMIKFRGHFLIEGDLNPDNSDVDKLFIQLVQTYNQLFEENPINASGVDAKAILSARLSKSRRLENLIAQLPGEKKNGLFGNLIALSLGLTPNFKSNFDLAEDAKLQLSKDTYDDDLDNLLAQIGDQYADLFLAAKNLSDAILLSDILRVNTEITKAPLSASMIKRYDEHHQDLTLLKALVRQQLPEKYKEIFFDQSKNGYAGYIDGGASQEEFYKFIKPILEKMDGTEELLVKLNREDLLRKQRTFDNGSIPHQIHLGELHAILRRQEDFYPFLKDNREKIEKILTFRIPYYVGPLARGNSRFAWMTRKSEETITPWNFEEVVDKGASAQSFIERMTNFDKNLPNEKVLPKHSLLYEYFTVYNELTKVKYVTEGMRKPAFLSGEQKKAIVDLLFKTNRKVTVKQLKEDYFKKIECFDSVEISGVEDRFNASLGTYHDLLKIIKDKDFLDNEENEDILEDIVLTLTLFEDREMIEERLKTYAHLFDDKVMKQLKRRRYTGWGRLSRKLINGIRDKQSGKTILDFLKSDGFANRNFMQLIHDDSLTFKEDIQKAQVSGQGDSLHEHIANLAGSPAIKKGILQTVKVVDELVKVMGRHKPENIVIEMARENQTTQKGQKNSRERMKRIEEGIKELGSQILKEHPVENTQLQNEKLYLYYLQNGRDMYVDQELDINRLSDYDVDHIVPQSFLKDDSIDNKVLTRSDKARGKSDNVPSEEVVKKMKNYWRQLLNAKLITQRKFDNLTKAERGGLSELDKAGFIKRQLVETRQITKHVAQILDSRMNTKYDENDKLIREVKVITLKSKLVSDFRKDFQFYKVREINNYHHAHDAYLNAVVGTALIKKYPKLESEFVYGDYKVYDVRKMIAKSEQEIGKATAKYFFYSNIMNFFKTEITLANGEIRKRPLIETNGETGEIVWDKGRDFATVRKVLSMPQVNIVKKTEVQTGGFSKESILPKRNSDKLIARKKDWDPKKYGGFDSPTVAYSVLVVAKVEKGKSKKLKSVKELLGITIMERSSFEKNPIDFLEAKGYKEVKKDLIIKLPKYSLFELENGRKRMLASAGELQKGNELALPSKYVNFLYLASHYEKLKGSPEDNEQKQLFVEQHKHYLDEIIEQISEFSKRVILADANLDKVLSAYNKHRDKPIREQAENIIHLFTLTNLGAPAAFKYFDTTIDRKRYTSTKEVLDATLIHQSITGLYETRIDLSQLGGDGGGSSGGSEAAAKGGTLNIEDEYRLHETSKEPDVSLGSTWLSDFPQAWAETGGMGLAVRQAPLIIPLKATSTPVSIKQYPMSQEARLGIKPHIQRLLDQGILVPCQSPWNTPLLPVKKPGTNDYRPVQDLREVNKRVEDIHPTVPNPYNLLSGLPPSHQWYTVLDLKDAFFCLRLHPTSQPLFAFEWRDPEMGISGQLTWTRLPQGFKNSPTLFNEALHRDLADFRIQHPDLILLQYVDDLLLAATSELDCQQGTRALLQTLGNLGYRASAKKAQICQKQVKYLGYLLKEGQRWLTEARKETVMGQPTPKTPRQLREFLGKAGFCRLFIPGFAEMAAPLYPLTKPGTLFNWGPDQQKAYQEIKQALLTAPALGLPDLTKPFELFVDEKQGYAKGVLTQKLGPWRRPVAYLSKKLDPVAAGWPPCLRMVAAIAVLTKDAGKLTMGQPLVILAPHAVEALVKQPPDRWLSNARMTHYQALLLDTDRVQFGPVVALNPATLLPLPEEGLQHNCLDILAEAHGTRPDLTDQPLPDADHTWYTDGSSLLQEGQRKAGAAVTTETEVIWAKALPAGTSAQRAELIALTQALKMAEGKKLNVYTDSRYAFATAHIHGEIYRRRGWLTSEGKEIKNKDEILALLKALFLPKRLSIIHCPGHQKGHSAEARGNRMADQAARKAAITETPDTSTLLIENSSPSGGSKRTADGSEFEAGKRTADGSEFEKRTADGSEFESPKKKAKVE

SEQ ID NO: 2662 - protein, 2120 aa, synthetic construct
MPAAKRVKLDGGDKKYSIGLDIGTNSVGWAVITDEYKVPSKKFKVLGNTDRHSIKKNLIGALLFDSGETAEATRLKRTARRRYTRRKNRICYLQEIFSNEMAKVDDSFFHRLEESFLVEEDKKHERHPIFGNIVDEVAYHEKYPTIYHLRKKLVDSTDKADLRLIYLALAHMIKFRGHFLIEGDLNPDNSDVDKLFIQLVQTYNQLFEENPINASGVDAKAILSARLSKSRRLENLIAQLPGEKKNGLFGNLIALSLGLTPNFKSNFDLAEDAKLQLSKDTYDDDLDNLLAQIGDQYADLFLAAKNLSDAILLSDILRVNTEITKAPLSASMIKRYDEHHQDLTLLKALVRQQLPEKYKEIFFDQSKNGYAGYIDGGASQEEFYKFIKPILEKMDGTEELLVKLNREDLLRKQRTFDNGSIPHQIHLGELHAILRRQEDFYPFLKDNREKIEKILTFRIPYYVGPLARGNSRFAWMTRKSEETITPWNFEEVVDKGASAQSFIERMTNFDKNLPNEKVLPKHSLLYEYFTVYNELTKVKYVTEGMRKPAFLSGEQKKAIVDLLFKTNRKVTVKQLKEDYFKKIECFDSVEISGVEDRFNASLGTYHDLLKIIKDKDFLDNEENEDILEDIVLTLTLFEDREMIEERLKTYAHLFDDKVMKQLKRRRYTGWGRLSRKLINGIRDKQSGKTILDFLKSDGFANRNFMQLIHDDSLTFKEDIQKAQVSGQGDSLHEHIANLAGSPAIKKGILQTVKVVDELVKVMGRHKPENIVIEMARENQTTQKGQKNSRERMKRIEEGIKELGSQILKEHPVENTQLQNEKLYLYYLQNGRDMYVDQELDINRLSDYDVDHIVPQSFLKDDSIDNKVLTRSDKARGKSDNVPSEEVVKKMKNYWRQLLNAKLITQRKFDNLTKAERGGLSELDKAGFIKRQLVETRQITKHVAQILDSRMNTKYDENDKLIREVKVITLKSKLVSDFRKDFQFYKVREINNYHHAHDAYLNAVVGTALIKKYPKLESEFVYGDYKVYDVRKMIAKSEQEIGKATAKYFFYSNIMNFFKTEITLANGEIRKRPLIETNGETGEIVWDKGRDFATVRKVLSMPQVNIVKKTEVQTGGFSKESILPKRNSDKLIARKKDWDPKKYGGFDSPTVAYSVLVVAKVEKGKSKKLKSVKELLGITIMERSSFEKNPIDFLEAKGYKEVKKDLIIKLPKYSLFELENGRKRMLASAGELQKGNELALPSKYVNFLYLASHYEKLKGSPEDNEQKQLFVEQHKHYLDEIIEQISEFSKRVILADANLDKVLSAYNKHRDKPIREQAENIIHLFTLTNLGAPAAFKYFDTTIDRKRYTSTKEVLDATLIHQSITGLYETRIDLSQLGGDGGGGGGSGGGGSGGGGSGGTLNIEDEYRLHETSKEPDVSLGSTWLSDFPQAWAETGGMGLAVRQAPLIIPLKATSTPVSIKQYPMSQEARLGIKPHIQRLLDQGILVPCQSPWNTPLLPVKKPGTNDYRPVQDLREVNKRVEDIHPTVPNPYNLLSGLPPSHQWYTVLDLKDAFFCLRLHPTSQPLFAFEWRDPEMGISGQLTWTRLPQGFKNSPTLFNEALHRDLADFRIQHPDLILLQYVDDLLLAATSELDCQQGTRALLQTLGNLGYRASAKKAQICQKQVKYLGYLLKEGQRWLTEARKETVMGQPTPKTPRQLREFLGKAGFCRLFIPGFAEMAAPLYPLTKPGTLFNWGPDQQKAYQEIKQALLTAPALGLPDLTKPFELFVDEKQGYAKGVLTQKLGPWRRPVAYLSKKLDPVAAGWPPCLRMVAAIAVLTKDAGKLTMGQPLVILAPHAVEALVKQPPDRWLSNARMTHYQALLLDTDRVQFGPVVALNPATLLPLPEEGLQHNCLDILAEAHGTRPDLTDQPLPDADHTWYTDGSSLLQEGQRKAGAAVTTETEVIWAKALPAGTSAQRAELIALTQALKMAEGKKLNVYTDSRYAFATAHIHGEIYRRRGWLTSEGKEIKNKDEILALLKALFLPKRLSIIHCPGHQKGHSAEARGNRMADQAARKAAITETPDTSTLLIENSSPSGGSKRTADGSEFEAGKRTADGSEFEKRTADGSEFESPKKKAKVE

SEQ ID NO: 2663 - protein, 2121 aa, synthetic construct
MPAAKRVKLDGGDKKYSIGLDIGTNSVGWAVITDEYKVPSKKFKVLGNTDRHSIKKNLIGALLFDSGETAEATRLKRTARRRYTRRKNRICYLQEIFSNEMAKVDDSFFHRLEESFLVEEDKKHERHPIFGNIVDEVAYHEKYPTIYHLRKKLVDSTDKADLRLIYLALAHMIKFRGHFLIEGDLNPDNSDVDKLFIQLVQTYNQLFEENPINASGVDAKAILSARLSKSRRLENLIAQLPGEKKNGLFGNLIALSLGLTPNFKSNFDLAEDAKLQLSKDTYDDDLDNLLAQIGDQYADLFLAAKNLSDAILLSDILRVNTEITKAPLSASMIKRYDEHHQDLTLLKALVRQQLPEKYKEIFFDQSKNGYAGYIDGGASQEEFYKFIKPILEKMDGTEELLVKLNREDLLRKQRTFDNGSIPHQIHLGELHAILRRQEDFYPFLKDNREKIEKILTFRIPYYVGPLARGNSRFAWMTRKSEETITPWNFEEVVDKGASAQSFIERMTNFDKNLPNEKVLPKHSLLYEYFTVYNELTKVKYVTEGMRKPAFLSGEQKKAIVDLLFKTNRKVTVKQLKEDYFKKIECFDSVEISGVEDRFNASLGTYHDLLKIIKDKDFLDNEENEDILEDIVLTLTLFEDREMIEERLKTYAHLFDDKVMKQLKRRRYTGWGRLSRKLINGIRDKQSGKTILDFLKSDGFANRNFMQLIHDDSLTFKEDIQKAQVSGQGDSLHEHIANLAGSPAIKKGILQTVKVVDELVKVMGRHKPENIVIEMARENQTTQKGQKNSRERMKRIEEGIKELGSQILKEHPVENTQLQNEKLYLYYLQNGRDMYVDQELDINRLSDYDVDHIVPQSFLKDDSIDNKVLTRSDKARGKSDNVPSEEVVKKMKNYWRQLLNAKLITQRKFDNLTKAERGGLSELDKAGFIKRQLVETRQITKHVAQILDSRMNTKYDENDKLIREVKVITLKSKLVSDFRKDFQFYKVREINNYHHAHDAYLNAVVGTALIKKYPKLESEFVYGDYKVYDVRKMIAKSEQEIGKATAKYFFYSNIMNFFKTEITLANGEIRKRPLIETNGETGEIVWDKGRDFATVRKVLSMPQVNIVKKTEVQTGGFSKESILPKRNSDKLIARKKDWDPKKYGGFDSPTVAYSVLVVAKVEKGKSKKLKSVKELLGITIMERSSFEKNPIDFLEAKGYKEVKKDLIIKLPKYSLFELENGRKRMLASAGELQKGNELALPSKYVNFLYLASHYEKLKGSPEDNEQKQLFVEQHKHYLDEIIEQISEFSKRVILADANLDKVLSAYNKHRDKPIREQAENIIHLFTLTNLGAPAAFKYFDTTIDRKRYTSTKEVLDATLIHQSITGLYETRIDLSQLGGDGGSGSETPGTSESATPESGGTLNIEDEYRLHETSKEPDVSLGSTWLSDFPQAWAETGGMGLAVRQAPLIIPLKATSTPVSIKQYPMSQEARLGIKPHIQRLLDQGILVPCQSPWNTPLLPVKKPGTNDYRPVQDLREVNKRVEDIHPTVPNPYNLLSGLPPSHQWYTVLDLKDAFFCLRLHPTSQPLFAFEWRDPEMGISGQLTWTRLPQGFKNSPTLFNEALHRDLADFRIQHPDLILLQYVDDLLLAATSELDCQQGTRALLQTLGNLGYRASAKKAQICQKQVKYLGYLLKEGQRWLTEARKETVMGQPTPKTPRQLREFLGKAGFCRLFIPGFAEMAAPLYPLTKPGTLFNWGPDQQKAYQEIKQALLTAPALGLPDLTKPFELFVDEKQGYAKGVLTQKLGPWRRPVAYLSKKLDPVAAGWPPCLRMVAAIAVLTKDAGKLTMGQPLVILAPHAVEALVKQPPDRWLSNARMTHYQALLLDTDRVQFGPVVALNPATLLPLPEEGLQHNCLDILAEAHGTRPDLTDQPLPDADHTWYTDGSSLLQEGQRKAGAAVTTETEVIWAKALPAGTSAQRAELIALTQALKMAEGKKLNVYTDSRYAFATAHIHGEIYRRRGWLTSEGKEIKNKDEILALLKALFLPKRLSIIHCPGHQKGHSAEARGNRMADQAARKAAITETPDTSTLLIENSSPSGGSKRTADGSEFEAGKRTADGSEFEKRTADGSEFESPKKKAKVE

SEQ ID NO: 2664 - protein, 2114 aa, synthetic construct
MPAAKRVKLDGGDKKYSIGLDIGTNSVGWAVITDEYKVPSKKFKVLGNTDRHSIKKNLIGALLFDSGETAEATRLKRTARRRYTRRKNRICYLQEIFSNEMAKVDDSFFHRLEESFLVEEDKKHERHPIFGNIVDEVAYHEKYPTIYHLRKKLVDSTDKADLRLIYLALAHMIKFRGHFLIEGDLNPDNSDVDKLFIQLVQTYNQLFEENPINASGVDAKAILSARLSKSRRLENLIAQLPGEKKNGLFGNLIALSLGLTPNFKSNFDLAEDAKLQLSKDTYDDDLDNLLAQIGDQYADLFLAAKNLSDAILLSDILRVNTEITKAPLSASMIKRYDEHHQDLTLLKALVRQQLPEKYKEIFFDQSKNGYAGYIDGGASQEEFYKFIKPILEKMDGTEELLVKLNREDLLRKQRTFDNGSIPHQIHLGELHAILRRQEDFYPFLKDNREKIEKILTFRIPYYVGPLARGNSRFAWMTRKSEETITPWNFEEVVDKGASAQSFIERMTNFDKNLPNEKVLPKHSLLYEYFTVYNELTKVKYVTEGMRKPAFLSGEQKKAIVDLLFKTNRKVTVKQLKEDYFKKIECFDSVEISGVEDRFNASLGTYHDLLKIIKDKDFLDNEENEDILEDIVLTLTLFEDREMIEERLKTYAHLFDDKVMKQLKRRRYTGWGRLSRKLINGIRDKQSGKTILDFLKSDGFANRNFMQLIHDDSLTFKEDIQKAQVSGQGDSLHEHIANLAGSPAIKKGILQTVKVVDELVKVMGRHKPENIVIEMARENQTTQKGQKNSRERMKRIEEGIKELGSQILKEHPVENTQLQNEKLYLYYLQNGRDMYVDQELDINRLSDYDVDHIVPQSFLKDDSIDNKVLTRSDKARGKSDNVPSEEVVKKMKNYWRQLLNAKLITQRKFDNLTKAERGGLSELDKAGFIKRQLVETRQITKHVAQILDSRMNTKYDENDKLIREVKVITLKSKLVSDFRKDFQFYKVREINNYHHAHDAYLNAVVGTALIKKYPKLESEFVYGDYKVYDVRKMIAKSEQEIGKATAKYFFYSNIMNFFKTEITLANGEIRKRPLIETNGETGEIVWDKGRDFATVRKVLSMPQVNIVKKTEVQTGGFSKESILPKRNSDKLIARKKDWDPKKYGGFDSPTVAYSVLVVAKVEKGKSKKLKSVKELLGITIMERSSFEKNPIDFLEAKGYKEVKKDLIIKLPKYSLFELENGRKRMLASAGELQKGNELALPSKYVNFLYLASHYEKLKGSPEDNEQKQLFVEQHKHYLDEIIEQISEFSKRVILADANLDKVLSAYNKHRDKPIREQAENIIHLFTLTNLGAPAAFKYFDTTIDRKRYTSTKEVLDATLIHQSITGLYETRIDLSQLGGDGGGGGGSSPAPGGTLNIEDEYRLHETSKEPDVSLGSTWLSDFPQAWAETGGMGLAVRQAPLIIPLKATSTPVSIKQYPMSQEARLGIKPHIQRLLDQGILVPCQSPWNTPLLPVKKPGTNDYRPVQDLREVNKRVEDIHPTVPNPYNLLSGLPPSHQWYTVLDLKDAFFCLRLHPTSQPLFAFEWRDPEMGISGQLTWTRLPQGFKNSPTLFNEALHRDLADFRIQHPDLILLQYVDDLLLAATSELDCQQGTRALLQTLGNLGYRASAKKAQICQKQVKYLGYLLKEGQRWLTEARKETVMGQPTPKTPRQLREFLGKAGFCRLFIPGFAEMAAPLYPLTKPGTLFNWGPDQQKAYQEIKQALLTAPALGLPDLTKPFELFVDEKQGYAKGVLTQKLGPWRRPVAYLSKKLDPVAAGWPPCLRMVAAIAVLTKDAGKLTMGQPLVILAPHAVEALVKQPPDRWLSNARMTHYQALLLDTDRVQFGPVVALNPATLLPLPEEGLQHNCLDILAEAHGTRPDLTDQPLPDADHTWYTDGSSLLQEGQRKAGAAVTTETEVIWAKALPAGTSAQRAELIALTQALKMAEGKKLNVYTDSRYAFATAHIHGEIYRRRGWLTSEGKEIKNKDEILALLKALFLPKRLSIIHCPGHQKGHSAEARGNRMADQAARKAAITETPDTSTLLIENSSPSGGSKRTADGSEFEAGKRTADGSEFEKRTADGSEFESPKKKAKVE

SEQ ID NO: 2665 - protein, 2117 aa, synthetic construct
MPAAKRVKLDGGDKKYSIGLDIGTNSVGWAVITDEYKVPSKKFKVLGNTDRHSIKKNLIGALLFDSGETAEATRLKRTARRRYTRRKNRICYLQEIFSNEMAKVDDSFFHRLEESFLVEEDKKHERHPIFGNIVDEVAYHEKYPTIYHLRKKLVDSTDKADLRLIYLALAHMIKFRGHFLIEGDLNPDNSDVDKLFIQLVQTYNQLFEENPINASGVDAKAILSARLSKSRRLENLIAQLPGEKKNGLFGNLIALSLGLTPNFKSNFDLAEDAKLQLSKDTYDDDLDNLLAQIGDQYADLFLAAKNLSDAILLSDILRVNTEITKAPLSASMIKRYDEHHQDLTLLKALVRQQLPEKYKEIFFDQSKNGYAGYIDGGASQEEFYKFIKPILEKMDGTEELLVKLNREDLLRKQRTFDNGSIPHQIHLGELHAILRRQEDFYPFLKDNREKIEKILTFRIPYYVGPLARGNSRFAWMTRKSEETITPWNFEEVVDKGASAQSFIERMTNFDKNLPNEKVLPKHSLLYEYFTVYNELTKVKYVTEGMRKPAFLSGEQKKAIVDLLFKTNRKVTVKQLKEDYFKKIECFDSVEISGVEDRFNASLGTYHDLLKIIKDKDFLDNEENEDILEDIVLTLTLFEDREMIEERLKTYAHLFDDKVMKQLKRRRYTGWGRLSRKLINGIRDKQSGKTILDFLKSDGFANRNFMQLIHDDSLTFKEDIQKAQVSGQGDSLHEHIANLAGSPAIKKGILQTVKVVDELVKVMGRHKPENIVIEMARENQTTQKGQKNSRERMKRIEEGIKELGSQILKEHPVENTQLQNEKLYLYYLQNGRDMYVDQELDINRLSDYDVDHIVPQSFLKDDSIDNKVLTRSDKARGKSDNVPSEEVVKKMKNYWRQLLNAKLITQRKFDNLTKAERGGLSELDKAGFIKRQLVETRQITKHVAQILDSRMNTKYDENDKLIREVKVITLKSKLVSDFRKDFQFYKVREINNYHHAHDAYLNAVVGTALIKKYPKLESEFVYGDYKVYDVRKMIAKSEQEIGKATAKYFFYSNIMNFFKTEITLANGEIRKRPLIETNGETGEIVWDKGRDFATVRKVLSMPQVNIVKKTEVQTGGFSKESILPKRNSDKLIARKKDWDPKKYGGFDSPTVAYSVLVVAKVEKGKSKKLKSVKELLGITIMERSSFEKNPIDFLEAKGYKEVKKDLIIKLPKYSLFELENGRKRMLASAGELQKGNELALPSKYVNFLYLASHYEKLKGSPEDNEQKQLFVEQHKHYLDEIIEQISEFSKRVILADANLDKVLSAYNKHRDKPIREQAENIIHLFTLTNLGAPAAFKYFDTTIDRKRYTSTKEVLDATLIHQSITGLYETRIDLSQLGGDGGGSSGSSGSSGSSGGTLNIEDEYRLHETSKEPDVSLGSTWLSDFPQAWAETGGMGLAVRQAPLIIPLKATSTPVSIKQYPMSQEARLGIKPHIQRLLDQGILVPCQSPWNTPLLPVKKPGTNDYRPVQDLREVNKRVEDIHPTVPNPYNLLSGLPPSHQWYTVLDLKDAFFCLRLHPTSQPLFAFEWRDPEMGISGQLTWTRLPQGFKNSPTLFNEALHRDLADFRIQHPDLILLQYVDDLLLAATSELDCQQGTRALLQTLGNLGYRASAKKAQICQKQVKYLGYLLKEGQRWLTEARKETVMGQPTPKTPRQLREFLGKAGFCRLFIPGFAEMAAPLYPLTKPGTLFNWGPDQQKAYQEIKQALLTAPALGLPDLTKPFELFVDEKQGYAKGVLTQKLGPWRRPVAYLSKKLDPVAAGWPPCLRMVAAIAVLTKDAGKLTMGQPLVILAPHAVEALVKQPPDRWLSNARMTHYQALLLDTDRVQFGPVVALNPATLLPLPEEGLQHNCLDILAEAHGTRPDLTDQPLPDADHTWYTDGSSLLQEGQRKAGAAVTTETEVIWAKALPAGTSAQRAELIALTQALKMAEGKKLNVYTDSRYAFATAHIHGEIYRRRGWLTSEGKEIKNKDEILALLKALFLPKRLSIIHCPGHQKGHSAEARGNRMADQAARKAAITETPDTSTLLIENSSPSGGSKRTADGSEFEAGKRTADGSEFEKRTADGSEFESPKKKAKVE

SEQ ID NO: 2666 - protein, 2116 aa, synthetic construct
MPAAKRVKLDGGDKKYSIGLDIGTNSVGWAVITDEYKVPSKKFKVLGNTDRHSIKKNLIGALLFDSGETAEATRLKRTARRRYTRRKNRICYLQEIFSNEMAKVDDSFFHRLEESFLVEEDKKHERHPIFGNIVDEVAYHEKYPTIYHLRKKLVDSTDKADLRLIYLALAHMIKFRGHFLIEGDLNPDNSDVDKLFIQLVQTYNQLFEENPINASGVDAKAILSARLSKSRRLENLIAQLPGEKKNGLFGNLIALSLGLTPNFKSNFDLAEDAKLQLSKDTYDDDLDNLLAQIGDQYADLFLAAKNLSDAILLSDILRVNTEITKAPLSASMIKRYDEHHQDLTLLKALVRQQLPEKYKEIFFDQSKNGYAGYIDGGASQEEFYKFIKPILEKMDGTEELLVKLNREDLLRKQRTFDNGSIPHQIHLGELHAILRRQEDFYPFLKDNREKIEKILTFRIPYYVGPLARGNSRFAWMTRKSEETITPWNFEEVVDKGASAQSFIERMTNFDKNLPNEKVLPKHSLLYEYFTVYNELTKVKYVTEGMRKPAFLSGEQKKAIVDLLFKTNRKVTVKQLKEDYFKKIECFDSVEISGVEDRFNASLGTYHDLLKIIKDKDFLDNEENEDILEDIVLTLTLFEDREMIEERLKTYAHLFDDKVMKQLKRRRYTGWGRLSRKLINGIRDKQSGKTILDFLKSDGFANRNFMQLIHDDSLTFKEDIQKAQVSGQGDSLHEHIANLAGSPAIKKGILQTVKVVDELVKVMGRHKPENIVIEMARENQTTQKGQKNSRERMKRIEEGIKELGSQILKEHPVENTQLQNEKLYLYYLQNGRDMYVDQELDINRLSDYDVDHIVPQSFLKDDSIDNKVLTRSDKARGKSDNVPSEEVVKKMKNYWRQLLNAKLITQRKFDNLTKAERGGLSELDKAGFIKRQLVETRQITKHVAQILDSRMNTKYDENDKLIREVKVITLKSKLVSDFRKDFQFYKVREINNYHHAHDAYLNAVVGTALIKKYPKLESEFVYGDYKVYDVRKMIAKSEQEIGKATAKYFFYSNIMNFFKTEITLANGEIRKRPLIETNGETGEIVWDKGRDFATVRKVLSMPQVNIVKKTEVQTGGFSKESILPKRNSDKLIARKKDWDPKKYGGFDSPTVAYSVLVVAKVEKGKSKKLKSVKELLGITIMERSSFEKNPIDFLEAKGYKEVKKDLIIKLPKYSLFELENGRKRMLASAGELQKGNELALPSKYVNFLYLASHYEKLKGSPEDNEQKQLFVEQHKHYLDEIIEQISEFSKRVILADANLDKVLSAYNKHRDKPIREQAENIIHLFTLTNLGAPAAFKYFDTTIDRKRYTSTKEVLDATLIHQSITGLYETRIDLSQLGGDGGEAAAKGGSGSSGGTLNIEDEYRLHETSKEPDVSLGSTWLSDFPQAWAETGGMGLAVRQAPLIIPLKATSTPVSIKQYPMSQEARLGIKPHIQRLLDQGILVPCQSPWNTPLLPVKKPGTNDYRPVQDLREVNKRVEDIHPTVPNPYNLLSGLPPSHQWYTVLDLKDAFFCLRLHPTSQPLFAFEWRDPEMGISGQLTWTRLPQGFKNSPTLFNEALHRDLADFRIQHPDLILLQYVDDLLLAATSELDCQQGTRALLQTLGNLGYRASAKKAQICQKQVKYLGYLLKEGQRWLTEARKETVMGQPTPKTPRQLREFLGKAGFCRLFIPGFAEMAAPLYPLTKPGTLFNWGPDQQKAYQEIKQALLTAPALGLPDLTKPFELFVDEKQGYAKGVLTQKLGPWRRPVAYLSKKLDPVAAGWPPCLRMVAAIAVLTKDAGKLTMGQPLVILAPHAVEALVKQPPDRWLSNARMTHYQALLLDTDRVQFGPVVALNPATLLPLPEEGLQHNCLDILAEAHGTRPDLTDQPLPDADHTWYTDGSSLLQEGQRKAGAAVTTETEVIWAKALPAGTSAQRAELIALTQALKMAEGKKLNVYTDSRYAFATAHIHGEIYRRRGWLTSEGKEIKNKDEILALLKALFLPKRLSIIHCPGHQKGHSAEARGNRMADQAARKAAITETPDTSTLLIENSSPSGGSKRTADGSEFEAGKRTADGSEFEKRTADGSEFESPKKKAKVE

SEQ ID NO: 2667 - protein, 2114 aa, synthetic construct
MPAAKRVKLDGGDKKYSIGLDIGTNSVGWAVITDEYKVPSKKFKVLGNTDRHSIKKNLIGALLFDSGETAEATRLKRTARRRYTRRKNRICYLQEIFSNEMAKVDDSFFHRLEESFLVEEDKKHERHPIFGNIVDEVAYHEKYPTIYHLRKKLVDSTDKADLRLIYLALAHMIKFRGHFLIEGDLNPDNSDVDKLFIQLVQTYNQLFEENPINASGVDAKAILSARLSKSRRLENLIAQLPGEKKNGLFGNLIALSLGLTPNFKSNFDLAEDAKLQLSKDTYDDDLDNLLAQIGDQYADLFLAAKNLSDAILLSDILRVNTEITKAPLSASMIKRYDEHHQDLTLLKALVRQQLPEKYKEIFFDQSKNGYAGYIDGGASQEEFYKFIKPILEKMDGTEELLVKLNREDLLRKQRTFDNGSIPHQIHLGELHAILRRQEDFYPFLKDNREKIEKILTFRIPYYVGPLARGNSRFAWMTRKSEETITPWNFEEVVDKGASAQSFIERMTNFDKNLPNEKVLPKHSLLYEYFTVYNELTKVKYVTEGMRKPAFLSGEQKKAIVDLLFKTNRKVTVKQLKEDYFKKIECFDSVEISGVEDRFNASLGTYHDLLKIIKDKDFLDNEENEDILEDIVLTLTLFEDREMIEERLKTYAHLFDDKVMKQLKRRRYTGWGRLSRKLINGIRDKQSGKTILDFLKSDGFANRNFMQLIHDDSLTFKEDIQKAQVSGQGDSLHEHIANLAGSPAIKKGILQTVKVVDELVKVMGRHKPENIVIEMARENQTTQKGQKNSRERMKRIEEGIKELGSQILKEHPVENTQLQNEKLYLYYLQNGRDMYVDQELDINRLSDYDVDHIVPQSFLKDDSIDNKVLTRSDKARGKSDNVPSEEVVKKMKNYWRQLLNAKLITQRKFDNLTKAERGGLSELDKAGFIKRQLVETRQITKHVAQILDSRMNTKYDENDKLIREVKVITLKSKLVSDFRKDFQFYKVREINNYHHAHDAYLNAVVGTALIKKYPKLESEFVYGDYKVYDVRKMIAKSEQEIGKATAKYFFYSNIMNFFKTEITLANGEIRKRPLIETNGETGEIVWDKGRDFATVRKVLSMPQVNIVKKTEVQTGGFSKESILPKRNSDKLIARKKDWDPKKYGGFDSPTVAYSVLVVAKVEKGKSKKLKSVKELLGITIMERSSFEKNPIDFLEAKGYKEVKKDLIIKLPKYSLFELENGRKRMLASAGELQKGNELALPSKYVNFLYLASHYEKLKGSPEDNEQKQLFVEQHKHYLDEIIEQISEFSKRVILADANLDKVLSAYNKHRDKPIREQAENIIHLFTLTNLGAPAAFKYFDTTIDRKRYTSTKEVLDATLIHQSITGLYETRIDLSQLGGDGGGGSPAPGGGGGTLNIEDEYRLHETSKEPDVSLGSTWLSDFPQAWAETGGMGLAVRQAPLIIPLKATSTPVSIKQYPMSQEARLGIKPHIQRLLDQGILVPCQSPWNTPLLPVKKPGTNDYRPVQDLREVNKRVEDIHPTVPNPYNLLSGLPPSHQWYTVLDLKDAFFCLRLHPTSQPLFAFEWRDPEMGISGQLTWTRLPQGFKNSPTLFNEALHRDLADFRIQHPDLILLQYVDDLLLAATSELDCQQGTRALLQTLGNLGYRASAKKAQICQKQVKYLGYLLKEGQRWLTEARKETVMGQPTPKTPRQLREFLGKAGFCRLFIPGFAEMAAPLYPLTKPGTLFNWGPDQQKAYQEIKQALLTAPALGLPDLTKPFELFVDEKQGYAKGVLTQKLGPWRRPVAYLSKKLDPVAAGWPPCLRMVAAIAVLTKDAGKLTMGQPLVILAPHAVEALVKQPPDRWLSNARMTHYQALLLDTDRVQFGPVVALNPATLLPLPEEGLQHNCLDILAEAHGTRPDLTDQPLPDADHTWYTDGSSLLQEGQRKAGAAVTTETEVIWAKALPAGTSAQRAELIALTQALKMAEGKKLNVYTDSRYAFATAHIHGEIYRRRGWLTSEGKEIKNKDEILALLKALFLPKRLSIIHCPGHQKGHSAEARGNRMADQAARKAAITETPDTSTLLIENSSPSGGSKRTADGSEFEAGKRTADGSEFEKRTADGSEFESPKKKAKVE

SEQ ID NO: 2668 - protein, 2116 aa, synthetic construct
MPAAKRVKLDGGDKKYSIGLDIGTNSVGWAVITDEYKVPSKKFKVLGNTDRHSIKKNLIGALLFDSGETAEATRLKRTARRRYTRRKNRICYLQEIFSNEMAKVDDSFFHRLEESFLVEEDKKHERHPIFGNIVDEVAYHEKYPTIYHLRKKLVDSTDKADLRLIYLALAHMIKFRGHFLIEGDLNPDNSDVDKLFIQLVQTYNQLFEENPINASGVDAKAILSARLSKSRRLENLIAQLPGEKKNGLFGNLIALSLGLTPNFKSNFDLAEDAKLQLSKDTYDDDLDNLLAQIGDQYADLFLAAKNLSDAILLSDILRVNTEITKAPLSASMIKRYDEHHQDLTLLKALVRQQLPEKYKEIFFDQSKNGYAGYIDGGASQEEFYKFIKPILEKMDGTEELLVKLNREDLLRKQRTFDNGSIPHQIHLGELHAILRRQEDFYPFLKDNREKIEKILTFRIPYYVGPLARGNSRFAWMTRKSEETITPWNFEEVVDKGASAQSFIERMTNFDKNLPNEKVLPKHSLLYEYFTVYNELTKVKYVTEGMRKPAFLSGEQKKAIVDLLFKTNRKVTVKQLKEDYFKKIECFDSVEISGVEDRFNASLGTYHDLLKIIKDKDFLDNEENEDILEDIVLTLTLFEDREMIEERLKTYAHLFDDKVMKQLKRRRYTGWGRLSRKLINGIRDKQSGKTILDFLKSDGFANRNFMQLIHDDSLTFKEDIQKAQVSGQGDSLHEHIANLAGSPAIKKGILQTVKVVDELVKVMGRHKPENIVIEMARENQTTQKGQKNSRERMKRIEEGIKELGSQILKEHPVENTQLQNEKLYLYYLQNGRDMYVDQELDINRLSDYDVDHIVPQSFLKDDSIDNKVLTRSDKARGKSDNVPSEEVVKKMKNYWRQLLNAKLITQRKFDNLTKAERGGLSELDKAGFIKRQLVETRQITKHVAQILDSRMNTKYDENDKLIREVKVITLKSKLVSDFRKDFQFYKVREINNYHHAHDAYLNAVVGTALIKKYPKLESEFVYGDYKVYDVRKMIAKSEQEIGKATAKYFFYSNIMNFFKTEITLANGEIRKRPLIETNGETGEIVWDKGRDFATVRKVLSMPQVNIVKKTEVQTGGFSKESILPKRNSDKLIARKKDWDPKKYGGFDSPTVAYSVLVVAKVEKGKSKKLKSVKELLGITIMERSSFEKNPIDFLEAKGYKEVKKDLIIKLPKYSLFELENGRKRMLASAGELQKGNELALPSKYVNFLYLASHYEKLKGSPEDNEQKQLFVEQHKHYLDEIIEQISEFSKRVILADANLDKVLSAYNKHRDKPIREQAENIIHLFTLTNLGAPAAFKYFDTTIDRKRYTSTKEVLDATLIHQSITGLYETRIDLSQLGGDGGPAPEAAAKGGGGGTLNIEDEYRLHETSKEPDVSLGSTWLSDFPQAWAETGGMGLAVRQAPLIIPLKATSTPVSIKQYPMSQEARLGIKPHIQRLLDQGILVPCQSPWNTPLLPVKKPGTNDYRPVQDLREVNKRVEDIHPTVPNPYNLLSGLPPSHQWYTVLDLKDAFFCLRLHPTSQPLFAFEWRDPEMGISGQLTWTRLPQGFKNSPTLFNEALHRDLADFRIQHPDLILLQYVDDLLLAATSELDCQQGTRALLQTLGNLGYRASAKKAQICQKQVKYLGYLLKEGQRWLTEARKETVMGQPTPKTPRQLREFLGKAGFCRLFIPGFAEMAAPLYPLTKPGTLFNWGPDQQKAYQEIKQALLTAPALGLPDLTKPFELFVDEKQGYAKGVLTQKLGPWRRPVAYLSKKLDPVAAGWPPCLRMVAAIAVLTKDAGKLTMGQPLVILAPHAVEALVKQPPDRWLSNARMTHYQALLLDTDRVQFGPVVALNPATLLPLPEEGLQHNCLDILAEAHGTRPDLTDQPLPDADHTWYTDGSSLLQEGQRKAGAAVTTETEVIWAKALPAGTSAQRAELIALTQALKMAEGKKLNVYTDSRYAFATAHIHGEIYRRRGWLTSEGKEIKNKDEILALLKALFLPKRLSIIHCPGHQKGHSAEARGNRMADQAARKAAITETPDTSTLLIENSSPSGGSKRTADGSEFEAGKRTADGSEFEKRTADGSEFESPKKKAKVE

SEQ ID NO: 2669 - protein, 2120 aa, synthetic construct
MPAAKRVKLDGGDKKYSIGLDIGTNSVGWAVITDEYKVPSKKFKVLGNTDRHSIKKNLIGALLFDSGETAEATRLKRTARRRYTRRKNRICYLQEIFSNEMAKVDDSFFHRLEESFLVEEDKKHERHPIFGNIVDEVAYHEKYPTIYHLRKKLVDSTDKADLRLIYLALAHMIKFRGHFLIEGDLNPDNSDVDKLFIQLVQTYNQLFEENPINASGVDAKAILSARLSKSRRLENLIAQLPGEKKNGLFGNLIALSLGLTPNFKSNFDLAEDAKLQLSKDTYDDDLDNLLAQIGDQYADLFLAAKNLSDAILLSDILRVNTEITKAPLSASMIKRYDEHHQDLTLLKALVRQQLPEKYKEIFFDQSKNGYAGYIDGGASQEEFYKFIKPILEKMDGTEELLVKLNREDLLRKQRTFDNGSIPHQIHLGELHAILRRQEDFYPFLKDNREKIEKILTFRIPYYVGPLARGNSRFAWMTRKSEETITPWNFEEVVDKGASAQSFIERMTNFDKNLPNEKVLPKHSLLYEYFTVYNELTKVKYVTEGMRKPAFLSGEQKKAIVDLLFKTNRKVTVKQLKEDYFKKIECFDSVEISGVEDRFNASLGTYHDLLKIIKDKDFLDNEENEDILEDIVLTLTLFEDREMIEERLKTYAHLFDDKVMKQLKRRRYTGWGRLSRKLINGIRDKQSGKTILDFLKSDGFANRNFMQLIHDDSLTFKEDIQKAQVSGQGDSLHEHIANLAGSPAIKKGILQTVKVVDELVKVMGRHKPENIVIEMARENQTTQKGQKNSRERMKRIEEGIKELGSQILKEHPVENTQLQNEKLYLYYLQNGRDMYVDQELDINRLSDYDVDHIVPQSFLKDDSIDNKVLTRSDKARGKSDNVPSEEVVKKMKNYWRQLLNAKLITQRKFDNLTKAERGGLSELDKAGFIKRQLVETRQITKHVAQILDSRMNTKYDENDKLIREVKVITLKSKLVSDFRKDFQFYKVREINNYHHAHDAYLNAVVGTALIKKYPKLESEFVYGDYKVYDVRKMIAKSEQEIGKATAKYFFYSNIMNFFKTEITLANGEIRKRPLIETNGETGEIVWDKGRDFATVRKVLSMPQVNIVKKTEVQTGGFSKESILPKRNSDKLIARKKDWDPKKYGGFDSPTVAYSVLVVAKVEKGKSKKLKSVKELLGITIMERSSFEKNPIDFLEAKGYKEVKKDLIIKLPKYSLFELENGRKRMLASAGELQKGNELALPSKYVNFLYLASHYEKLKGSPEDNEQKQLFVEQHKHYLDEIIEQISEFSKRVILADANLDKVLSAYNKHRDKPIREQAENIIHLFTLTNLGAPAAFKYFDTTIDRKRYTSTKEVLDATLIHQSITGLYETRIDLSQLGGDGGGSSGSSGSSGSSGSSGGTLNIEDEYRLHETSKEPDVSLGSTWLSDFPQAWAETGGMGLAVRQAPLIIPLKATSTPVSIKQYPMSQEARLGIKPHIQRLLDQGILVPCQSPWNTPLLPVKKPGTNDYRPVQDLREVNKRVEDIHPTVPNPYNLLSGLPPSHQWYTVLDLKDAFFCLRLHPTSQPLFAFEWRDPEMGISGQLTWTRLPQGFKNSPTLFNEALHRDLADFRIQHPDLILLQYVDDLLLAATSELDCQQGTRALLQTLGNLGYRASAKKAQICQKQVKYLGYLLKEGQRWLTEARKETVMGQPTPKTPRQLREFLGKAGFCRLFIPGFAEMAAPLYPLTKPGTLFNWGPDQQKAYQEIKQALLTAPALGLPDLTKPFELFVDEKQGYAKGVLTQKLGPWRRPVAYLSKKLDPVAAGWPPCLRMVAAIAVLTKDAGKLTMGQPLVILAPHAVEALVKQPPDRWLSNARMTHYQALLLDTDRVQFGPVVALNPATLLPLPEEGLQHNCLDILAEAHGTRPDLTDQPLPDADHTWYTDGSSLLQEGQRKAGAAVTTETEVIWAKALPAGTSAQRAELIALTQALKMAEGKKLNVYTDSRYAFATAHIHGEIYRRRGWLTSEGKEIKNKDEILALLKALFLPKRLSIIHCPGHQKGHSAEARGNRMADQAARKAAITETPDTSTLLIENSSPSGGSKRTADGSEFEAGKRTADGSEFEKRTADGSEFESPKKKAKVE

SEQ ID NO: 2670 - protein, 2114 aa, synthetic construct
MPAAKRVKLDGGDKKYSIGLDIGTNSVGWAVITDEYKVPSKKFKVLGNTDRHSIKKNLIGALLFDSGETAEATRLKRTARRRYTRRKNRICYLQEIFSNEMAKVDDSFFHRLEESFLVEEDKKHERHPIFGNIVDEVAYHEKYPTIYHLRKKLVDSTDKADLRLIYLALAHMIKFRGHFLIEGDLNPDNSDVDKLFIQLVQTYNQLFEENPINASGVDAKAILSARLSKSRRLENLIAQLPGEKKNGLFGNLIALSLGLTPNFKSNFDLAEDAKLQLSKDTYDDDLDNLLAQIGDQYADLFLAAKNLSDAILLSDILRVNTEITKAPLSASMIKRYDEHHQDLTLLKALVRQQLPEKYKEIFFDQSKNGYAGYIDGGASQEEFYKFIKPILEKMDGTEELLVKLNREDLLRKQRTFDNGSIPHQIHLGELHAILRRQEDFYPFLKDNREKIEKILTFRIPYYVGPLARGNSRFAWMTRKSEETITPWNFEEVVDKGASAQSFIERMTNFDKNLPNEKVLPKHSLLYEYFTVYNELTKVKYVTEGMRKPAFLSGEQKKAIVDLLFKTNRKVTVKQLKEDYFKKIECFDSVEISGVEDRFNASLGTYHDLLKIIKDKDFLDNEENEDILEDIVLTLTLFEDREMIEERLKTYAHLFDDKVMKQLKRRRYTGWGRLSRKLINGIRDKQSGKTILDFLKSDGFANRNFMQLIHDDSLTFKEDIQKAQVSGQGDSLHEHIANLAGSPAIKKGILQTVKVVDELVKVMGRHKPENIVIEMARENQTTQKGQKNSRERMKRIEEGIKELGSQILKEHPVENTQLQNEKLYLYYLQNGRDMYVDQELDINRLSDYDVDHIVPQSFLKDDSIDNKVLTRSDKARGKSDNVPSEEVVKKMKNYWRQLLNAKLITQRKFDNLTKAERGGLSELDKAGFIKRQLVETRQITKHVAQILDSRMNTKYDENDKLIREVKVITLKSKLVSDFRKDFQFYKVREINNYHHAHDAYLNAVVGTALIKKYPKLESEFVYGDYKVYDVRKMIAKSEQEIGKATAKYFFYSNIMNFFKTEITLANGEIRKRPLIETNGETGEIVWDKGRDFATVRKVLSMPQVNIVKKTEVQTGGFSKESILPKRNSDKLIARKKDWDPKKYGGFDSPTVAYSVLVVAKVEKGKSKKLKSVKELLGITIMERSSFEKNPIDFLEAKGYKEVKKDLIIKLPKYSLFELENGRKRMLASAGELQKGNELALPSKYVNFLYLASHYEKLKGSPEDNEQKQLFVEQHKHYLDEIIEQISEFSKRVILADANLDKVLSAYNKHRDKPIREQAENIIHLFTLTNLGAPAAFKYFDTTIDRKRYTSTKEVLDATLIHQSITGLYETRIDLSQLGGDGGGGGGGSGSSGGTLNIEDEYRLHETSKEPDVSLGSTWLSDFPQAWAETGGMGLAVRQAPLIIPLKATSTPVSIKQYPMSQEARLGIKPHIQRLLDQGILVPCQSPWNTPLLPVKKPGTNDYRPVQDLREVNKRVEDIHPTVPNPYNLLSGLPPSHQWYTVLDLKDAFFCLRLHPTSQPLFAFEWRDPEMGISGQLTWTRLPQGFKNSPTLFNEALHRDLADFRIQHPDLILLQYVDDLLLAATSELDCQQGTRALLQTLGNLGYRASAKKAQICQKQVKYLGYLLKEGQRWLTEARKETVMGQPTPKTPRQLREFLGKAGFCRLFIPGFAEMAAPLYPLTKPGTLFNWGPDQQKAYQEIKQALLTAPALGLPDLTKPFELFVDEKQGYAKGVLTQKLGPWRRPVAYLSKKLDPVAAGWPPCLRMVAAIAVLTKDAGKLTMGQPLVILAPHAVEALVKQPPDRWLSNARMTHYQALLLDTDRVQFGPVVALNPATLLPLPEEGLQHNCLDILAEAHGTRPDLTDQPLPDADHTWYTDGSSLLQEGQRKAGAAVTTETEVIWAKALPAGTSAQRAELIALTQALKMAEGKKLNVYTDSRYAFATAHIHGEIYRRRGWLTSEGKEIKNKDEILALLKALFLPKRLSIIHCPGHQKGHSAEARGNRMADQAARKAAITETPDTSTLLIENSSPSGGSKRTADGSEFEAGKRTADGSEFEKRTADGSEFESPKKKAKVE

SEQ ID NO: 2671 - protein, 2111 aa, synthetic construct
MPAAKRVKLDGGDKKYSIGLDIGTNSVGWAVITDEYKVPSKKFKVLGNTDRHSIKKNLIGALLFDSGETAEATRLKRTARRRYTRRKNRICYLQEIFSNEMAKVDDSFFHRLEESFLVEEDKKHERHPIFGNIVDEVAYHEKYPTIYHLRKKLVDSTDKADLRLIYLALAHMIKFRGHFLIEGDLNPDNSDVDKLFIQLVQTYNQLFEENPINASGVDAKAILSARLSKSRRLENLIAQLPGEKKNGLFGNLIALSLGLTPNFKSNFDLAEDAKLQLSKDTYDDDLDNLLAQIGDQYADLFLAAKNLSDAILLSDILRVNTEITKAPLSASMIKRYDEHHQDLTLLKALVRQQLPEKYKEIFFDQSKNGYAGYIDGGASQEEFYKFIKPILEKMDGTEELLVKLNREDLLRKQRTFDNGSIPHQIHLGELHAILRRQEDFYPFLKDNREKIEKILTFRIPYYVGPLARGNSRFAWMTRKSEETITPWNFEEVVDKGASAQSFIERMTNFDKNLPNEKVLPKHSLLYEYFTVYNELTKVKYVTEGMRKPAFLSGEQKKAIVDLLFKTNRKVTVKQLKEDYFKKIECFDSVEISGVEDRFNASLGTYHDLLKIIKDKDFLDNEENEDILEDIVLTLTLFEDREMIEERLKTYAHLFDDKVMKQLKRRRYTGWGRLSRKLINGIRDKQSGKTILDFLKSDGFANRNFMQLIHDDSLTFKEDIQKAQVSGQGDSLHEHIANLAGSPAIKKGILQTVKVVDELVKVMGRHKPENIVIEMARENQTTQKGQKNSRERMKRIEEGIKELGSQILKEHPVENTQLQNEKLYLYYLQNGRDMYVDQELDINRLSDYDVDHIVPQSFLKDDSIDNKVLTRSDKARGKSDNVPSEEVVKKMKNYWRQLLNAKLITQRKFDNLTKAERGGLSELDKAGFIKRQLVETRQITKHVAQILDSRMNTKYDENDKLIREVKVITLKSKLVSDFRKDFQFYKVREINNYHHAHDAYLNAVVGTALIKKYPKLESEFVYGDYKVYDVRKMIAKSEQEIGKATAKYFFYSNIMNFFKTEITLANGEIRKRPLIETNGETGEIVWDKGRDFATVRKVLSMPQVNIVKKTEVQTGGFSKESILPKRNSDKLIARKKDWDPKKYGGFDSPTVAYSVLVVAKVEKGKSKKLKSVKELLGITIMERSSFEKNPIDFLEAKGYKEVKKDLIIKLPKYSLFELENGRKRMLASAGELQKGNELALPSKYVNFLYLASHYEKLKGSPEDNEQKQLFVEQHKHYLDEIIEQISEFSKRVILADANLDKVLSAYNKHRDKPIREQAENIIHLFTLTNLGAPAAFKYFDTTIDRKRYTSTKEVLDATLIHQSITGLYETRIDLSQLGGDGGGGSPAPGGTLNIEDEYRLHETSKEPDVSLGSTWLSDFPQAWAETGGMGLAVRQAPLIIPLKATSTPVSIKQYPMSQEARLGIKPHIQRLLDQGILVPCQSPWNTPLLPVKKPGTNDYRPVQDLREVNKRVEDIHPTVPNPYNLLSGLPPSHQWYTVLDLKDAFFCLRLHPTSQPLFAFEWRDPEMGISGQLTWTRLPQGFKNSPTLFNEALHRDLADFRIQHPDLILLQYVDDLLLAATSELDCQQGTRALLQTLGNLGYRASAKKAQICQKQVKYLGYLLKEGQRWLTEARKETVMGQPTPKTPRQLREFLGKAGFCRLFIPGFAEMAAPLYPLTKPGTLFNWGPDQQKAYQEIKQALLTAPALGLPDLTKPFELFVDEKQGYAKGVLTQKLGPWRRPVAYLSKKLDPVAAGWPPCLRMVAAIAVLTKDAGKLTMGQPLVILAPHAVEALVKQPPDRWLSNARMTHYQALLLDTDRVQFGPVVALNPATLLPLPEEGLQHNCLDILAEAHGTRPDLTDQPLPDADHTWYTDGSSLLQEGQRKAGAAVTTETEVIWAKALPAGTSAQRAELIALTQALKMAEGKKLNVYTDSRYAFATAHIHGEIYRRRGWLTSEGKEIKNKDEILALLKALFLPKRLSIIHCPGHQKGHSAEARGNRMADQAARKAAITETPDTSTLLIENSSPSGGSKRTADGSEFEAGKRTADGSEFEKRTADGSEFESPKKKAKVE

SEQ ID NO: 2672 - protein, 2111 aa, synthetic construct
MPAAKRVKLDGGDKKYSIGLDIGTNSVGWAVITDEYKVPSKKFKVLGNTDRHSIKKNLIGALLFDSGETAEATRLKRTARRRYTRRKNRICYLQEIFSNEMAKVDDSFFHRLEESFLVEEDKKHERHPIFGNIVDEVAYHEKYPTIYHLRKKLVDSTDKADLRLIYLALAHMIKFRGHFLIEGDLNPDNSDVDKLFIQLVQTYNQLFEENPINASGVDAKAILSARLSKSRRLENLIAQLPGEKKNGLFGNLIALSLGLTPNFKSNFDLAEDAKLQLSKDTYDDDLDNLLAQIGDQYADLFLAAKNLSDAILLSDILRVNTEITKAPLSASMIKRYDEHHQDLTLLKALVRQQLPEKYKEIFFDQSKNGYAGYIDGGASQEEFYKFIKPILEKMDGTEELLVKLNREDLLRKQRTFDNGSIPHQIHLGELHAILRRQEDFYPFLKDNREKIEKILTFRIPYYVGPLARGNSRFAWMTRKSEETITPWNFEEVVDKGASAQSFIERMTNFDKNLPNEKVLPKHSLLYEYFTVYNELTKVKYVTEGMRKPAFLSGEQKKAIVDLLFKTNRKVTVKQLKEDYFKKIECFDSVEISGVEDRFNASLGTYHDLLKIIKDKDFLDNEENEDILEDIVLTLTLFEDREMIEERLKTYAHLFDDKVMKQLKRRRYTGWGRLSRKLINGIRDKQSGKTILDFLKSDGFANRNFMQLIHDDSLTFKEDIQKAQVSGQGDSLHEHIANLAGSPAIKKGILQTVKVVDELVKVMGRHKPENIVIEMARENQTTQKGQKNSRERMKRIEEGIKELGSQILKEHPVENTQLQNEKLYLYYLQNGRDMYVDQELDINRLSDYDVDHIVPQSFLKDDSIDNKVLTRSDKARGKSDNVPSEEVVKKMKNYWRQLLNAKLITQRKFDNLTKAERGGLSELDKAGFIKRQLVETRQITKHVAQILDSRMNTKYDENDKLIREVKVITLKSKLVSDFRKDFQFYKVREINNYHHAHDAYLNAVVGTALIKKYPKLESEFVYGDYKVYDVRKMIAKSEQEIGKATAKYFFYSNIMNFFKTEITLANGEIRKRPLIETNGETGEIVWDKGRDFATVRKVLSMPQVNIVKKTEVQTGGFSKESILPKRNSDKLIARKKDWDPKKYGGFDSPTVAYSVLVVAKVEKGKSKKLKSVKELLGITIMERSSFEKNPIDFLEAKGYKEVKKDLIIKLPKYSLFELENGRKRMLASAGELQKGNELALPSKYVNFLYLASHYEKLKGSPEDNEQKQLFVEQHKHYLDEIIEQISEFSKRVILADANLDKVLSAYNKHRDKPIREQAENIIHLFTLTNLGAPAAFKYFDTTIDRKRYTSTKEVLDATLIHQSITGLYETRIDLSQLGGDGGGGGPAPGGTLNIEDEYRLHETSKEPDVSLGSTWLSDFPQAWAETGGMGLAVRQAPLIIPLKATSTPVSIKQYPMSQEARLGIKPHIQRLLDQGILVPCQSPWNTPLLPVKKPGTNDYRPVQDLREVNKRVEDIHPTVPNPYNLLSGLPPSHQWYTVLDLKDAFFCLRLHPTSQPLFAFEWRDPEMGISGQLTWTRLPQGFKNSPTLFNEALHRDLADFRIQHPDLILLQYVDDLLLAATSELDCQQGTRALLQTLGNLGYRASAKKAQICQKQVKYLGYLLKEGQRWLTEARKETVMGQPTPKTPRQLREFLGKAGFCRLFIPGFAEMAAPLYPLTKPGTLFNWGPDQQKAYQEIKQALLTAPALGLPDLTKPFELFVDEKQGYAKGVLTQKLGPWRRPVAYLSKKLDPVAAGWPPCLRMVAAIAVLTKDAGKLTMGQPLVILAPHAVEALVKQPPDRWLSNARMTHYQALLLDTDRVQFGPVVALNPATLLPLPEEGLQHNCLDILAEAHGTRPDLTDQPLPDADHTWYTDGSSLLQEGQRKAGAAVTTETEVIWAKALPAGTSAQRAELIALTQALKMAEGKKLNVYTDSRYAFATAHIHGEIYRRRGWLTSEGKEIKNKDEILALLKALFLPKRLSIIHCPGHQKGHSAEARGNRMADQAARKAAITETPDTSTLLIENSSPSGGSKRTADGSEFEAGKRTADGSEFEKRTADGSEFESPKKKAKVE

SEQ ID NO: 2673 - protein, 2116 aa, synthetic construct
MPAAKRVKLDGGDKKYSIGLDIGTNSVGWAVITDEYKVPSKKFKVLGNTDRHSIKKNLIGALLFDSGETAEATRLKRTARRRYTRRKNRICYLQEIFSNEMAKVDDSFFHRLEESFLVEEDKKHERHPIFGNIVDEVAYHEKYPTIYHLRKKLVDSTDKADLRLIYLALAHMIKFRGHFLIEGDLNPDNSDVDKLFIQLVQTYNQLFEENPINASGVDAKAILSARLSKSRRLENLIAQLPGEKKNGLFGNLIALSLGLTPNFKSNFDLAEDAKLQLSKDTYDDDLDNLLAQIGDQYADLFLAAKNLSDAILLSDILRVNTEITKAPLSASMIKRYDEHHQDLTLLKALVRQQLPEKYKEIFFDQSKNGYAGYIDGGASQEEFYKFIKPILEKMDGTEELLVKLNREDLLRKQRTFDNGSIPHQIHLGELHAILRRQEDFYPFLKDNREKIEKILTFRIPYYVGPLARGNSRFAWMTRKSEETITPWNFEEVVDKGASAQSFIERMTNFDKNLPNEKVLPKHSLLYEYFTVYNELTKVKYVTEGMRKPAFLSGEQKKAIVDLLFKTNRKVTVKQLKEDYFKKIECFDSVEISGVEDRFNASLGTYHDLLKIIKDKDFLDNEENEDILEDIVLTLTLFEDREMIEERLKTYAHLFDDKVMKQLKRRRYTGWGRLSRKLINGIRDKQSGKTILDFLKSDGFANRNFMQLIHDDSLTFKEDIQKAQVSGQGDSLHEHIANLAGSPAIKKGILQTVKVVDELVKVMGRHKPENIVIEMARENQTTQKGQKNSRERMKRIEEGIKELGSQILKEHPVENTQLQNEKLYLYYLQNGRDMYVDQELDINRLSDYDVDHIVPQSFLKDDSIDNKVLTRSDKARGKSDNVPSEEVVKKMKNYWRQLLNAKLITQRKFDNLTKAERGGLSELDKAGFIKRQLVETRQITKHVAQILDSRMNTKYDENDKLIREVKVITLKSKLVSDFRKDFQFYKVREINNYHHAHDAYLNAVVGTALIKKYPKLESEFVYGDYKVYDVRKMIAKSEQEIGKATAKYFFYSNIMNFFKTEITLANGEIRKRPLIETNGETGEIVWDKGRDFATVRKVLSMPQVNIVKKTEVQTGGFSKESILPKRNSDKLIARKKDWDPKKYGGFDSPTVAYSVLVVAKVEKGKSKKLKSVKELLGITIMERSSFEKNPIDFLEAKGYKEVKKDLIIKLPKYSLFELENGRKRMLASAGELQKGNELALPSKYVNFLYLASHYEKLKGSPEDNEQKQLFVEQHKHYLDEIIEQISEFSKRVILADANLDKVLSAYNKHRDKPIREQAENIIHLFTLTNLGAPAAFKYFDTTIDRKRYTSTKEVLDATLIHQSITGLYETRIDLSQLGGDGGGGSEAAAKGSSGGTLNIEDEYRLHETSKEPDVSLGSTWLSDFPQAWAETGGMGLAVRQAPLIIPLKATSTPVSIKQYPMSQEARLGIKPHIQRLLDQGILVPCQSPWNTPLLPVKKPGTNDYRPVQDLREVNKRVEDIHPTVPNPYNLLSGLPPSHQWYTVLDLKDAFFCLRLHPTSQPLFAFEWRDPEMGISGQLTWTRLPQGFKNSPTLFNEALHRDLADFRIQHPDLILLQYVDDLLLAATSELDCQQGTRALLQTLGNLGYRASAKKAQICQKQVKYLGYLLKEGQRWLTEARKETVMGQPTPKTPRQLREFLGKAGFCRLFIPGFAEMAAPLYPLTKPGTLFNWGPDQQKAYQEIKQALLTAPALGLPDLTKPFELFVDEKQGYAKGVLTQKLGPWRRPVAYLSKKLDPVAAGWPPCLRMVAAIAVLTKDAGKLTMGQPLVILAPHAVEALVKQPPDRWLSNARMTHYQALLLDTDRVQFGPVVALNPATLLPLPEEGLQHNCLDILAEAHGTRPDLTDQPLPDADHTWYTDGSSLLQEGQRKAGAAVTTETEVIWAKALPAGTSAQRAELIALTQALKMAEGKKLNVYTDSRYAFATAHIHGEIYRRRGWLTSEGKEIKNKDEILALLKALFLPKRLSIIHCPGHQKGHSAEARGNRMADQAARKAAITETPDTSTLLIENSSPSGGSKRTADGSEFEAGKRTADGSEFEKRTADGSEFESPKKKAKVE

SEQ ID NO: 2674 - protein, 2116 aa, synthetic construct
MPAAKRVKLDGGDKKYSIGLDIGTNSVGWAVITDEYKVPSKKFKVLGNTDRHSIKKNLIGALLFDSGETAEATRLKRTARRRYTRRKNRICYLQEIFSNEMAKVDDSFFHRLEESFLVEEDKKHERHPIFGNIVDEVAYHEKYPTIYHLRKKLVDSTDKADLRLIYLALAHMIKFRGHFLIEGDLNPDNSDVDKLFIQLVQTYNQLFEENPINASGVDAKAILSARLSKSRRLENLIAQLPGEKKNGLFGNLIALSLGLTPNFKSNFDLAEDAKLQLSKDTYDDDLDNLLAQIGDQYADLFLAAKNLSDAILLSDILRVNTEITKAPLSASMIKRYDEHHQDLTLLKALVRQQLPEKYKEIFFDQSKNGYAGYIDGGASQEEFYKFIKPILEKMDGTEELLVKLNREDLLRKQRTFDNGSIPHQIHLGELHAILRRQEDFYPFLKDNREKIEKILTFRIPYYVGPLARGNSRFAWMTRKSEETITPWNFEEVVDKGASAQSFIERMTNFDKNLPNEKVLPKHSLLYEYFTVYNELTKVKYVTEGMRKPAFLSGEQKKAIVDLLFKTNRKVTVKQLKEDYFKKIECFDSVEISGVEDRFNASLGTYHDLLKIIKDKDFLDNEENEDILEDIVLTLTLFEDREMIEERLKTYAHLFDDKVMKQLKRRRYTGWGRLSRKLINGIRDKQSGKTILDFLKSDGFANRNFMQLIHDDSLTFKEDIQKAQVSGQGDSLHEHIANLAGSPAIKKGILQTVKVVDELVKVMGRHKPENIVIEMARENQTTQKGQKNSRERMKRIEEGIKELGSQILKEHPVENTQLQNEKLYLYYLQNGRDMYVDQELDINRLSDYDVDHIVPQSFLKDDSIDNKVLTRSDKARGKSDNVPSEEVVKKMKNYWRQLLNAKLITQRKFDNLTKAERGGLSELDKAGFIKRQLVETRQITKHVAQILDSRMNTKYDENDKLIREVKVITLKSKLVSDFRKDFQFYKVREINNYHHAHDAYLNAVVGTALIKKYPKLESEFVYGDYKVYDVRKMIAKSEQEIGKATAKYFFYSNIMNFFKTEITLANGEIRKRPLIETNGETGEIVWDKGRDFATVRKVLSMPQVNIVKKTEVQTGGFSKESILPKRNSDKLIARKKDWDPKKYGGFDSPTVAYSVLVVAKVEKGKSKKLKSVKELLGITIMERSSFEKNPIDFLEAKGYKEVKKDLIIKLPKYSLFELENGRKRMLASAGELQKGNELALPSKYVNFLYLASHYEKLKGSPEDNEQKQLFVEQHKHYLDEIIEQISEFSKRVILADANLDKVLSAYNKHRDKPIREQAENIIHLFTLTNLGAPAAFKYFDTTIDRKRYTSTKEVLDATLIHQSITGLYETRIDLSQLGGDGGEAAAKPAPGGSGGTLNIEDEYRLHETSKEPDVSLGSTWLSDFPQAWAETGGMGLAVRQAPLIIPLKATSTPVSIKQYPMSQEARLGIKPHIQRLLDQGILVPCQSPWNTPLLPVKKPGTNDYRPVQDLREVNKRVEDIHPTVPNPYNLLSGLPPSHQWYTVLDLKDAFFCLRLHPTSQPLFAFEWRDPEMGISGQLTWTRLPQGFKNSPTLFNEALHRDLADFRIQHPDLILLQYVDDLLLAATSELDCQQGTRALLQTLGNLGYRASAKKAQICQKQVKYLGYLLKEGQRWLTEARKETVMGQPTPKTPRQLREFLGKAGFCRLFIPGFAEMAAPLYPLTKPGTLFNWGPDQQKAYQEIKQALLTAPALGLPDLTKPFELFVDEKQGYAKGVLTQKLGPWRRPVAYLSKKLDPVAAGWPPCLRMVAAIAVLTKDAGKLTMGQPLVILAPHAVEALVKQPPDRWLSNARMTHYQALLLDTDRVQFGPVVALNPATLLPLPEEGLQHNCLDILAEAHGTRPDLTDQPLPDADHTWYTDGSSLLQEGQRKAGAAVTTETEVIWAKALPAGTSAQRAELIALTQALKMAEGKKLNVYTDSRYAFATAHIHGEIYRRRGWLTSEGKEIKNKDEILALLKALFLPKRLSIIHCPGHQKGHSAEARGNRMADQAARKAAITETPDTSTLLIENSSPSGGSKRTADGSEFEAGKRTADGSEFEKRTADGSEFESPKKKAKVE

SEQ ID NO: 2675 - protein, 2114 aa, synthetic construct
MPAAKRVKLDGGDKKYSIGLDIGTNSVGWAVITDEYKVPSKKFKVLGNTDRHSIKKNLIGALLFDSGETAEATRLKRTARRRYTRRKNRICYLQEIFSNEMAKVDDSFFHRLEESFLVEEDKKHERHPIFGNIVDEVAYHEKYPTIYHLRKKLVDSTDKADLRLIYLALAHMIKFRGHFLIEGDLNPDNSDVDKLFIQLVQTYNQLFEENPINASGVDAKAILSARLSKSRRLENLIAQLPGEKKNGLFGNLIALSLGLTPNFKSNFDLAEDAKLQLSKDTYDDDLDNLLAQIGDQYADLFLAAKNLSDAILLSDILRVNTEITKAPLSASMIKRYDEHHQDLTLLKALVRQQLPEKYKEIFFDQSKNGYAGYIDGGASQEEFYKFIKPILEKMDGTEELLVKLNREDLLRKQRTFDNGSIPHQIHLGELHAILRRQEDFYPFLKDNREKIEKILTFRIPYYVGPLARGNSRFAWMTRKSEETITPWNFEEVVDKGASAQSFIERMTNFDKNLPNEKVLPKHSLLYEYFTVYNELTKVKYVTEGMRKPAFLSGEQKKAIVDLLFKTNRKVTVKQLKEDYFKKIECFDSVEISGVEDRFNASLGTYHDLLKIIKDKDFLDNEENEDILEDIVLTLTLFEDREMIEERLKTYAHLFDDKVMKQLKRRRYTGWGRLSRKLINGIRDKQSGKTILDFLKSDGFANRNFMQLIHDDSLTFKEDIQKAQVSGQGDSLHEHIANLAGSPAIKKGILQTVKVVDELVKVMGRHKPENIVIEMARENQTTQKGQKNSRERMKRIEEGIKELGSQILKEHPVENTQLQNEKLYLYYLQNGRDMYVDQELDINRLSDYDVDHIVPQSFLKDDSIDNKVLTRSDKARGKSDNVPSEEVVKKMKNYWRQLLNAKLITQRKFDNLTKAERGGLSELDKAGFIKRQLVETRQITKHVAQILDSRMNTKYDENDKLIREVKVITLKSKLVSDFRKDFQFYKVREINNYHHAHDAYLNAVVGTALIKKYPKLESEFVYGDYKVYDVRKMIAKSEQEIGKATAKYFFYSNIMNFFKTEITLANGEIRKRPLIETNGETGEIVWDKGRDFATVRKVLSMPQVNIVKKTEVQTGGFSKESILPKRNSDKLIARKKDWDPKKYGGFDSPTVAYSVLVVAKVEKGKSKKLKSVKELLGITIMERSSFEKNPIDFLEAKGYKEVKKDLIIKLPKYSLFELENGRKRMLASAGELQKGNELALPSKYVNFLYLASHYEKLKGSPEDNEQKQLFVEQHKHYLDEIIEQISEFSKRVILADANLDKVLSAYNKHRDKPIREQAENIIHLFTLTNLGAPAAFKYFDTTIDRKRYTSTKEVLDATLIHQSITGLYETRIDLSQLGGDGGGGSGSSGGGGGTLNIEDEYRLHETSKEPDVSLGSTWLSDFPQAWAETGGMGLAVRQAPLIIPLKATSTPVSIKQYPMSQEARLGIKPHIQRLLDQGILVPCQSPWNTPLLPVKKPGTNDYRPVQDLREVNKRVEDIHPTVPNPYNLLSGLPPSHQWYTVLDLKDAFFCLRLHPTSQPLFAFEWRDPEMGISGQLTWTRLPQGFKNSPTLFNEALHRDLADFRIQHPDLILLQYVDDLLLAATSELDCQQGTRALLQTLGNLGYRASAKKAQICQKQVKYLGYLLKEGQRWLTEARKETVMGQPTPKTPRQLREFLGKAGFCRLFIPGFAEMAAPLYPLTKPGTLFNWGPDQQKAYQEIKQALLTAPALGLPDLTKPFELFVDEKQGYAKGVLTQKLGPWRRPVAYLSKKLDPVAAGWPPCLRMVAAIAVLTKDAGKLTMGQPLVILAPHAVEALVKQPPDRWLSNARMTHYQALLLDTDRVQFGPVVALNPATLLPLPEEGLQHNCLDILAEAHGTRPDLTDQPLPDADHTWYTDGSSLLQEGQRKAGAAVTTETEVIWAKALPAGTSAQRAELIALTQALKMAEGKKLNVYTDSRYAFATAHIHGEIYRRRGWLTSEGKEIKNKDEILALLKALFLPKRLSIIHCPGHQKGHSAEARGNRMADQAARKAAITETPDTSTLLIENSSPSGGSKRTADGSEFEAGKRTADGSEFEKRTADGSEFESPKKKAKVE

SEQ ID NO: 2676 - protein, 2111 aa, synthetic construct
MPAAKRVKLDGGDKKYSIGLDIGTNSVGWAVITDEYKVPSKKFKVLGNTDRHSIKKNLIGALLFDSGETAEATRLKRTARRRYTRRKNRICYLQEIFSNEMAKVDDSFFHRLEESFLVEEDKKHERHPIFGNIVDEVAYHEKYPTIYHLRKKLVDSTDKADLRLIYLALAHMIKFRGHFLIEGDLNPDNSDVDKLFIQLVQTYNQLFEENPINASGVDAKAILSARLSKSRRLENLIAQLPGEKKNGLFGNLIALSLGLTPNFKSNFDLAEDAKLQLSKDTYDDDLDNLLAQIGDQYADLFLAAKNLSDAILLSDILRVNTEITKAPLSASMIKRYDEHHQDLTLLKALVRQQLPEKYKEIFFDQSKNGYAGYIDGGASQEEFYKFIKPILEKMDGTEELLVKLNREDLLRKQRTFDNGSIPHQIHLGELHAILRRQEDFYPFLKDNREKIEKILTFRIPYYVGPLARGNSRFAWMTRKSEETITPWNFEEVVDKGASAQSFIERMTNFDKNLPNEKVLPKHSLLYEYFTVYNELTKVKYVTEGMRKPAFLSGEQKKAIVDLLFKTNRKVTVKQLKEDYFKKIECFDSVEISGVEDRFNASLGTYHDLLKIIKDKDFLDNEENEDILEDIVLTLTLFEDREMIEERLKTYAHLFDDKVMKQLKRRRYTGWGRLSRKLINGIRDKQSGKTILDFLKSDGFANRNFMQLIHDDSLTFKEDIQKAQVSGQGDSLHEHIANLAGSPAIKKGILQTVKVVDELVKVMGRHKPENIVIEMARENQTTQKGQKNSRERMKRIEEGIKELGSQILKEHPVENTQLQNEKLYLYYLQNGRDMYVDQELDINRLSDYDVDHIVPQSFLKDDSIDNKVLTRSDKARGKSDNVPSEEVVKKMKNYWRQLLNAKLITQRKFDNLTKAERGGLSELDKAGFIKRQLVETRQITKHVAQILDSRMNTKYDENDKLIREVKVITLKSKLVSDFRKDFQFYKVREINNYHHAHDAYLNAVVGTALIKKYPKLESEFVYGDYKVYDVRKMIAKSEQEIGKATAKYFFYSNIMNFFKTEITLANGEIRKRPLIETNGETGEIVWDKGRDFATVRKVLSMPQVNIVKKTEVQTGGFSKESILPKRNSDKLIARKKDWDPKKYGGFDSPTVAYSVLVVAKVEKGKSKKLKSVKELLGITIMERSSFEKNPIDFLEAKGYKEVKKDLIIKLPKYSLFELENGRKRMLASAGELQKGNELALPSKYVNFLYLASHYEKLKGSPEDNEQKQLFVEQHKHYLDEIIEQISEFSKRVILADANLDKVLSAYNKHRDKPIREQAENIIHLFTLTNLGAPAAFKYFDTTIDRKRYTSTKEVLDATLIHQSITGLYETRIDLSQLGGDGGGSSGGGGGTLNIEDEYRLHETSKEPDVSLGSTWLSDFPQAWAETGGMGLAVRQAPLIIPLKATSTPVSIKQYPMSQEARLGIKPHIQRLLDQGILVPCQSPWNTPLLPVKKPGTNDYRPVQDLREVNKRVEDIHPTVPNPYNLLSGLPPSHQWYTVLDLKDAFFCLRLHPTSQPLFAFEWRDPEMGISGQLTWTRLPQGFKNSPTLFNEALHRDLADFRIQHPDLILLQYVDDLLLAATSELDCQQGTRALLQTLGNLGYRASAKKAQICQKQVKYLGYLLKEGQRWLTEARKETVMGQPTPKTPRQLREFLGKAGFCRLFIPGFAEMAAPLYPLTKPGTLFNWGPDQQKAYQEIKQALLTAPALGLPDLTKPFELFVDEKQGYAKGVLTQKLGPWRRPVAYLSKKLDPVAAGWPPCLRMVAAIAVLTKDAGKLTMGQPLVILAPHAVEALVKQPPDRWLSNARMTHYQALLLDTDRVQFGPVVALNPATLLPLPEEGLQHNCLDILAEAHGTRPDLTDQPLPDADHTWYTDGSSLLQEGQRKAGAAVTTETEVIWAKALPAGTSAQRAELIALTQALKMAEGKKLNVYTDSRYAFATAHIHGEIYRRRGWLTSEGKEIKNKDEILALLKALFLPKRLSIIHCPGHQKGHSAEARGNRMADQAARKAAITETPDTSTLLIENSSPSGGSKRTADGSEFEAGKRTADGSEFEKRTADGSEFESPKKKAKVE

SEQ ID NO: 2677 - protein, 2116 aa, synthetic construct
MPAAKRVKLDGGDKKYSIGLDIGTNSVGWAVITDEYKVPSKKFKVLGNTDRHSIKKNLIGALLFDSGETAEATRLKRTARRRYTRRKNRICYLQEIFSNEMAKVDDSFFHRLEESFLVEEDKKHERHPIFGNIVDEVAYHEKYPTIYHLRKKLVDSTDKADLRLIYLALAHMIKFRGHFLIEGDLNPDNSDVDKLFIQLVQTYNQLFEENPINASGVDAKAILSARLSKSRRLENLIAQLPGEKKNGLFGNLIALSLGLTPNFKSNFDLAEDAKLQLSKDTYDDDLDNLLAQIGDQYADLFLAAKNLSDAILLSDILRVNTEITKAPLSASMIKRYDEHHQDLTLLKALVRQQLPEKYKEIFFDQSKNGYAGYIDGGASQEEFYKFIKPILEKMDGTEELLVKLNREDLLRKQRTFDNGSIPHQIHLGELHAILRRQEDFYPFLKDNREKIEKILTFRIPYYVGPLARGNSRFAWMTRKSEETITPWNFEEVVDKGASAQSFIERMTNFDKNLPNEKVLPKHSLLYEYFTVYNELTKVKYVTEGMRKPAFLSGEQKKAIVDLLFKTNRKVTVKQLKEDYFKKIECFDSVEISGVEDRFNASLGTYHDLLKIIKDKDFLDNEENEDILEDIVLTLTLFEDREMIEERLKTYAHLFDDKVMKQLKRRRYTGWGRLSRKLINGIRDKQSGKTILDFLKSDGFANRNFMQLIHDDSLTFKEDIQKAQVSGQGDSLHEHIANLAGSPAIKKGILQTVKVVDELVKVMGRHKPENIVIEMARENQTTQKGQKNSRERMKRIEEGIKELGSQILKEHPVENTQLQNEKLYLYYLQNGRDMYVDQELDINRLSDYDVDHIVPQSFLKDDSIDNKVLTRSDKARGKSDNVPSEEVVKKMKNYWRQLLNAKLITQRKFDNLTKAERGGLSELDKAGFIKRQLVETRQITKHVAQILDSRMNTKYDENDKLIREVKVITLKSKLVSDFRKDFQFYKVREINNYHHAHDAYLNAVVGTALIKKYPKLESEFVYGDYKVYDVRKMIAKSEQEIGKATAKYFFYSNIMNFFKTEITLANGEIRKRPLIETNGETGEIVWDKGRDFATVRKVLSMPQVNIVKKTEVQTGGFSKESILPKRNSDKLIARKKDWDPKKYGGFDSPTVAYSVLVVAKVEKGKSKKLKSVKELLGITIMERSSFEKNPIDFLEAKGYKEVKKDLIIKLPKYSLFELENGRKRMLASAGELQKGNELALPSKYVNFLYLASHYEKLKGSPEDNEQKQLFVEQHKHYLDEIIEQISEFSKRVILADANLDKVLSAYNKHRDKPIREQAENIIHLFTLTNLGAPAAFKYFDTTIDRKRYTSTKEVLDATLIHQSITGLYETRIDLSQLGGDGGGGGEAAAKGSSGGTLNIEDEYRLHETSKEPDVSLGSTWLSDFPQAWAETGGMGLAVRQAPLIIPLKATSTPVSIKQYPMSQEARLGIKPHIQRLLDQGILVPCQSPWNTPLLPVKKPGTNDYRPVQDLREVNKRVEDIHPTVPNPYNLLSGLPPSHQWYTVLDLKDAFFCLRLHPTSQPLFAFEWRDPEMGISGQLTWTRLPQGFKNSPTLFNEALHRDLADFRIQHPDLILLQYVDDLLLAATSELDCQQGTRALLQTLGNLGYRASAKKAQICQKQVKYLGYLLKEGQRWLTEARKETVMGQPTPKTPRQLREFLGKAGFCRLFIPGFAEMAAPLYPLTKPGTLFNWGPDQQKAYQEIKQALLTAPALGLPDLTKPFELFVDEKQGYAKGVLTQKLGPWRRPVAYLSKKLDPVAAGWPPCLRMVAAIAVLTKDAGKLTMGQPLVILAPHAVEALVKQPPDRWLSNARMTHYQALLLDTDRVQFGPVVALNPATLLPLPEEGLQHNCLDILAEAHGTRPDLTDQPLPDADHTWYTDGSSLLQEGQRKAGAAVTTETEVIWAKALPAGTSAQRAELIALTQALKMAEGKKLNVYTDSRYAFATAHIHGEIYRRRGWLTSEGKEIKNKDEILALLKALFLPKRLSIIHCPGHQKGHSAEARGNRMADQAARKAAITETPDTSTLLIENSSPSGGSKRTADGSEFEAGKRTADGSEFEKRTADGSEFESPKKKAKVE

SEQ ID NO: 2678 - protein, 2130 aa, synthetic construct
MPAAKRVKLDGGDKKYSIGLDIGTNSVGWAVITDEYKVPSKKFKVLGNTDRHSIKKNLIGALLFDSGETAEATRLKRTARRRYTRRKNRICYLQEIFSNEMAKVDDSFFHRLEESFLVEEDKKHERHPIFGNIVDEVAYHEKYPTIYHLRKKLVDSTDKADLRLIYLALAHMIKFRGHFLIEGDLNPDNSDVDKLFIQLVQTYNQLFEENPINASGVDAKAILSARLSKSRRLENLIAQLPGEKKNGLFGNLIALSLGLTPNFKSNFDLAEDAKLQLSKDTYDDDLDNLLAQIGDQYADLFLAAKNLSDAILLSDILRVNTEITKAPLSASMIKRYDEHHQDLTLLKALVRQQLPEKYKEIFFDQSKNGYAGYIDGGASQEEFYKFIKPILEKMDGTEELLVKLNREDLLRKQRTFDNGSIPHQIHLGELHAILRRQEDFYPFLKDNREKIEKILTFRIPYYVGPLARGNSRFAWMTRKSEETITPWNFEEVVDKGASAQSFIERMTNFDKNLPNEKVLPKHSLLYEYFTVYNELTKVKYVTEGMRKPAFLSGEQKKAIVDLLFKTNRKVTVKQLKEDYFKKIECFDSVEISGVEDRFNASLGTYHDLLKIIKDKDFLDNEENEDILEDIVLTLTLFEDREMIEERLKTYAHLFDDKVMKQLKRRRYTGWGRLSRKLINGIRDKQSGKTILDFLKSDGFANRNFMQLIHDDSLTFKEDIQKAQVSGQGDSLHEHIANLAGSPAIKKGILQTVKVVDELVKVMGRHKPENIVIEMARENQTTQKGQKNSRERMKRIEEGIKELGSQILKEHPVENTQLQNEKLYLYYLQNGRDMYVDQELDINRLSDYDVDHIVPQSFLKDDSIDNKVLTRSDKARGKSDNVPSEEVVKKMKNYWRQLLNAKLITQRKFDNLTKAERGGLSELDKAGFIKRQLVETRQITKHVAQILDSRMNTKYDENDKLIREVKVITLKSKLVSDFRKDFQFYKVREINNYHHAHDAYLNAVVGTALIKKYPKLESEFVYGDYKVYDVRKMIAKSEQEIGKATAKYFFYSNIMNFFKTEITLANGEIRKRPLIETNGETGEIVWDKGRDFATVRKVLSMPQVNIVKKTEVQTGGFSKESILPKRNSDKLIARKKDWDPKKYGGFDSPTVAYSVLVVAKVEKGKSKKLKSVKELLGITIMERSSFEKNPIDFLEAKGYKEVKKDLIIKLPKYSLFELENGRKRMLASAGELQKGNELALPSKYVNFLYLASHYEKLKGSPEDNEQKQLFVEQHKHYLDEIIEQISEFSKRVILADANLDKVLSAYNKHRDKPIREQAENIIHLFTLTNLGAPAAFKYFDTTIDRKRYTSTKEVLDATLIHQSITGLYETRIDLSQLGGDGGEAAAKEAAAKEAAAKEAAAKEAAAKGGTLNIEDEYRLHETSKEPDVSLGSTWLSDFPQAWAETGGMGLAVRQAPLIIPLKATSTPVSIKQYPMSQEARLGIKPHIQRLLDQGILVPCQSPWNTPLLPVKKPGTNDYRPVQDLREVNKRVEDIHPTVPNPYNLLSGLPPSHQWYTVLDLKDAFFCLRLHPTSQPLFAFEWRDPEMGISGQLTWTRLPQGFKNSPTLFNEALHRDLADFRIQHPDLILLQYVDDLLLAATSELDCQQGTRALLQTLGNLGYRASAKKAQICQKQVKYLGYLLKEGQRWLTEARKETVMGQPTPKTPRQLREFLGKAGFCRLFIPGFAEMAAPLYPLTKPGTLFNWGPDQQKAYQEIKQALLTAPALGLPDLTKPFELFVDEKQGYAKGVLTQKLGPWRRPVAYLSKKLDPVAAGWPPCLRMVAAIAVLTKDAGKLTMGQPLVILAPHAVEALVKQPPDRWLSNARMTHYQALLLDTDRVQFGPVVALNPATLLPLPEEGLQHNCLDILAEAHGTRPDLTDQPLPDADHTWYTDGSSLLQEGQRKAGAAVTTETEVIWAKALPAGTSAQRAELIALTQALKMAEGKKLNVYTDSRYAFATAHIHGEIYRRRGWLTSEGKEIKNKDEILALLKALFLPKRLSIIHCPGHQKGHSAEARGNRMADQAARKAAITETPDTSTLLIENSSPSGGSKRTADGSEFEAGKRTADGSEFEKRTADGSEFESPKKKAKVE

SEQ ID NO: 2679 - protein, 2114 aa, synthetic construct
MPAAKRVKLDGGDKKYSIGLDIGTNSVGWAVITDEYKVPSKKFKVLGNTDRHSIKKNLIGALLFDSGETAEATRLKRTARRRYTRRKNRICYLQEIFSNEMAKVDDSFFHRLEESFLVEEDKKHERHPIFGNIVDEVAYHEKYPTIYHLRKKLVDSTDKADLRLIYLALAHMIKFRGHFLIEGDLNPDNSDVDKLFIQLVQTYNQLFEENPINASGVDAKAILSARLSKSRRLENLIAQLPGEKKNGLFGNLIALSLGLTPNFKSNFDLAEDAKLQLSKDTYDDDLDNLLAQIGDQYADLFLAAKNLSDAILLSDILRVNTEITKAPLSASMIKRYDEHHQDLTLLKALVRQQLPEKYKEIFFDQSKNGYAGYIDGGASQEEFYKFIKPILEKMDGTEELLVKLNREDLLRKQRTFDNGSIPHQIHLGELHAILRRQEDFYPFLKDNREKIEKILTFRIPYYVGPLARGNSRFAWMTRKSEETITPWNFEEVVDKGASAQSFIERMTNFDKNLPNEKVLPKHSLLYEYFTVYNELTKVKYVTEGMRKPAFLSGEQKKAIVDLLFKTNRKVTVKQLKEDYFKKIECFDSVEISGVEDRFNASLGTYHDLLKIIKDKDFLDNEENEDILEDIVLTLTLFEDREMIEERLKTYAHLFDDKVMKQLKRRRYTGWGRLSRKLINGIRDKQSGKTILDFLKSDGFANRNFMQLIHDDSLTFKEDIQKAQVSGQGDSLHEHIANLAGSPAIKKGILQTVKVVDELVKVMGRHKPENIVIEMARENQTTQKGQKNSRERMKRIEEGIKELGSQILKEHPVENTQLQNEKLYLYYLQNGRDMYVDQELDINRLSDYDVDHIVPQSFLKDDSIDNKVLTRSDKARGKSDNVPSEEVVKKMKNYWRQLLNAKLITQRKFDNLTKAERGGLSELDKAGFIKRQLVETRQITKHVAQILDSRMNTKYDENDKLIREVKVITLKSKLVSDFRKDFQFYKVREINNYHHAHDAYLNAVVGTALIKKYPKLESEFVYGDYKVYDVRKMIAKSEQEIGKATAKYFFYSNIMNFFKTEITLANGEIRKRPLIETNGETGEIVWDKGRDFATVRKVLSMPQVNIVKKTEVQTGGFSKESILPKRNSDKLIARKKDWDPKKYGGFDSPTVAYSVLVVAKVEKGKSKKLKSVKELLGITIMERSSFEKNPIDFLEAKGYKEVKKDLIIKLPKYSLFELENGRKRMLASAGELQKGNELALPSKYVNFLYLASHYEKLKGSPEDNEQKQLFVEQHKHYLDEIIEQISEFSKRVILADANLDKVLSAYNKHRDKPIREQAENIIHLFTLTNLGAPAAFKYFDTTIDRKRYTSTKEVLDATLIHQSITGLYETRIDLSQLGGDGGGGSGSSPAPGGTLNIEDEYRLHETSKEPDVSLGSTWLSDFPQAWAETGGMGLAVRQAPLIIPLKATSTPVSIKQYPMSQEARLGIKPHIQRLLDQGILVPCQSPWNTPLLPVKKPGTNDYRPVQDLREVNKRVEDIHPTVPNPYNLLSGLPPSHQWYTVLDLKDAFFCLRLHPTSQPLFAFEWRDPEMGISGQLTWTRLPQGFKNSPTLFNEALHRDLADFRIQHPDLILLQYVDDLLLAATSELDCQQGTRALLQTLGNLGYRASAKKAQICQKQVKYLGYLLKEGQRWLTEARKETVMGQPTPKTPRQLREFLGKAGFCRLFIPGFAEMAAPLYPLTKPGTLFNWGPDQQKAYQEIKQALLTAPALGLPDLTKPFELFVDEKQGYAKGVLTQKLGPWRRPVAYLSKKLDPVAAGWPPCLRMVAAIAVLTKDAGKLTMGQPLVILAPHAVEALVKQPPDRWLSNARMTHYQALLLDTDRVQFGPVVALNPATLLPLPEEGLQHNCLDILAEAHGTRPDLTDQPLPDADHTWYTDGSSLLQEGQRKAGAAVTTETEVIWAKALPAGTSAQRAELIALTQALKMAEGKKLNVYTDSRYAFATAHIHGEIYRRRGWLTSEGKEIKNKDEILALLKALFLPKRLSIIHCPGHQKGHSAEARGNRMADQAARKAAITETPDTSTLLIENSSPSGGSKRTADGSEFEAGKRTADGSEFEKRTADGSEFESPKKKAKVE

SEQ ID NO: 2680 - protein, 2120 aa, synthetic construct
MPAAKRVKLDGGDKKYSIGLDIGTNSVGWAVITDEYKVPSKKFKVLGNTDRHSIKKNLIGALLFDSGETAEATRLKRTARRRYTRRKNRICYLQEIFSNEMAKVDDSFFHRLEESFLVEEDKKHERHPIFGNIVDEVAYHEKYPTIYHLRKKLVDSTDKADLRLIYLALAHMIKFRGHFLIEGDLNPDNSDVDKLFIQLVQTYNQLFEENPINASGVDAKAILSARLSKSRRLENLIAQLPGEKKNGLFGNLIALSLGLTPNFKSNFDLAEDAKLQLSKDTYDDDLDNLLAQIGDQYADLFLAAKNLSDAILLSDILRVNTEITKAPLSASMIKRYDEHHQDLTLLKALVRQQLPEKYKEIFFDQSKNGYAGYIDGGASQEEFYKFIKPILEKMDGTEELLVKLNREDLLRKQRTFDNGSIPHQIHLGELHAILRRQEDFYPFLKDNREKIEKILTFRIPYYVGPLARGNSRFAWMTRKSEETITPWNFEEVVDKGASAQSFIERMTNFDKNLPNEKVLPKHSLLYEYFTVYNELTKVKYVTEGMRKPAFLSGEQKKAIVDLLFKTNRKVTVKQLKEDYFKKIECFDSVEISGVEDRFNASLGTYHDLLKIIKDKDFLDNEENEDILEDIVLTLTLFEDREMIEERLKTYAHLFDDKVMKQLKRRRYTGWGRLSRKLINGIRDKQSGKTILDFLKSDGFANRNFMQLIHDDSLTFKEDIQKAQVSGQGDSLHEHIANLAGSPAIKKGILQTVKVVDELVKVMGRHKPENIVIEMARENQTTQKGQKNSRERMKRIEEGIKELGSQILKEHPVENTQLQNEKLYLYYLQNGRDMYVDQELDINRLSDYDVDHIVPQSFLKDDSIDNKVLTRSDKARGKSDNVPSEEVVKKMKNYWRQLLNAKLITQRKFDNLTKAERGGLSELDKAGFIKRQLVETRQITKHVAQILDSRMNTKYDENDKLIREVKVITLKSKLVSDFRKDFQFYKVREINNYHHAHDAYLNAVVGTALIKKYPKLESEFVYGDYKVYDVRKMIAKSEQEIGKATAKYFFYSNIMNFFKTEITLANGEIRKRPLIETNGETGEIVWDKGRDFATVRKVLSMPQVNIVKKTEVQTGGFSKESILPKRNSDKLIARKKDWDPKKYGGFDSPTVAYSVLVVAKVEKGKSKKLKSVKELLGITIMERSSFEKNPIDFLEAKGYKEVKKDLIIKLPKYSLFELENGRKRMLASAGELQKGNELALPSKYVNFLYLASHYEKLKGSPEDNEQKQLFVEQHKHYLDEIIEQISEFSKRVILADANLDKVLSAYNKHRDKPIREQAENIIHLFTLTNLGAPAAFKYFDTTIDRKRYTSTKEVLDATLIHQSITGLYETRIDLSQLGGDGGGGSGGSGGSGGSGGSGGTLNIEDEYRLHETSKEPDVSLGSTWLSDFPQAWAETGGMGLAVRQAPLIIPLKATSTPVSIKQYPMSQEARLGIKPHIQRLLDQGILVPCQSPWNTPLLPVKKPGTNDYRPVQDLREVNKRVEDIHPTVPNPYNLLSGLPPSHQWYTVLDLKDAFFCLRLHPTSQPLFAFEWRDPEMGISGQLTWTRLPQGFKNSPTLFNEALHRDLADFRIQHPDLILLQYVDDLLLAATSELDCQQGTRALLQTLGNLGYRASAKKAQICQKQVKYLGYLLKEGQRWLTEARKETVMGQPTPKTPRQLREFLGKAGFCRLFIPGFAEMAAPLYPLTKPGTLFNWGPDQQKAYQEIKQALLTAPALGLPDLTKPFELFVDEKQGYAKGVLTQKLGPWRRPVAYLSKKLDPVAAGWPPCLRMVAAIAVLTKDAGKLTMGQPLVILAPHAVEALVKQPPDRWLSNARMTHYQALLLDTDRVQFGPVVALNPATLLPLPEEGLQHNCLDILAEAHGTRPDLTDQPLPDADHTWYTDGSSLLQEGQRKAGAAVTTETEVIWAKALPAGTSAQRAELIALTQALKMAEGKKLNVYTDSRYAFATAHIHGEIYRRRGWLTSEGKEIKNKDEILALLKALFLPKRLSIIHCPGHQKGHSAEARGNRMADQAARKAAITETPDTSTLLIENSSPSGGSKRTADGSEFEAGKRTADGSEFEKRTADGSEFESPKKKAKVE

SEQ ID NO: 2681 - protein, 2116 aa, synthetic construct
MPAAKRVKLDGGDKKYSIGLDIGTNSVGWAVITDEYKVPSKKFKVLGNTDRHSIKKNLIGALLFDSGETAEATRLKRTARRRYTRRKNRICYLQEIFSNEMAKVDDSFFHRLEESFLVEEDKKHERHPIFGNIVDEVAYHEKYPTIYHLRKKLVDSTDKADLRLIYLALAHMIKFRGHFLIEGDLNPDNSDVDKLFIQLVQTYNQLFEENPINASGVDAKAILSARLSKSRRLENLIAQLPGEKKNGLFGNLIALSLGLTPNFKSNFDLAEDAKLQLSKDTYDDDLDNLLAQIGDQYADLFLAAKNLSDAILLSDILRVNTEITKAPLSASMIKRYDEHHQDLTLLKALVRQQLPEKYKEIFFDQSKNGYAGYIDGGASQEEFYKFIKPILEKMDGTEELLVKLNREDLLRKQRTFDNGSIPHQIHLGELHAILRRQEDFYPFLKDNREKIEKILTFRIPYYVGPLARGNSRFAWMTRKSEETITPWNFEEVVDKGASAQSFIERMTNFDKNLPNEKVLPKHSLLYEYFTVYNELTKVKYVTEGMRKPAFLSGEQKKAIVDLLFKTNRKVTVKQLKEDYFKKIECFDSVEISGVEDRFNASLGTYHDLLKIIKDKDFLDNEENEDILEDIVLTLTLFEDREMIEERLKTYAHLFDDKVMKQLKRRRYTGWGRLSRKLINGIRDKQSGKTILDFLKSDGFANRNFMQLIHDDSLTFKEDIQKAQVSGQGDSLHEHIANLAGSPAIKKGILQTVKVVDELVKVMGRHKPENIVIEMARENQTTQKGQKNSRERMKRIEEGIKELGSQILKEHPVENTQLQNEKLYLYYLQNGRDMYVDQELDINRLSDYDVDHIVPQSFLKDDSIDNKVLTRSDKARGKSDNVPSEEVVKKMKNYWRQLLNAKLITQRKFDNLTKAERGGLSELDKAGFIKRQLVETRQITKHVAQILDSRMNTKYDENDKLIREVKVITLKSKLVSDFRKDFQFYKVREINNYHHAHDAYLNAVVGTALIKKYPKLESEFVYGDYKVYDVRKMIAKSEQEIGKATAKYFFYSNIMNFFKTEITLANGEIRKRPLIETNGETGEIVWDKGRDFATVRKVLSMPQVNIVKKTEVQTGGFSKESILPKRNSDKLIARKKDWDPKKYGGFDSPTVAYSVLVVAKVEKGKSKKLKSVKELLGITIMERSSFEKNPIDFLEAKGYKEVKKDLIIKLPKYSLFELENGRKRMLASAGELQKGNELALPSKYVNFLYLASHYEKLKGSPEDNEQKQLFVEQHKHYLDEIIEQISEFSKRVILADANLDKVLSAYNKHRDKPIREQAENIIHLFTLTNLGAPAAFKYFDTTIDRKRYTSTKEVLDATLIHQSITGLYETRIDLSQLGGDGGEAAAKPAPGGGGGTLNIEDEYRLHETSKEPDVSLGSTWLSDFPQAWAETGGMGLAVRQAPLIIPLKATSTPVSIKQYPMSQEARLGIKPHIQRLLDQGILVPCQSPWNTPLLPVKKPGTNDYRPVQDLREVNKRVEDIHPTVPNPYNLLSGLPPSHQWYTVLDLKDAFFCLRLHPTSQPLFAFEWRDPEMGISGQLTWTRLPQGFKNSPTLFNEALHRDLADFRIQHPDLILLQYVDDLLLAATSELDCQQGTRALLQTLGNLGYRASAKKAQICQKQVKYLGYLLKEGQRWLTEARKETVMGQPTPKTPRQLREFLGKAGFCRLFIPGFAEMAAPLYPLTKPGTLFNWGPDQQKAYQEIKQALLTAPALGLPDLTKPFELFVDEKQGYAKGVLTQKLGPWRRPVAYLSKKLDPVAAGWPPCLRMVAAIAVLTKDAGKLTMGQPLVILAPHAVEALVKQPPDRWLSNARMTHYQALLLDTDRVQFGPVVALNPATLLPLPEEGLQHNCLDILAEAHGTRPDLTDQPLPDADHTWYTDGSSLLQEGQRKAGAAVTTETEVIWAKALPAGTSAQRAELIALTQALKMAEGKKLNVYTDSRYAFATAHIHGEIYRRRGWLTSEGKEIKNKDEILALLKALFLPKRLSIIHCPGHQKGHSAEARGNRMADQAARKAAITETPDTSTLLIENSSPSGGSKRTADGSEFEAGKRTADGSEFEKRTADGSEFESPKKKAKVE

SEQ ID NO: 2682 - protein, 2111 aa, synthetic construct
MPAAKRVKLDGGDKKYSIGLDIGTNSVGWAVITDEYKVPSKKFKVLGNTDRHSIKKNLIGALLFDSGETAEATRLKRTARRRYTRRKNRICYLQEIFSNEMAKVDDSFFHRLEESFLVEEDKKHERHPIFGNIVDEVAYHEKYPTIYHLRKKLVDSTDKADLRLIYLALAHMIKFRGHFLIEGDLNPDNSDVDKLFIQLVQTYNQLFEENPINASGVDAKAILSARLSKSRRLENLIAQLPGEKKNGLFGNLIALSLGLTPNFKSNFDLAEDAKLQLSKDTYDDDLDNLLAQIGDQYADLFLAAKNLSDAILLSDILRVNTEITKAPLSASMIKRYDEHHQDLTLLKALVRQQLPEKYKEIFFDQSKNGYAGYIDGGASQEEFYKFIKPILEKMDGTEELLVKLNREDLLRKQRTFDNGSIPHQIHLGELHAILRRQEDFYPFLKDNREKIEKILTFRIPYYVGPLARGNSRFAWMTRKSEETITPWNFEEVVDKGASAQSFIERMTNFDKNLPNEKVLPKHSLLYEYFTVYNELTKVKYVTEGMRKPAFLSGEQKKAIVDLLFKTNRKVTVKQLKEDYFKKIECFDSVEISGVEDRFNASLGTYHDLLKIIKDKDFLDNEENEDILEDIVLTLTLFEDREMIEERLKTYAHLFDDKVMKQLKRRRYTGWGRLSRKLINGIRDKQSGKTILDFLKSDGFANRNFMQLIHDDSLTFKEDIQKAQVSGQGDSLHEHIANLAGSPAIKKGILQTVKVVDELVKVMGRHKPENIVIEMARENQTTQKGQKNSRERMKRIEEGIKELGSQILKEHPVENTQLQNEKLYLYYLQNGRDMYVDQELDINRLSDYDVDHIVPQSFLKDDSIDNKVLTRSDKARGKSDNVPSEEVVKKMKNYWRQLLNAKLITQRKFDNLTKAERGGLSELDKAGFIKRQLVETRQITKHVAQILDSRMNTKYDENDKLIREVKVITLKSKLVSDFRKDFQFYKVREINNYHHAHDAYLNAVVGTALIKKYPKLESEFVYGDYKVYDVRKMIAKSEQEIGKATAKYFFYSNIMNFFKTEITLANGEIRKRPLIETNGETGEIVWDKGRDFATVRKVLSMPQVNIVKKTEVQTGGFSKESILPKRNSDKLIARKKDWDPKKYGGFDSPTVAYSVLVVAKVEKGKSKKLKSVKELLGITIMERSSFEKNPIDFLEAKGYKEVKKDLIIKLPKYSLFELENGRKRMLASAGELQKGNELALPSKYVNFLYLASHYEKLKGSPEDNEQKQLFVEQHKHYLDEIIEQISEFSKRVILADANLDKVLSAYNKHRDKPIREQAENIIHLFTLTNLGAPAAFKYFDTTIDRKRYTSTKEVLDATLIHQSITGLYETRIDLSQLGGDGGGSSGGSGGTLNIEDEYRLHETSKEPDVSLGSTWLSDFPQAWAETGGMGLAVRQAPLIIPLKATSTPVSIKQYPMSQEARLGIKPHIQRLLDQGILVPCQSPWNTPLLPVKKPGTNDYRPVQDLREVNKRVEDIHPTVPNPYNLLSGLPPSHQWYTVLDLKDAFFCLRLHPTSQPLFAFEWRDPEMGISGQLTWTRLPQGFKNSPTLFNEALHRDLADFRIQHPDLILLQYVDDLLLAATSELDCQQGTRALLQTLGNLGYRASAKKAQICQKQVKYLGYLLKEGQRWLTEARKETVMGQPTPKTPRQLREFLGKAGFCRLFIPGFAEMAAPLYPLTKPGTLFNWGPDQQKAYQEIKQALLTAPALGLPDLTKPFELFVDEKQGYAKGVLTQKLGPWRRPVAYLSKKLDPVAAGWPPCLRMVAAIAVLTKDAGKLTMGQPLVILAPHAVEALVKQPPDRWLSNARMTHYQALLLDTDRVQFGPVVALNPATLLPLPEEGLQHNCLDILAEAHGTRPDLTDQPLPDADHTWYTDGSSLLQEGQRKAGAAVTTETEVIWAKALPAGTSAQRAELIALTQALKMAEGKKLNVYTDSRYAFATAHIHGEIYRRRGWLTSEGKEIKNKDEILALLKALFLPKRLSIIHCPGHQKGHSAEARGNRMADQAARKAAITETPDTSTLLIENSSPSGGSKRTADGSEFEAGKRTADGSEFEKRTADGSEFESPKKKAKVE

SEQ ID NO: 2683 - protein, 2116 aa, synthetic construct
MPAAKRVKLDGGDKKYSIGLDIGTNSVGWAVITDEYKVPSKKFKVLGNTDRHSIKKNLIGALLFDSGETAEATRLKRTARRRYTRRKNRICYLQEIFSNEMAKVDDSFFHRLEESFLVEEDKKHERHPIFGNIVDEVAYHEKYPTIYHLRKKLVDSTDKADLRLIYLALAHMIKFRGHFLIEGDLNPDNSDVDKLFIQLVQTYNQLFEENPINASGVDAKAILSARLSKSRRLENLIAQLPGEKKNGLFGNLIALSLGLTPNFKSNFDLAEDAKLQLSKDTYDDDLDNLLAQIGDQYADLFLAAKNLSDAILLSDILRVNTEITKAPLSASMIKRYDEHHQDLTLLKALVRQQLPEKYKEIFFDQSKNGYAGYIDGGASQEEFYKFIKPILEKMDGTEELLVKLNREDLLRKQRTFDNGSIPHQIHLGELHAILRRQEDFYPFLKDNREKIEKILTFRIPYYVGPLARGNSRFAWMTRKSEETITPWNFEEVVDKGASAQSFIERMTNFDKNLPNEKVLPKHSLLYEYFTVYNELTKVKYVTEGMRKPAFLSGEQKKAIVDLLFKTNRKVTVKQLKEDYFKKIECFDSVEISGVEDRFNASLGTYHDLLKIIKDKDFLDNEENEDILEDIVLTLTLFEDREMIEERLKTYAHLFDDKVMKQLKRRRYTGWGRLSRKLINGIRDKQSGKTILDFLKSDGFANRNFMQLIHDDSLTFKEDIQKAQVSGQGDSLHEHIANLAGSPAIKKGILQTVKVVDELVKVMGRHKPENIVIEMARENQTTQKGQKNSRERMKRIEEGIKELGSQILKEHPVENTQLQNEKLYLYYLQNGRDMYVDQELDINRLSDYDVDHIVPQSFLKDDSIDNKVLTRSDKARGKSDNVPSEEVVKKMKNYWRQLLNAKLITQRKFDNLTKAERGGLSELDKAGFIKRQLVETRQITKHVAQILDSRMNTKYDENDKLIREVKVITLKSKLVSDFRKDFQFYKVREINNYHHAHDAYLNAVVGTALIKKYPKLESEFVYGDYKVYDVRKMIAKSEQEIGKATAKYFFYSNIMNFFKTEITLANGEIRKRPLIETNGETGEIVWDKGRDFATVRKVLSMPQVNIVKKTEVQTGGFSKESILPKRNSDKLIARKKDWDPKKYGGFDSPTVAYSVLVVAKVEKGKSKKLKSVKELLGITIMERSSFEKNPIDFLEAKGYKEVKKDLIIKLPKYSLFELENGRKRMLASAGELQKGNELALPSKYVNFLYLASHYEKLKGSPEDNEQKQLFVEQHKHYLDEIIEQISEFSKRVILADANLDKVLSAYNKHRDKPIREQAENIIHLFTLTNLGAPAAFKYFDTTIDRKRYTSTKEVLDATLIHQSITGLYETRIDLSQLGGDGGEAAAKGSSGGSGGTLNIEDEYRLHETSKEPDVSLGSTWLSDFPQAWAETGGMGLAVRQAPLIIPLKATSTPVSIKQYPMSQEARLGIKPHIQRLLDQGILVPCQSPWNTPLLPVKKPGTNDYRPVQDLREVNKRVEDIHPTVPNPYNLLSGLPPSHQWYTVLDLKDAFFCLRLHPTSQPLFAFEWRDPEMGISGQLTWTRLPQGFKNSPTLFNEALHRDLADFRIQHPDLILLQYVDDLLLAATSELDCQQGTRALLQTLGNLGYRASAKKAQICQKQVKYLGYLLKEGQRWLTEARKETVMGQPTPKTPRQLREFLGKAGFCRLFIPGFAEMAAPLYPLTKPGTLFNWGPDQQKAYQEIKQALLTAPALGLPDLTKPFELFVDEKQGYAKGVLTQKLGPWRRPVAYLSKKLDPVAAGWPPCLRMVAAIAVLTKDAGKLTMGQPLVILAPHAVEALVKQPPDRWLSNARMTHYQALLLDTDRVQFGPVVALNPATLLPLPEEGLQHNCLDILAEAHGTRPDLTDQPLPDADHTWYTDGSSLLQEGQRKAGAAVTTETEVIWAKALPAGTSAQRAELIALTQALKMAEGKKLNVYTDSRYAFATAHIHGEIYRRRGWLTSEGKEIKNKDEILALLKALFLPKRLSIIHCPGHQKGHSAEARGNRMADQAARKAAITETPDTSTLLIENSSPSGGSKRTADGSEFEAGKRTADGSEFEKRTADGSEFESPKKKAKVE

SEQ ID NO: 2684 - protein, 2114 aa, synthetic construct
MPAAKRVKLDGGDKKYSIGLDIGTNSVGWAVITDEYKVPSKKFKVLGNTDRHSIKKNLIGALLFDSGETAEATRLKRTARRRYTRRKNRICYLQEIFSNEMAKVDDSFFHRLEESFLVEEDKKHERHPIFGNIVDEVAYHEKYPTIYHLRKKLVDSTDKADLRLIYLALAHMIKFRGHFLIEGDLNPDNSDVDKLFIQLVQTYNQLFEENPINASGVDAKAILSARLSKSRRLENLIAQLPGEKKNGLFGNLIALSLGLTPNFKSNFDLAEDAKLQLSKDTYDDDLDNLLAQIGDQYADLFLAAKNLSDAILLSDILRVNTEITKAPLSASMIKRYDEHHQDLTLLKALVRQQLPEKYKEIFFDQSKNGYAGYIDGGASQEEFYKFIKPILEKMDGTEELLVKLNREDLLRKQRTFDNGSIPHQIHLGELHAILRRQEDFYPFLKDNREKIEKILTFRIPYYVGPLARGNSRFAWMTRKSEETITPWNFEEVVDKGASAQSFIERMTNFDKNLPNEKVLPKHSLLYEYFTVYNELTKVKYVTEGMRKPAFLSGEQKKAIVDLLFKTNRKVTVKQLKEDYFKKIECFDSVEISGVEDRFNASLGTYHDLLKIIKDKDFLDNEENEDILEDIVLTLTLFEDREMIEERLKTYAHLFDDKVMKQLKRRRYTGWGRLSRKLINGIRDKQSGKTILDFLKSDGFANRNFMQLIHDDSLTFKEDIQKAQVSGQGDSLHEHIANLAGSPAIKKGILQTVKVVDELVKVMGRHKPENIVIEMARENQTTQKGQKNSRERMKRIEEGIKELGSQILKEHPVENTQLQNEKLYLYYLQNGRDMYVDQELDINRLSDYDVDHIVPQSFLKDDSIDNKVLTRSDKARGKSDNVPSEEVVKKMKNYWRQLLNAKLITQRKFDNLTKAERGGLSELDKAGFIKRQLVETRQITKHVAQILDSRMNTKYDENDKLIREVKVITLKSKLVSDFRKDFQFYKVREINNYHHAHDAYLNAVVGTALIKKYPKLESEFVYGDYKVYDVRKMIAKSEQEIGKATAKYFFYSNIMNFFKTEITLANGEIRKRPLIETNGETGEIVWDKGRDFATVRKVLSMPQVNIVKKTEVQTGGFSKESILPKRNSDKLIARKKDWDPKKYGGFDSPTVAYSVLVVAKVEKGKSKKLKSVKELLGITIMERSSFEKNPIDFLEAKGYKEVKKDLIIKLPKYSLFELENGRKRMLASAGELQKGNELALPSKYVNFLYLASHYEKLKGSPEDNEQKQLFVEQHKHYLDEIIEQISEFSKRVILADANLDKVLSAYNKHRDKPIREQAENIIHLFTLTNLGAPAAFKYFDTTIDRKRYTSTKEVLDATLIHQSITGLYETRIDLSQLGGDGGGGSPAPGSSGGTLNIEDEYRLHETSKEPDVSLGSTWLSDFPQAWAETGGMGLAVRQAPLIIPLKATSTPVSIKQYPMSQEARLGIKPHIQRLLDQGILVPCQSPWNTPLLPVKKPGTNDYRPVQDLREVNKRVEDIHPTVPNPYNLLSGLPPSHQWYTVLDLKDAFFCLRLHPTSQPLFAFEWRDPEMGISGQLTWTRLPQGFKNSPTLFNEALHRDLADFRIQHPDLILLQYVDDLLLAATSELDCQQGTRALLQTLGNLGYRASAKKAQICQKQVKYLGYLLKEGQRWLTEARKETVMGQPTPKTPRQLREFLGKAGFCRLFIPGFAEMAAPLYPLTKPGTLFNWGPDQQKAYQEIKQALLTAPALGLPDLTKPFELFVDEKQGYAKGVLTQKLGPWRRPVAYLSKKLDPVAAGWPPCLRMVAAIAVLTKDAGKLTMGQPLVILAPHAVEALVKQPPDRWLSNARMTHYQALLLDTDRVQFGPVVALNPATLLPLPEEGLQHNCLDILAEAHGTRPDLTDQPLPDADHTWYTDGSSLLQEGQRKAGAAVTTETEVIWAKALPAGTSAQRAELIALTQALKMAEGKKLNVYTDSRYAFATAHIHGEIYRRRGWLTSEGKEIKNKDEILALLKALFLPKRLSIIHCPGHQKGHSAEARGNRMADQAARKAAITETPDTSTLLIENSSPSGGSKRTADGSEFEAGKRTADGSEFEKRTADGSEFESPKKKAKVE

SEQ ID NO: 2685 - protein, 2114 aa, synthetic construct
MPAAKRVKLDGGDKKYSIGLDIGTNSVGWAVITDEYKVPSKKFKVLGNTDRHSIKKNLIGALLFDSGETAEATRLKRTARRRYTRRKNRICYLQEIFSNEMAKVDDSFFHRLEESFLVEEDKKHERHPIFGNIVDEVAYHEKYPTIYHLRKKLVDSTDKADLRLIYLALAHMIKFRGHFLIEGDLNPDNSDVDKLFIQLVQTYNQLFEENPINASGVDAKAILSARLSKSRRLENLIAQLPGEKKNGLFGNLIALSLGLTPNFKSNFDLAEDAKLQLSKDTYDDDLDNLLAQIGDQYADLFLAAKNLSDAILLSDILRVNTEITKAPLSASMIKRYDEHHQDLTLLKALVRQQLPEKYKEIFFDQSKNGYAGYIDGGASQEEFYKFIKPILEKMDGTEELLVKLNREDLLRKQRTFDNGSIPHQIHLGELHAILRRQEDFYPFLKDNREKIEKILTFRIPYYVGPLARGNSRFAWMTRKSEETITPWNFEEVVDKGASAQSFIERMTNFDKNLPNEKVLPKHSLLYEYFTVYNELTKVKYVTEGMRKPAFLSGEQKKAIVDLLFKTNRKVTVKQLKEDYFKKIECFDSVEISGVEDRFNASLGTYHDLLKIIKDKDFLDNEENEDILEDIVLTLTLFEDREMIEERLKTYAHLFDDKVMKQLKRRRYTGWGRLSRKLINGIRDKQSGKTILDFLKSDGFANRNFMQLIHDDSLTFKEDIQKAQVSGQGDSLHEHIANLAGSPAIKKGILQTVKVVDELVKVMGRHKPENIVIEMARENQTTQKGQKNSRERMKRIEEGIKELGSQILKEHPVENTQLQNEKLYLYYLQNGRDMYVDQELDINRLSDYDVDHIVPQSFLKDDSIDNKVLTRSDKARGKSDNVPSEEVVKKMKNYWRQLLNAKLITQRKFDNLTKAERGGLSELDKAGFIKRQLVETRQITKHVAQILDSRMNTKYDENDKLIREVKVITLKSKLVSDFRKDFQFYKVREINNYHHAHDAYLNAVVGTALIKKYPKLESEFVYGDYKVYDVRKMIAKSEQEIGKATAKYFFYSNIMNFFKTEITLANGEIRKRPLIETNGETGEIVWDKGRDFATVRKVLSMPQVNIVKKTEVQTGGFSKESILPKRNSDKLIARKKDWDPKKYGGFDSPTVAYSVLVVAKVEKGKSKKLKSVKELLGITIMERSSFEKNPIDFLEAKGYKEVKKDLIIKLPKYSLFELENGRKRMLASAGELQKGNELALPSKYVNFLYLASHYEKLKGSPEDNEQKQLFVEQHKHYLDEIIEQISEFSKRVILADANLDKVLSAYNKHRDKPIREQAENIIHLFTLTNLGAPAAFKYFDTTIDRKRYTSTKEVLDATLIHQSITGLYETRIDLSQLGGDGGPAPGSSGGSGGTLNIEDEYRLHETSKEPDVSLGSTWLSDFPQAWAETGGMGLAVRQAPLIIPLKATSTPVSIKQYPMSQEARLGIKPHIQRLLDQGILVPCQSPWNTPLLPVKKPGTNDYRPVQDLREVNKRVEDIHPTVPNPYNLLSGLPPSHQWYTVLDLKDAFFCLRLHPTSQPLFAFEWRDPEMGISGQLTWTRLPQGFKNSPTLFNEALHRDLADFRIQHPDLILLQYVDDLLLAATSELDCQQGTRALLQTLGNLGYRASAKKAQICQKQVKYLGYLLKEGQRWLTEARKETVMGQPTPKTPRQLREFLGKAGFCRLFIPGFAEMAAPLYPLTKPGTLFNWGPDQQKAYQEIKQALLTAPALGLPDLTKPFELFVDEKQGYAKGVLTQKLGPWRRPVAYLSKKLDPVAAGWPPCLRMVAAIAVLTKDAGKLTMGQPLVILAPHAVEALVKQPPDRWLSNARMTHYQALLLDTDRVQFGPVVALNPATLLPLPEEGLQHNCLDILAEAHGTRPDLTDQPLPDADHTWYTDGSSLLQEGQRKAGAAVTTETEVIWAKALPAGTSAQRAELIALTQALKMAEGKKLNVYTDSRYAFATAHIHGEIYRRRGWLTSEGKEIKNKDEILALLKALFLPKRLSIIHCPGHQKGHSAEARGNRMADQAARKAAITETPDTSTLLIENSSPSGGSKRTADGSEFEAGKRTADGSEFEKRTADGSEFESPKKKAKVE

SEQ ID NO: 2686 - protein, 2116 aa, synthetic construct
MPAAKRVKLDGGDKKYSIGLDIGTNSVGWAVITDEYKVPSKKFKVLGNTDRHSIKKNLIGALLFDSGETAEATRLKRTARRRYTRRKNRICYLQEIFSNEMAKVDDSFFHRLEESFLVEEDKKHERHPIFGNIVDEVAYHEKYPTIYHLRKKLVDSTDKADLRLIYLALAHMIKFRGHFLIEGDLNPDNSDVDKLFIQLVQTYNQLFEENPINASGVDAKAILSARLSKSRRLENLIAQLPGEKKNGLFGNLIALSLGLTPNFKSNFDLAEDAKLQLSKDTYDDDLDNLLAQIGDQYADLFLAAKNLSDAILLSDILRVNTEITKAPLSASMIKRYDEHHQDLTLLKALVRQQLPEKYKEIFFDQSKNGYAGYIDGGASQEEFYKFIKPILEKMDGTEELLVKLNREDLLRKQRTFDNGSIPHQIHLGELHAILRRQEDFYPFLKDNREKIEKILTFRIPYYVGPLARGNSRFAWMTRKSEETITPWNFEEVVDKGASAQSFIERMTNFDKNLPNEKVLPKHSLLYEYFTVYNELTKVKYVTEGMRKPAFLSGEQKKAIVDLLFKTNRKVTVKQLKEDYFKKIECFDSVEISGVEDRFNASLGTYHDLLKIIKDKDFLDNEENEDILEDIVLTLTLFEDREMIEERLKTYAHLFDDKVMKQLKRRRYTGWGRLSRKLINGIRDKQSGKTILDFLKSDGFANRNFMQLIHDDSLTFKEDIQKAQVSGQGDSLHEHIANLAGSPAIKKGILQTVKVVDELVKVMGRHKPENIVIEMARENQTTQKGQKNSRERMKRIEEGIKELGSQILKEHPVENTQLQNEKLYLYYLQNGRDMYVDQELDINRLSDYDVDHIVPQSFLKDDSIDNKVLTRSDKARGKSDNVPSEEVVKKMKNYWRQLLNAKLITQRKFDNLTKAERGGLSELDKAGFIKRQLVETRQITKHVAQILDSRMNTKYDENDKLIREVKVITLKSKLVSDFRKDFQFYKVREINNYHHAHDAYLNAVVGTALIKKYPKLESEFVYGDYKVYDVRKMIAKSEQEIGKATAKYFFYSNIMNFFKTEITLANGEIRKRPLIETNGETGEIVWDKGRDFATVRKVLSMPQVNIVKKTEVQTGGFSKESILPKRNSDKLIARKKDWDPKKYGGFDSPTVAYSVLVVAKVEKGKSKKLKSVKELLGITIMERSSFEKNPIDFLEAKGYKEVKKDLIIKLPKYSLFELENGRKRMLASAGELQKGNELALPSKYVNFLYLASHYEKLKGSPEDNEQKQLFVEQHKHYLDEIIEQISEFSKRVILADANLDKVLSAYNKHRDKPIREQAENIIHLFTLTNLGAPAAFKYFDTTIDRKRYTSTKEVLDATLIHQSITGLYETRIDLSQLGGDGGEAAAKGSSGGGGGTLNIEDEYRLHETSKEPDVSLGSTWLSDFPQAWAETGGMGLAVRQAPLIIPLKATSTPVSIKQYPMSQEARLGIKPHIQRLLDQGILVPCQSPWNTPLLPVKKPGTNDYRPVQDLREVNKRVEDIHPTVPNPYNLLSGLPPSHQWYTVLDLKDAFFCLRLHPTSQPLFAFEWRDPEMGISGQLTWTRLPQGFKNSPTLFNEALHRDLADFRIQHPDLILLQYVDDLLLAATSELDCQQGTRALLQTLGNLGYRASAKKAQICQKQVKYLGYLLKEGQRWLTEARKETVMGQPTPKTPRQLREFLGKAGFCRLFIPGFAEMAAPLYPLTKPGTLFNWGPDQQKAYQEIKQALLTAPALGLPDLTKPFELFVDEKQGYAKGVLTQKLGPWRRPVAYLSKKLDPVAAGWPPCLRMVAAIAVLTKDAGKLTMGQPLVILAPHAVEALVKQPPDRWLSNARMTHYQALLLDTDRVQFGPVVALNPATLLPLPEEGLQHNCLDILAEAHGTRPDLTDQPLPDADHTWYTDGSSLLQEGQRKAGAAVTTETEVIWAKALPAGTSAQRAELIALTQALKMAEGKKLNVYTDSRYAFATAHIHGEIYRRRGWLTSEGKEIKNKDEILALLKALFLPKRLSIIHCPGHQKGHSAEARGNRMADQAARKAAITETPDTSTLLIENSSPSGGSKRTADGSEFEAGKRTADGSEFEKRTADGSEFESPKKKAKVE

SEQ ID NO: 2687 - protein, 2117 aa, synthetic construct
MPAAKRVKLDGGDKKYSIGLDIGTNSVGWAVITDEYKVPSKKFKVLGNTDRHSIKKNLIGALLFDSGETAEATRLKRTARRRYTRRKNRICYLQEIFSNEMAKVDDSFFHRLEESFLVEEDKKHERHPIFGNIVDEVAYHEKYPTIYHLRKKLVDSTDKADLRLIYLALAHMIKFRGHFLIEGDLNPDNSDVDKLFIQLVQTYNQLFEENPINASGVDAKAILSARLSKSRRLENLIAQLPGEKKNGLFGNLIALSLGLTPNFKSNFDLAEDAKLQLSKDTYDDDLDNLLAQIGDQYADLFLAAKNLSDAILLSDILRVNTEITKAPLSASMIKRYDEHHQDLTLLKALVRQQLPEKYKEIFFDQSKNGYAGYIDGGASQEEFYKFIKPILEKMDGTEELLVKLNREDLLRKQRTFDNGSIPHQIHLGELHAILRRQEDFYPFLKDNREKIEKILTFRIPYYVGPLARGNSRFAWMTRKSEETITPWNFEEVVDKGASAQSFIERMTNFDKNLPNEKVLPKHSLLYEYFTVYNELTKVKYVTEGMRKPAFLSGEQKKAIVDLLFKTNRKVTVKQLKEDYFKKIECFDSVEISGVEDRFNASLGTYHDLLKIIKDKDFLDNEENEDILEDIVLTLTLFEDREMIEERLKTYAHLFDDKVMKQLKRRRYTGWGRLSRKLINGIRDKQSGKTILDFLKSDGFANRNFMQLIHDDSLTFKEDIQKAQVSGQGDSLHEHIANLAGSPAIKKGILQTVKVVDELVKVMGRHKPENIVIEMARENQTTQKGQKNSRERMKRIEEGIKELGSQILKEHPVENTQLQNEKLYLYYLQNGRDMYVDQELDINRLSDYDVDHIVPQSFLKDDSIDNKVLTRSDKARGKSDNVPSEEVVKKMKNYWRQLLNAKLITQRKFDNLTKAERGGLSELDKAGFIKRQLVETRQITKHVAQILDSRMNTKYDENDKLIREVKVITLKSKLVSDFRKDFQFYKVREINNYHHAHDAYLNAVVGTALIKKYPKLESEFVYGDYKVYDVRKMIAKSEQEIGKATAKYFFYSNIMNFFKTEITLANGEIRKRPLIETNGETGEIVWDKGRDFATVRKVLSMPQVNIVKKTEVQTGGFSKESILPKRNSDKLIARKKDWDPKKYGGFDSPTVAYSVLVVAKVEKGKSKKLKSVKELLGITIMERSSFEKNPIDFLEAKGYKEVKKDLIIKLPKYSLFELENGRKRMLASAGELQKGNELALPSKYVNFLYLASHYEKLKGSPEDNEQKQLFVEQHKHYLDEIIEQISEFSKRVILADANLDKVLSAYNKHRDKPIREQAENIIHLFTLTNLGAPAAFKYFDTTIDRKRYTSTKEVLDATLIHQSITGLYETRIDLSQLGGDGGGGSGGSGGSGGSGGTLNIEDEYRLHETSKEPDVSLGSTWLSDFPQAWAETGGMGLAVRQAPLIIPLKATSTPVSIKQYPMSQEARLGIKPHIQRLLDQGILVPCQSPWNTPLLPVKKPGTNDYRPVQDLREVNKRVEDIHPTVPNPYNLLSGLPPSHQWYTVLDLKDAFFCLRLHPTSQPLFAFEWRDPEMGISGQLTWTRLPQGFKNSPTLFNEALHRDLADFRIQHPDLILLQYVDDLLLAATSELDCQQGTRALLQTLGNLGYRASAKKAQICQKQVKYLGYLLKEGQRWLTEARKETVMGQPTPKTPRQLREFLGKAGFCRLFIPGFAEMAAPLYPLTKPGTLFNWGPDQQKAYQEIKQALLTAPALGLPDLTKPFELFVDEKQGYAKGVLTQKLGPWRRPVAYLSKKLDPVAAGWPPCLRMVAAIAVLTKDAGKLTMGQPLVILAPHAVEALVKQPPDRWLSNARMTHYQALLLDTDRVQFGPVVALNPATLLPLPEEGLQHNCLDILAEAHGTRPDLTDQPLPDADHTWYTDGSSLLQEGQRKAGAAVTTETEVIWAKALPAGTSAQRAELIALTQALKMAEGKKLNVYTDSRYAFATAHIHGEIYRRRGWLTSEGKEIKNKDEILALLKALFLPKRLSIIHCPGHQKGHSAEARGNRMADQAARKAAITETPDTSTLLIENSSPSGGSKRTADGSEFEAGKRTADGSEFEKRTADGSEFESPKKKAKVE

SEQ ID NO: 2688 - protein, 2116 aa, synthetic construct
MPAAKRVKLDGGDKKYSIGLDIGTNSVGWAVITDEYKVPSKKFKVLGNTDRHSIKKNLIGALLFDSGETAEATRLKRTARRRYTRRKNRICYLQEIFSNEMAKVDDSFFHRLEESFLVEEDKKHERHPIFGNIVDEVAYHEKYPTIYHLRKKLVDSTDKADLRLIYLALAHMIKFRGHFLIEGDLNPDNSDVDKLFIQLVQTYNQLFEENPINASGVDAKAILSARLSKSRRLENLIAQLPGEKKNGLFGNLIALSLGLTPNFKSNFDLAEDAKLQLSKDTYDDDLDNLLAQIGDQYADLFLAAKNLSDAILLSDILRVNTEITKAPLSASMIKRYDEHHQDLTLLKALVRQQLPEKYKEIFFDQSKNGYAGYIDGGASQEEFYKFIKPILEKMDGTEELLVKLNREDLLRKQRTFDNGSIPHQIHLGELHAILRRQEDFYPFLKDNREKIEKILTFRIPYYVGPLARGNSRFAWMTRKSEETITPWNFEEVVDKGASAQSFIERMTNFDKNLPNEKVLPKHSLLYEYFTVYNELTKVKYVTEGMRKPAFLSGEQKKAIVDLLFKTNRKVTVKQLKEDYFKKIECFDSVEISGVEDRFNASLGTYHDLLKIIKDKDFLDNEENEDILEDIVLTLTLFEDREMIEERLKTYAHLFDDKVMKQLKRRRYTGWGRLSRKLINGIRDKQSGKTILDFLKSDGFANRNFMQLIHDDSLTFKEDIQKAQVSGQGDSLHEHIANLAGSPAIKKGILQTVKVVDELVKVMGRHKPENIVIEMARENQTTQKGQKNSRERMKRIEEGIKELGSQILKEHPVENTQLQNEKLYLYYLQNGRDMYVDQELDINRLSDYDVDHIVPQSFLKDDSIDNKVLTRSDKARGKSDNVPSEEVVKKMKNYWRQLLNAKLITQRKFDNLTKAERGGLSELDKAGFIKRQLVETRQITKHVAQILDSRMNTKYDENDKLIREVKVITLKSKLVSDFRKDFQFYKVREINNYHHAHDAYLNAVVGTALIKKYPKLESEFVYGDYKVYDVRKMIAKSEQEIGKATAKYFFYSNIMNFFKTEITLANGEIRKRPLIETNGETGEIVWDKGRDFATVRKVLSMPQVNIVKKTEVQTGGFSKESILPKRNSDKLIARKKDWDPKKYGGFDSPTVAYSVLVVAKVEKGKSKKLKSVKELLGITIMERSSFEKNPIDFLEAKGYKEVKKDLIIKLPKYSLFELENGRKRMLASAGELQKGNELALPSKYVNFLYLASHYEKLKGSPEDNEQKQLFVEQHKHYLDEIIEQISEFSKRVILADANLDKVLSAYNKHRDKPIREQAENIIHLFTLTNLGAPAAFKYFDTTIDRKRYTSTKEVLDATLIHQSITGLYETRIDLSQLGGDGGGGGGSSEAAAKGGTLNIEDEYRLHETSKEPDVSLGSTWLSDFPQAWAETGGMGLAVRQAPLIIPLKATSTPVSIKQYPMSQEARLGIKPHIQRLLDQGILVPCQSPWNTPLLPVKKPGTNDYRPVQDLREVNKRVEDIHPTVPNPYNLLSGLPPSHQWYTVLDLKDAFFCLRLHPTSQPLFAFEWRDPEMGISGQLTWTRLPQGFKNSPTLFNEALHRDLADFRIQHPDLILLQYVDDLLLAATSELDCQQGTRALLQTLGNLGYRASAKKAQICQKQVKYLGYLLKEGQRWLTEARKETVMGQPTPKTPRQLREFLGKAGFCRLFIPGFAEMAAPLYPLTKPGTLFNWGPDQQKAYQEIKQALLTAPALGLPDLTKPFELFVDEKQGYAKGVLTQKLGPWRRPVAYLSKKLDPVAAGWPPCLRMVAAIAVLTKDAGKLTMGQPLVILAPHAVEALVKQPPDRWLSNARMTHYQALLLDTDRVQFGPVVALNPATLLPLPEEGLQHNCLDILAEAHGTRPDLTDQPLPDADHTWYTDGSSLLQEGQRKAGAAVTTETEVIWAKALPAGTSAQRAELIALTQALKMAEGKKLNVYTDSRYAFATAHIHGEIYRRRGWLTSEGKEIKNKDEILALLKALFLPKRLSIIHCPGHQKGHSAEARGNRMADQAARKAAITETPDTSTLLIENSSPSGGSKRTADGSEFEAGKRTADGSEFEKRTADGSEFESPKKKAKVE

SEQ ID NO: 2689 - protein, 2114 aa, synthetic construct
MPAAKRVKLDGGDKKYSIGLDIGTNSVGWAVITDEYKVPSKKFKVLGNTDRHSIKKNLIGALLFDSGETAEATRLKRTARRRYTRRKNRICYLQEIFSNEMAKVDDSFFHRLEESFLVEEDKKHERHPIFGNIVDEVAYHEKYPTIYHLRKKLVDSTDKADLRLIYLALAHMIKFRGHFLIEGDLNPDNSDVDKLFIQLVQTYNQLFEENPINASGVDAKAILSARLSKSRRLENLIAQLPGEKKNGLFGNLIALSLGLTPNFKSNFDLAEDAKLQLSKDTYDDDLDNLLAQIGDQYADLFLAAKNLSDAILLSDILRVNTEITKAPLSASMIKRYDEHHQDLTLLKALVRQQLPEKYKEIFFDQSKNGYAGYIDGGASQEEFYKFIKPILEKMDGTEELLVKLNREDLLRKQRTFDNGSIPHQIHLGELHAILRRQEDFYPFLKDNREKIEKILTFRIPYYVGPLARGNSRFAWMTRKSEETITPWNFEEVVDKGASAQSFIERMTNFDKNLPNEKVLPKHSLLYEYFTVYNELTKVKYVTEGMRKPAFLSGEQKKAIVDLLFKTNRKVTVKQLKEDYFKKIECFDSVEISGVEDRFNASLGTYHDLLKIIKDKDFLDNEENEDILEDIVLTLTLFEDREMIEERLKTYAHLFDDKVMKQLKRRRYTGWGRLSRKLINGIRDKQSGKTILDFLKSDGFANRNFMQLIHDDSLTFKEDIQKAQVSGQGDSLHEHIANLAGSPAIKKGILQTVKVVDELVKVMGRHKPENIVIEMARENQTTQKGQKNSRERMKRIEEGIKELGSQILKEHPVENTQLQNEKLYLYYLQNGRDMYVDQELDINRLSDYDVDHIVPQSFLKDDSIDNKVLTRSDKARGKSDNVPSEEVVKKMKNYWRQLLNAKLITQRKFDNLTKAERGGLSELDKAGFIKRQLVETRQITKHVAQILDSRMNTKYDENDKLIREVKVITLKSKLVSDFRKDFQFYKVREINNYHHAHDAYLNAVVGTALIKKYPKLESEFVYGDYKVYDVRKMIAKSEQEIGKATAKYFFYSNIMNFFKTEITLANGEIRKRPLIETNGETGEIVWDKGRDFATVRKVLSMPQVNIVKKTEVQTGGFSKESILPKRNSDKLIARKKDWDPKKYGGFDSPTVAYSVLVVAKVEKGKSKKLKSVKELLGITIMERSSFEKNPIDFLEAKGYKEVKKDLIIKLPKYSLFELENGRKRMLASAGELQKGNELALPSKYVNFLYLASHYEKLKGSPEDNEQKQLFVEQHKHYLDEIIEQISEFSKRVILADANLDKVLSAYNKHRDKPIREQAENIIHLFTLTNLGAPAAFKYFDTTIDRKRYTSTKEVLDATLIHQSITGLYETRIDLSQLGGDGGGSSPAPGGSGGTLNIEDEYRLHETSKEPDVSLGSTWLSDFPQAWAETGGMGLAVRQAPLIIPLKATSTPVSIKQYPMSQEARLGIKPHIQRLLDQGILVPCQSPWNTPLLPVKKPGTNDYRPVQDLREVNKRVEDIHPTVPNPYNLLSGLPPSHQWYTVLDLKDAFFCLRLHPTSQPLFAFEWRDPEMGISGQLTWTRLPQGFKNSPTLFNEALHRDLADFRIQHPDLILLQYVDDLLLAATSELDCQQGTRALLQTLGNLGYRASAKKAQICQKQVKYLGYLLKEGQRWLTEARKETVMGQPTPKTPRQLREFLGKAGFCRLFIPGFAEMAAPLYPLTKPGTLFNWGPDQQKAYQEIKQALLTAPALGLPDLTKPFELFVDEKQGYAKGVLTQKLGPWRRPVAYLSKKLDPVAAGWPPCLRMVAAIAVLTKDAGKLTMGQPLVILAPHAVEALVKQPPDRWLSNARMTHYQALLLDTDRVQFGPVVALNPATLLPLPEEGLQHNCLDILAEAHGTRPDLTDQPLPDADHTWYTDGSSLLQEGQRKAGAAVTTETEVIWAKALPAGTSAQRAELIALTQALKMAEGKKLNVYTDSRYAFATAHIHGEIYRRRGWLTSEGKEIKNKDEILALLKALFLPKRLSIIHCPGHQKGHSAEARGNRMADQAARKAAITETPDTSTLLIENSSPSGGSKRTADGSEFEAGKRTADGSEFEKRTADGSEFESPKKKAKVE

SEQ ID NO: 2690 - protein, 2116 aa, synthetic construct
MPAAKRVKLDGGDKKYSIGLDIGTNSVGWAVITDEYKVPSKKFKVLGNTDRHSIKKNLIGALLFDSGETAEATRLKRTARRRYTRRKNRICYLQEIFSNEMAKVDDSFFHRLEESFLVEEDKKHERHPIFGNIVDEVAYHEKYPTIYHLRKKLVDSTDKADLRLIYLALAHMIKFRGHFLIEGDLNPDNSDVDKLFIQLVQTYNQLFEENPINASGVDAKAILSARLSKSRRLENLIAQLPGEKKNGLFGNLIALSLGLTPNFKSNFDLAEDAKLQLSKDTYDDDLDNLLAQIGDQYADLFLAAKNLSDAILLSDILRVNTEITKAPLSASMIKRYDEHHQDLTLLKALVRQQLPEKYKEIFFDQSKNGYAGYIDGGASQEEFYKFIKPILEKMDGTEELLVKLNREDLLRKQRTFDNGSIPHQIHLGELHAILRRQEDFYPFLKDNREKIEKILTFRIPYYVGPLARGNSRFAWMTRKSEETITPWNFEEVVDKGASAQSFIERMTNFDKNLPNEKVLPKHSLLYEYFTVYNELTKVKYVTEGMRKPAFLSGEQKKAIVDLLFKTNRKVTVKQLKEDYFKKIECFDSVEISGVEDRFNASLGTYHDLLKIIKDKDFLDNEENEDILEDIVLTLTLFEDREMIEERLKTYAHLFDDKVMKQLKRRRYTGWGRLSRKLINGIRDKQSGKTILDFLKSDGFANRNFMQLIHDDSLTFKEDIQKAQVSGQGDSLHEHIANLAGSPAIKKGILQTVKVVDELVKVMGRHKPENIVIEMARENQTTQKGQKNSRERMKRIEEGIKELGSQILKEHPVENTQLQNEKLYLYYLQNGRDMYVDQELDINRLSDYDVDHIVPQSFLKDDSIDNKVLTRSDKARGKSDNVPSEEVVKKMKNYWRQLLNAKLITQRKFDNLTKAERGGLSELDKAGFIKRQLVETRQITKHVAQILDSRMNTKYDENDKLIREVKVITLKSKLVSDFRKDFQFYKVREINNYHHAHDAYLNAVVGTALIKKYPKLESEFVYGDYKVYDVRKMIAKSEQEIGKATAKYFFYSNIMNFFKTEITLANGEIRKRPLIETNGETGEIVWDKGRDFATVRKVLSMPQVNIVKKTEVQTGGFSKESILPKRNSDKLIARKKDWDPKKYGGFDSPTVAYSVLVVAKVEKGKSKKLKSVKELLGITIMERSSFEKNPIDFLEAKGYKEVKKDLIIKLPKYSLFELENGRKRMLASAGELQKGNELALPSKYVNFLYLASHYEKLKGSPEDNEQKQLFVEQHKHYLDEIIEQISEFSKRVILADANLDKVLSAYNKHRDKPIREQAENIIHLFTLTNLGAPAAFKYFDTTIDRKRYTSTKEVLDATLIHQSITGLYETRIDLSQLGGDGGGGSEAAAKPAPGGTLNIEDEYRLHETSKEPDVSLGSTWLSDFPQAWAETGGMGLAVRQAPLIIPLKATSTPVSIKQYPMSQEARLGIKPHIQRLLDQGILVPCQSPWNTPLLPVKKPGTNDYRPVQDLREVNKRVEDIHPTVPNPYNLLSGLPPSHQWYTVLDLKDAFFCLRLHPTSQPLFAFEWRDPEMGISGQLTWTRLPQGFKNSPTLFNEALHRDLADFRIQHPDLILLQYVDDLLLAATSELDCQQGTRALLQTLGNLGYRASAKKAQICQKQVKYLGYLLKEGQRWLTEARKETVMGQPTPKTPRQLREFLGKAGFCRLFIPGFAEMAAPLYPLTKPGTLFNWGPDQQKAYQEIKQALLTAPALGLPDLTKPFELFVDEKQGYAKGVLTQKLGPWRRPVAYLSKKLDPVAAGWPPCLRMVAAIAVLTKDAGKLTMGQPLVILAPHAVEALVKQPPDRWLSNARMTHYQALLLDTDRVQFGPVVALNPATLLPLPEEGLQHNCLDILAEAHGTRPDLTDQPLPDADHTWYTDGSSLLQEGQRKAGAAVTTETEVIWAKALPAGTSAQRAELIALTQALKMAEGKKLNVYTDSRYAFATAHIHGEIYRRRGWLTSEGKEIKNKDEILALLKALFLPKRLSIIHCPGHQKGHSAEARGNRMADQAARKAAITETPDTSTLLIENSSPSGGSKRTADGSEFEAGKRTADGSEFEKRTADGSEFESPKKKAKVE

SEQ ID NO: 2691 - protein, 2110 aa, synthetic construct
MPAAKRVKLDGGDKKYSIGLDIGTNSVGWAVITDEYKVPSKKFKVLGNTDRHSIKKNLIGALLFDSGETAEATRLKRTARRRYTRRKNRICYLQEIFSNEMAKVDDSFFHRLEESFLVEEDKKHERHPIFGNIVDEVAYHEKYPTIYHLRKKLVDSTDKADLRLIYLALAHMIKFRGHFLIEGDLNPDNSDVDKLFIQLVQTYNQLFEENPINASGVDAKAILSARLSKSRRLENLIAQLPGEKKNGLFGNLIALSLGLTPNFKSNFDLAEDAKLQLSKDTYDDDLDNLLAQIGDQYADLFLAAKNLSDAILLSDILRVNTEITKAPLSASMIKRYDEHHQDLTLLKALVRQQLPEKYKEIFFDQSKNGYAGYIDGGASQEEFYKFIKPILEKMDGTEELLVKLNREDLLRKQRTFDNGSIPHQIHLGELHAILRRQEDFYPFLKDNREKIEKILTFRIPYYVGPLARGNSRFAWMTRKSEETITPWNFEEVVDKGASAQSFIERMTNFDKNLPNEKVLPKHSLLYEYFTVYNELTKVKYVTEGMRKPAFLSGEQKKAIVDLLFKTNRKVTVKQLKEDYFKKIECFDSVEISGVEDRFNASLGTYHDLLKIIKDKDFLDNEENEDILEDIVLTLTLFEDREMIEERLKTYAHLFDDKVMKQLKRRRYTGWGRLSRKLINGIRDKQSGKTILDFLKSDGFANRNFMQLIHDDSLTFKEDIQKAQVSGQGDSLHEHIANLAGSPAIKKGILQTVKVVDELVKVMGRHKPENIVIEMARENQTTQKGQKNSRERMKRIEEGIKELGSQILKEHPVENTQLQNEKLYLYYLQNGRDMYVDQELDINRLSDYDVDHIVPQSFLKDDSIDNKVLTRSDKARGKSDNVPSEEVVKKMKNYWRQLLNAKLITQRKFDNLTKAERGGLSELDKAGFIKRQLVETRQITKHVAQILDSRMNTKYDENDKLIREVKVITLKSKLVSDFRKDFQFYKVREINNYHHAHDAYLNAVVGTALIKKYPKLESEFVYGDYKVYDVRKMIAKSEQEIGKATAKYFFYSNIMNFFKTEITLANGEIRKRPLIETNGETGEIVWDKGRDFATVRKVLSMPQVNIVKKTEVQTGGFSKESILPKRNSDKLIARKKDWDPKKYGGFDSPTVAYSVLVVAKVEKGKSKKLKSVKELLGITIMERSSFEKNPIDFLEAKGYKEVKKDLIIKLPKYSLFELENGRKRMLASAGELQKGNELALPSKYVNFLYLASHYEKLKGSPEDNEQKQLFVEQHKHYLDEIIEQISEFSKRVILADANLDKVLSAYNKHRDKPIREQAENIIHLFTLTNLGAPAAFKYFDTTIDRKRYTSTKEVLDATLIHQSITGLYETRIDLSQLGGDGGGGGGSGGTLNIEDEYRLHETSKEPDVSLGSTWLSDFPQAWAETGGMGLAVRQAPLIIPLKATSTPVSIKQYPMSQEARLGIKPHIQRLLDQGILVPCQSPWNTPLLPVKKPGTNDYRPVQDLREVNKRVEDIHPTVPNPYNLLSGLPPSHQWYTVLDLKDAFFCLRLHPTSQPLFAFEWRDPEMGISGQLTWTRLPQGFKNSPTLFNEALHRDLADFRIQHPDLILLQYVDDLLLAATSELDCQQGTRALLQTLGNLGYRASAKKAQICQKQVKYLGYLLKEGQRWLTEARKETVMGQPTPKTPRQLREFLGKAGFCRLFIPGFAEMAAPLYPLTKPGTLFNWGPDQQKAYQEIKQALLTAPALGLPDLTKPFELFVDEKQGYAKGVLTQKLGPWRRPVAYLSKKLDPVAAGWPPCLRMVAAIAVLTKDAGKLTMGQPLVILAPHAVEALVKQPPDRWLSNARMTHYQALLLDTDRVQFGPVVALNPATLLPLPEEGLQHNCLDILAEAHGTRPDLTDQPLPDADHTWYTDGSSLLQEGQRKAGAAVTTETEVIWAKALPAGTSAQRAELIALTQALKMAEGKKLNVYTDSRYAFATAHIHGEIYRRRGWLTSEGKEIKNKDEILALLKALFLPKRLSIIHCPGHQKGHSAEARGNRMADQAARKAAITETPDTSTLLIENSSPSGGSKRTADGSEFEAGKRTADGSEFEKRTADGSEFESPKKKAKVE

SEQ ID NO: 2692 - protein, 2116 aa, synthetic construct
MPAAKRVKLDGGDKKYSIGLDIGTNSVGWAVITDEYKVPSKKFKVLGNTDRHSIKKNLIGALLFDSGETAEATRLKRTARRRYTRRKNRICYLQEIFSNEMAKVDDSFFHRLEESFLVEEDKKHERHPIFGNIVDEVAYHEKYPTIYHLRKKLVDSTDKADLRLIYLALAHMIKFRGHFLIEGDLNPDNSDVDKLFIQLVQTYNQLFEENPINASGVDAKAILSARLSKSRRLENLIAQLPGEKKNGLFGNLIALSLGLTPNFKSNFDLAEDAKLQLSKDTYDDDLDNLLAQIGDQYADLFLAAKNLSDAILLSDILRVNTEITKAPLSASMIKRYDEHHQDLTLLKALVRQQLPEKYKEIFFDQSKNGYAGYIDGGASQEEFYKFIKPILEKMDGTEELLVKLNREDLLRKQRTFDNGSIPHQIHLGELHAILRRQEDFYPFLKDNREKIEKILTFRIPYYVGPLARGNSRFAWMTRKSEETITPWNFEEVVDKGASAQSFIERMTNFDKNLPNEKVLPKHSLLYEYFTVYNELTKVKYVTEGMRKPAFLSGEQKKAIVDLLFKTNRKVTVKQLKEDYFKKIECFDSVEISGVEDRFNASLGTYHDLLKIIKDKDFLDNEENEDILEDIVLTLTLFEDREMIEERLKTYAHLFDDKVMKQLKRRRYTGWGRLSRKLINGIRDKQSGKTILDFLKSDGFANRNFMQLIHDDSLTFKEDIQKAQVSGQGDSLHEHIANLAGSPAIKKGILQTVKVVDELVKVMGRHKPENIVIEMARENQTTQKGQKNSRERMKRIEEGIKELGSQILKEHPVENTQLQNEKLYLYYLQNGRDMYVDQELDINRLSDYDVDHIVPQSFLKDDSIDNKVLTRSDKARGKSDNVPSEEVVKKMKNYWRQLLNAKLITQRKFDNLTKAERGGLSELDKAGFIKRQLVETRQITKHVAQILDSRMNTKYDENDKLIREVKVITLKSKLVSDFRKDFQFYKVREINNYHHAHDAYLNAVVGTALIKKYPKLESEFVYGDYKVYDVRKMIAKSEQEIGKATAKYFFYSNIMNFFKTEITLANGEIRKRPLIETNGETGEIVWDKGRDFATVRKVLSMPQVNIVKKTEVQTGGFSKESILPKRNSDKLIARKKDWDPKKYGGFDSPTVAYSVLVVAKVEKGKSKKLKSVKELLGITIMERSSFEKNPIDFLEAKGYKEVKKDLIIKLPKYSLFELENGRKRMLASAGELQKGNELALPSKYVNFLYLASHYEKLKGSPEDNEQKQLFVEQHKHYLDEIIEQISEFSKRVILADANLDKVLSAYNKHRDKPIREQAENIIHLFTLTNLGAPAAFKYFDTTIDRKRYTSTKEVLDATLIHQSITGLYETRIDLSQLGGDGGGGSGGGEAAAKGGTLNIEDEYRLHETSKEPDVSLGSTWLSDFPQAWAETGGMGLAVRQAPLIIPLKATSTPVSIKQYPMSQEARLGIKPHIQRLLDQGILVPCQSPWNTPLLPVKKPGTNDYRPVQDLREVNKRVEDIHPTVPNPYNLLSGLPPSHQWYTVLDLKDAFFCLRLHPTSQPLFAFEWRDPEMGISGQLTWTRLPQGFKNSPTLFNEALHRDLADFRIQHPDLILLQYVDDLLLAATSELDCQQGTRALLQTLGNLGYRASAKKAQICQKQVKYLGYLLKEGQRWLTEARKETVMGQPTPKTPRQLREFLGKAGFCRLFIPGFAEMAAPLYPLTKPGTLFNWGPDQQKAYQEIKQALLTAPALGLPDLTKPFELFVDEKQGYAKGVLTQKLGPWRRPVAYLSKKLDPVAAGWPPCLRMVAAIAVLTKDAGKLTMGQPLVILAPHAVEALVKQPPDRWLSNARMTHYQALLLDTDRVQFGPVVALNPATLLPLPEEGLQHNCLDILAEAHGTRPDLTDQPLPDADHTWYTDGSSLLQEGQRKAGAAVTTETEVIWAKALPAGTSAQRAELIALTQALKMAEGKKLNVYTDSRYAFATAHIHGEIYRRRGWLTSEGKEIKNKDEILALLKALFLPKRLSIIHCPGHQKGHSAEARGNRMADQAARKAAITETPDTSTLLIENSSPSGGSKRTADGSEFEAGKRTADGSEFEKRTADGSEFESPKKKAKVE

SEQ ID NO: 2693 - protein, 2111 aa, synthetic construct
MPAAKRVKLDGGDKKYSIGLDIGTNSVGWAVITDEYKVPSKKFKVLGNTDRHSIKKNLIGALLFDSGETAEATRLKRTARRRYTRRKNRICYLQEIFSNEMAKVDDSFFHRLEESFLVEEDKKHERHPIFGNIVDEVAYHEKYPTIYHLRKKLVDSTDKADLRLIYLALAHMIKFRGHFLIEGDLNPDNSDVDKLFIQLVQTYNQLFEENPINASGVDAKAILSARLSKSRRLENLIAQLPGEKKNGLFGNLIALSLGLTPNFKSNFDLAEDAKLQLSKDTYDDDLDNLLAQIGDQYADLFLAAKNLSDAILLSDILRVNTEITKAPLSASMIKRYDEHHQDLTLLKALVRQQLPEKYKEIFFDQSKNGYAGYIDGGASQEEFYKFIKPILEKMDGTEELLVKLNREDLLRKQRTFDNGSIPHQIHLGELHAILRRQEDFYPFLKDNREKIEKILTFRIPYYVGPLARGNSRFAWMTRKSEETITPWNFEEVVDKGASAQSFIERMTNFDKNLPNEKVLPKHSLLYEYFTVYNELTKVKYVTEGMRKPAFLSGEQKKAIVDLLFKTNRKVTVKQLKEDYFKKIECFDSVEISGVEDRFNASLGTYHDLLKIIKDKDFLDNEENEDILEDIVLTLTLFEDREMIEERLKTYAHLFDDKVMKQLKRRRYTGWGRLSRKLINGIRDKQSGKTILDFLKSDGFANRNFMQLIHDDSLTFKEDIQKAQVSGQGDSLHEHIANLAGSPAIKKGILQTVKVVDELVKVMGRHKPENIVIEMARENQTTQKGQKNSRERMKRIEEGIKELGSQILKEHPVENTQLQNEKLYLYYLQNGRDMYVDQELDINRLSDYDVDHIVPQSFLKDDSIDNKVLTRSDKARGKSDNVPSEEVVKKMKNYWRQLLNAKLITQRKFDNLTKAERGGLSELDKAGFIKRQLVETRQITKHVAQILDSRMNTKYDENDKLIREVKVITLKSKLVSDFRKDFQFYKVREINNYHHAHDAYLNAVVGTALIKKYPKLESEFVYGDYKVYDVRKMIAKSEQEIGKATAKYFFYSNIMNFFKTEITLANGEIRKRPLIETNGETGEIVWDKGRDFATVRKVLSMPQVNIVKKTEVQTGGFSKESILPKRNSDKLIARKKDWDPKKYGGFDSPTVAYSVLVVAKVEKGKSKKLKSVKELLGITIMERSSFEKNPIDFLEAKGYKEVKKDLIIKLPKYSLFELENGRKRMLASAGELQKGNELALPSKYVNFLYLASHYEKLKGSPEDNEQKQLFVEQHKHYLDEIIEQISEFSKRVILADANLDKVLSAYNKHRDKPIREQAENIIHLFTLTNLGAPAAFKYFDTTIDRKRYTSTKEVLDATLIHQSITGLYETRIDLSQLGGDGGGGSGGSGGTLNIEDEYRLHETSKEPDVSLGSTWLSDFPQAWAETGGMGLAVRQAPLIIPLKATSTPVSIKQYPMSQEARLGIKPHIQRLLDQGILVPCQSPWNTPLLPVKKPGTNDYRPVQDLREVNKRVEDIHPTVPNPYNLLSGLPPSHQWYTVLDLKDAFFCLRLHPTSQPLFAFEWRDPEMGISGQLTWTRLPQGFKNSPTLFNEALHRDLADFRIQHPDLILLQYVDDLLLAATSELDCQQGTRALLQTLGNLGYRASAKKAQICQKQVKYLGYLLKEGQRWLTEARKETVMGQPTPKTPRQLREFLGKAGFCRLFIPGFAEMAAPLYPLTKPGTLFNWGPDQQKAYQEIKQALLTAPALGLPDLTKPFELFVDEKQGYAKGVLTQKLGPWRRPVAYLSKKLDPVAAGWPPCLRMVAAIAVLTKDAGKLTMGQPLVILAPHAVEALVKQPPDRWLSNARMTHYQALLLDTDRVQFGPVVALNPATLLPLPEEGLQHNCLDILAEAHGTRPDLTDQPLPDADHTWYTDGSSLLQEGQRKAGAAVTTETEVIWAKALPAGTSAQRAELIALTQALKMAEGKKLNVYTDSRYAFATAHIHGEIYRRRGWLTSEGKEIKNKDEILALLKALFLPKRLSIIHCPGHQKGHSAEARGNRMADQAARKAAITETPDTSTLLIENSSPSGGSKRTADGSEFEAGKRTADGSEFEKRTADGSEFESPKKKAKVE

SEQ ID NO: 2694 - protein, 2114 aa, synthetic construct
MPAAKRVKLDGGDKKYSIGLDIGTNSVGWAVITDEYKVPSKKFKVLGNTDRHSIKKNLIGALLFDSGETAEATRLKRTARRRYTRRKNRICYLQEIFSNEMAKVDDSFFHRLEESFLVEEDKKHERHPIFGNIVDEVAYHEKYPTIYHLRKKLVDSTDKADLRLIYLALAHMIKFRGHFLIEGDLNPDNSDVDKLFIQLVQTYNQLFEENPINASGVDAKAILSARLSKSRRLENLIAQLPGEKKNGLFGNLIALSLGLTPNFKSNFDLAEDAKLQLSKDTYDDDLDNLLAQIGDQYADLFLAAKNLSDAILLSDILRVNTEITKAPLSASMIKRYDEHHQDLTLLKALVRQQLPEKYKEIFFDQSKNGYAGYIDGGASQEEFYKFIKPILEKMDGTEELLVKLNREDLLRKQRTFDNGSIPHQIHLGELHAILRRQEDFYPFLKDNREKIEKILTFRIPYYVGPLARGNSRFAWMTRKSEETITPWNFEEVVDKGASAQSFIERMTNFDKNLPNEKVLPKHSLLYEYFTVYNELTKVKYVTEGMRKPAFLSGEQKKAIVDLLFKTNRKVTVKQLKEDYFKKIECFDSVEISGVEDRFNASLGTYHDLLKIIKDKDFLDNEENEDILEDIVLTLTLFEDREMIEERLKTYAHLFDDKVMKQLKRRRYTGWGRLSRKLINGIRDKQSGKTILDFLKSDGFANRNFMQLIHDDSLTFKEDIQKAQVSGQGDSLHEHIANLAGSPAIKKGILQTVKVVDELVKVMGRHKPENIVIEMARENQTTQKGQKNSRERMKRIEEGIKELGSQILKEHPVENTQLQNEKLYLYYLQNGRDMYVDQELDINRLSDYDVDHIVPQSFLKDDSIDNKVLTRSDKARGKSDNVPSEEVVKKMKNYWRQLLNAKLITQRKFDNLTKAERGGLSELDKAGFIKRQLVETRQITKHVAQILDSRMNTKYDENDKLIREVKVITLKSKLVSDFRKDFQFYKVREINNYHHAHDAYLNAVVGTALIKKYPKLESEFVYGDYKVYDVRKMIAKSEQEIGKATAKYFFYSNIMNFFKTEITLANGEIRKRPLIETNGETGEIVWDKGRDFATVRKVLSMPQVNIVKKTEVQTGGFSKESILPKRNSDKLIARKKDWDPKKYGGFDSPTVAYSVLVVAKVEKGKSKKLKSVKELLGITIMERSSFEKNPIDFLEAKGYKEVKKDLIIKLPKYSLFELENGRKRMLASAGELQKGNELALPSKYVNFLYLASHYEKLKGSPEDNEQKQLFVEQHKHYLDEIIEQISEFSKRVILADANLDKVLSAYNKHRDKPIREQAENIIHLFTLTNLGAPAAFKYFDTTIDRKRYTSTKEVLDATLIHQSITGLYETRIDLSQLGGDGGGSSGGSGGGGGTLNIEDEYRLHETSKEPDVSLGSTWLSDFPQAWAETGGMGLAVRQAPLIIPLKATSTPVSIKQYPMSQEARLGIKPHIQRLLDQGILVPCQSPWNTPLLPVKKPGTNDYRPVQDLREVNKRVEDIHPTVPNPYNLLSGLPPSHQWYTVLDLKDAFFCLRLHPTSQPLFAFEWRDPEMGISGQLTWTRLPQGFKNSPTLFNEALHRDLADFRIQHPDLILLQYVDDLLLAATSELDCQQGTRALLQTLGNLGYRASAKKAQICQKQVKYLGYLLKEGQRWLTEARKETVMGQPTPKTPRQLREFLGKAGFCRLFIPGFAEMAAPLYPLTKPGTLFNWGPDQQKAYQEIKQALLTAPALGLPDLTKPFELFVDEKQGYAKGVLTQKLGPWRRPVAYLSKKLDPVAAGWPPCLRMVAAIAVLTKDAGKLTMGQPLVILAPHAVEALVKQPPDRWLSNARMTHYQALLLDTDRVQFGPVVALNPATLLPLPEEGLQHNCLDILAEAHGTRPDLTDQPLPDADHTWYTDGSSLLQEGQRKAGAAVTTETEVIWAKALPAGTSAQRAELIALTQALKMAEGKKLNVYTDSRYAFATAHIHGEIYRRRGWLTSEGKEIKNKDEILALLKALFLPKRLSIIHCPGHQKGHSAEARGNRMADQAARKAAITETPDTSTLLIENSSPSGGSKRTADGSEFEAGKRTADGSEFEKRTADGSEFESPKKKAKVE

SEQ ID NO: 2695 - protein, 2116 aa, synthetic construct
MPAAKRVKLDGGDKKYSIGLDIGTNSVGWAVITDEYKVPSKKFKVLGNTDRHSIKKNLIGALLFDSGETAEATRLKRTARRRYTRRKNRICYLQEIFSNEMAKVDDSFFHRLEESFLVEEDKKHERHPIFGNIVDEVAYHEKYPTIYHLRKKLVDSTDKADLRLIYLALAHMIKFRGHFLIEGDLNPDNSDVDKLFIQLVQTYNQLFEENPINASGVDAKAILSARLSKSRRLENLIAQLPGEKKNGLFGNLIALSLGLTPNFKSNFDLAEDAKLQLSKDTYDDDLDNLLAQIGDQYADLFLAAKNLSDAILLSDILRVNTEITKAPLSASMIKRYDEHHQDLTLLKALVRQQLPEKYKEIFFDQSKNGYAGYIDGGASQEEFYKFIKPILEKMDGTEELLVKLNREDLLRKQRTFDNGSIPHQIHLGELHAILRRQEDFYPFLKDNREKIEKILTFRIPYYVGPLARGNSRFAWMTRKSEETITPWNFEEVVDKGASAQSFIERMTNFDKNLPNEKVLPKHSLLYEYFTVYNELTKVKYVTEGMRKPAFLSGEQKKAIVDLLFKTNRKVTVKQLKEDYFKKIECFDSVEISGVEDRFNASLGTYHDLLKIIKDKDFLDNEENEDILEDIVLTLTLFEDREMIEERLKTYAHLFDDKVMKQLKRRRYTGWGRLSRKLINGIRDKQSGKTILDFLKSDGFANRNFMQLIHDDSLTFKEDIQKAQVSGQGDSLHEHIANLAGSPAIKKGILQTVKVVDELVKVMGRHKPENIVIEMARENQTTQKGQKNSRERMKRIEEGIKELGSQILKEHPVENTQLQNEKLYLYYLQNGRDMYVDQELDINRLSDYDVDHIVPQSFLKDDSIDNKVLTRSDKARGKSDNVPSEEVVKKMKNYWRQLLNAKLITQRKFDNLTKAERGGLSELDKAGFIKRQLVETRQITKHVAQILDSRMNTKYDENDKLIREVKVITLKSKLVSDFRKDFQFYKVREINNYHHAHDAYLNAVVGTALIKKYPKLESEFVYGDYKVYDVRKMIAKSEQEIGKATAKYFFYSNIMNFFKTEITLANGEIRKRPLIETNGETGEIVWDKGRDFATVRKVLSMPQVNIVKKTEVQTGGFSKESILPKRNSDKLIARKKDWDPKKYGGFDSPTVAYSVLVVAKVEKGKSKKLKSVKELLGITIMERSSFEKNPIDFLEAKGYKEVKKDLIIKLPKYSLFELENGRKRMLASAGELQKGNELALPSKYVNFLYLASHYEKLKGSPEDNEQKQLFVEQHKHYLDEIIEQISEFSKRVILADANLDKVLSAYNKHRDKPIREQAENIIHLFTLTNLGAPAAFKYFDTTIDRKRYTSTKEVLDATLIHQSITGLYETRIDLSQLGGDGGEAAAKGGGGSSGGTLNIEDEYRLHETSKEPDVSLGSTWLSDFPQAWAETGGMGLAVRQAPLIIPLKATSTPVSIKQYPMSQEARLGIKPHIQRLLDQGILVPCQSPWNTPLLPVKKPGTNDYRPVQDLREVNKRVEDIHPTVPNPYNLLSGLPPSHQWYTVLDLKDAFFCLRLHPTSQPLFAFEWRDPEMGISGQLTWTRLPQGFKNSPTLFNEALHRDLADFRIQHPDLILLQYVDDLLLAATSELDCQQGTRALLQTLGNLGYRASAKKAQICQKQVKYLGYLLKEGQRWLTEARKETVMGQPTPKTPRQLREFLGKAGFCRLFIPGFAEMAAPLYPLTKPGTLFNWGPDQQKAYQEIKQALLTAPALGLPDLTKPFELFVDEKQGYAKGVLTQKLGPWRRPVAYLSKKLDPVAAGWPPCLRMVAAIAVLTKDAGKLTMGQPLVILAPHAVEALVKQPPDRWLSNARMTHYQALLLDTDRVQFGPVVALNPATLLPLPEEGLQHNCLDILAEAHGTRPDLTDQPLPDADHTWYTDGSSLLQEGQRKAGAAVTTETEVIWAKALPAGTSAQRAELIALTQALKMAEGKKLNVYTDSRYAFATAHIHGEIYRRRGWLTSEGKEIKNKDEILALLKALFLPKRLSIIHCPGHQKGHSAEARGNRMADQAARKAAITETPDTSTLLIENSSPSGGSKRTADGSEFEAGKRTADGSEFEKRTADGSEFESPKKKAKVE

SEQ ID NO: 2696 - protein, 2117 aa, synthetic construct
MPAAKRVKLDGGDKKYSIGLDIGTNSVGWAVITDEYKVPSKKFKVLGNTDRHSIKKNLIGALLFDSGETAEATRLKRTARRRYTRRKNRICYLQEIFSNEMAKVDDSFFHRLEESFLVEEDKKHERHPIFGNIVDEVAYHEKYPTIYHLRKKLVDSTDKADLRLIYLALAHMIKFRGHFLIEGDLNPDNSDVDKLFIQLVQTYNQLFEENPINASGVDAKAILSARLSKSRRLENLIAQLPGEKKNGLFGNLIALSLGLTPNFKSNFDLAEDAKLQLSKDTYDDDLDNLLAQIGDQYADLFLAAKNLSDAILLSDILRVNTEITKAPLSASMIKRYDEHHQDLTLLKALVRQQLPEKYKEIFFDQSKNGYAGYIDGGASQEEFYKFIKPILEKMDGTEELLVKLNREDLLRKQRTFDNGSIPHQIHLGELHAILRRQEDFYPFLKDNREKIEKILTFRIPYYVGPLARGNSRFAWMTRKSEETITPWNFEEVVDKGASAQSFIERMTNFDKNLPNEKVLPKHSLLYEYFTVYNELTKVKYVTEGMRKPAFLSGEQKKAIVDLLFKTNRKVTVKQLKEDYFKKIECFDSVEISGVEDRFNASLGTYHDLLKIIKDKDFLDNEENEDILEDIVLTLTLFEDREMIEERLKTYAHLFDDKVMKQLKRRRYTGWGRLSRKLINGIRDKQSGKTILDFLKSDGFANRNFMQLIHDDSLTFKEDIQKAQVSGQGDSLHEHIANLAGSPAIKKGILQTVKVVDELVKVMGRHKPENIVIEMARENQTTQKGQKNSRERMKRIEEGIKELGSQILKEHPVENTQLQNEKLYLYYLQNGRDMYVDQELDINRLSDYDVDHIVPQSFLKDDSIDNKVLTRSDKARGKSDNVPSEEVVKKMKNYWRQLLNAKLITQRKFDNLTKAERGGLSELDKAGFIKRQLVETRQITKHVAQILDSRMNTKYDENDKLIREVKVITLKSKLVSDFRKDFQFYKVREINNYHHAHDAYLNAVVGTALIKKYPKLESEFVYGDYKVYDVRKMIAKSEQEIGKATAKYFFYSNIMNFFKTEITLANGEIRKRPLIETNGETGEIVWDKGRDFATVRKVLSMPQVNIVKKTEVQTGGFSKESILPKRNSDKLIARKKDWDPKKYGGFDSPTVAYSVLVVAKVEKGKSKKLKSVKELLGITIMERSSFEKNPIDFLEAKGYKEVKKDLIIKLPKYSLFELENGRKRMLASAGELQKGNELALPSKYVNFLYLASHYEKLKGSPEDNEQKQLFVEQHKHYLDEIIEQISEFSKRVILADANLDKVLSAYNKHRDKPIREQAENIIHLFTLTNLGAPAAFKYFDTTIDRKRYTSTKEVLDATLIHQSITGLYETRIDLSQLGGDGGGSAGSAAGSGEFGGTLNIEDEYRLHETSKEPDVSLGSTWLSDFPQAWAETGGMGLAVRQAPLIIPLKATSTPVSIKQYPMSQEARLGIKPHIQRLLDQGILVPCQSPWNTPLLPVKKPGTNDYRPVQDLREVNKRVEDIHPTVPNPYNLLSGLPPSHQWYTVLDLKDAFFCLRLHPTSQPLFAFEWRDPEMGISGQLTWTRLPQGFKNSPTLFNEALHRDLADFRIQHPDLILLQYVDDLLLAATSELDCQQGTRALLQTLGNLGYRASAKKAQICQKQVKYLGYLLKEGQRWLTEARKETVMGQPTPKTPRQLREFLGKAGFCRLFIPGFAEMAAPLYPLTKPGTLFNWGPDQQKAYQEIKQALLTAPALGLPDLTKPFELFVDEKQGYAKGVLTQKLGPWRRPVAYLSKKLDPVAAGWPPCLRMVAAIAVLTKDAGKLTMGQPLVILAPHAVEALVKQPPDRWLSNARMTHYQALLLDTDRVQFGPVVALNPATLLPLPEEGLQHNCLDILAEAHGTRPDLTDQPLPDADHTWYTDGSSLLQEGQRKAGAAVTTETEVIWAKALPAGTSAQRAELIALTQALKMAEGKKLNVYTDSRYAFATAHIHGEIYRRRGWLTSEGKEIKNKDEILALLKALFLPKRLSIIHCPGHQKGHSAEARGNRMADQAARKAAITETPDTSTLLIENSSPSGGSKRTADGSEFEAGKRTADGSEFEKRTADGSEFESPKKKAKVE

SEQ ID NO: 2697 - protein, 2114 aa, synthetic construct
MPAAKRVKLDGGDKKYSIGLDIGTNSVGWAVITDEYKVPSKKFKVLGNTDRHSIKKNLIGALLFDSGETAEATRLKRTARRRYTRRKNRICYLQEIFSNEMAKVDDSFFHRLEESFLVEEDKKHERHPIFGNIVDEVAYHEKYPTIYHLRKKLVDSTDKADLRLIYLALAHMIKFRGHFLIEGDLNPDNSDVDKLFIQLVQTYNQLFEENPINASGVDAKAILSARLSKSRRLENLIAQLPGEKKNGLFGNLIALSLGLTPNFKSNFDLAEDAKLQLSKDTYDDDLDNLLAQIGDQYADLFLAAKNLSDAILLSDILRVNTEITKAPLSASMIKRYDEHHQDLTLLKALVRQQLPEKYKEIFFDQSKNGYAGYIDGGASQEEFYKFIKPILEKMDGTEELLVKLNREDLLRKQRTFDNGSIPHQIHLGELHAILRRQEDFYPFLKDNREKIEKILTFRIPYYVGPLARGNSRFAWMTRKSEETITPWNFEEVVDKGASAQSFIERMTNFDKNLPNEKVLPKHSLLYEYFTVYNELTKVKYVTEGMRKPAFLSGEQKKAIVDLLFKTNRKVTVKQLKEDYFKKIECFDSVEISGVEDRFNASLGTYHDLLKIIKDKDFLDNEENEDILEDIVLTLTLFEDREMIEERLKTYAHLFDDKVMKQLKRRRYTGWGRLSRKLINGIRDKQSGKTILDFLKSDGFANRNFMQLIHDDSLTFKEDIQKAQVSGQGDSLHEHIANLAGSPAIKKGILQTVKVVDELVKVMGRHKPENIVIEMARENQTTQKGQKNSRERMKRIEEGIKELGSQILKEHPVENTQLQNEKLYLYYLQNGRDMYVDQELDINRLSDYDVDHIVPQSFLKDDSIDNKVLTRSDKARGKSDNVPSEEVVKKMKNYWRQLLNAKLITQRKFDNLTKAERGGLSELDKAGFIKRQLVETRQITKHVAQILDSRMNTKYDENDKLIREVKVITLKSKLVSDFRKDFQFYKVREINNYHHAHDAYLNAVVGTALIKKYPKLESEFVYGDYKVYDVRKMIAKSEQEIGKATAKYFFYSNIMNFFKTEITLANGEIRKRPLIETNGETGEIVWDKGRDFATVRKVLSMPQVNIVKKTEVQTGGFSKESILPKRNSDKLIARKKDWDPKKYGGFDSPTVAYSVLVVAKVEKGKSKKLKSVKELLGITIMERSSFEKNPIDFLEAKGYKEVKKDLIIKLPKYSLFELENGRKRMLASAGELQKGNELALPSKYVNFLYLASHYEKLKGSPEDNEQKQLFVEQHKHYLDEIIEQISEFSKRVILADANLDKVLSAYNKHRDKPIREQAENIIHLFTLTNLGAPAAFKYFDTTIDRKRYTSTKEVLDATLIHQSITGLYETRIDLSQLGGDGGGGSGGSGGSGGTLNIEDEYRLHETSKEPDVSLGSTWLSDFPQAWAETGGMGLAVRQAPLIIPLKATSTPVSIKQYPMSQEARLGIKPHIQRLLDQGILVPCQSPWNTPLLPVKKPGTNDYRPVQDLREVNKRVEDIHPTVPNPYNLLSGLPPSHQWYTVLDLKDAFFCLRLHPTSQPLFAFEWRDPEMGISGQLTWTRLPQGFKNSPTLFNEALHRDLADFRIQHPDLILLQYVDDLLLAATSELDCQQGTRALLQTLGNLGYRASAKKAQICQKQVKYLGYLLKEGQRWLTEARKETVMGQPTPKTPRQLREFLGKAGFCRLFIPGFAEMAAPLYPLTKPGTLFNWGPDQQKAYQEIKQALLTAPALGLPDLTKPFELFVDEKQGYAKGVLTQKLGPWRRPVAYLSKKLDPVAAGWPPCLRMVAAIAVLTKDAGKLTMGQPLVILAPHAVEALVKQPPDRWLSNARMTHYQALLLDTDRVQFGPVVALNPATLLPLPEEGLQHNCLDILAEAHGTRPDLTDQPLPDADHTWYTDGSSLLQEGQRKAGAAVTTETEVIWAKALPAGTSAQRAELIALTQALKMAEGKKLNVYTDSRYAFATAHIHGEIYRRRGWLTSEGKEIKNKDEILALLKALFLPKRLSIIHCPGHQKGHSAEARGNRMADQAARKAAITETPDTSTLLIENSSPSGGSKRTADGSEFEAGKRTADGSEFEKRTADGSEFESPKKKAKVE

SEQ ID NO: 2698 - protein, 2114 aa, synthetic construct
MPAAKRVKLDGGDKKYSIGLDIGTNSVGWAVITDEYKVPSKKFKVLGNTDRHSIKKNLIGALLFDSGETAEATRLKRTARRRYTRRKNRICYLQEIFSNEMAKVDDSFFHRLEESFLVEEDKKHERHPIFGNIVDEVAYHEKYPTIYHLRKKLVDSTDKADLRLIYLALAHMIKFRGHFLIEGDLNPDNSDVDKLFIQLVQTYNQLFEENPINASGVDAKAILSARLSKSRRLENLIAQLPGEKKNGLFGNLIALSLGLTPNFKSNFDLAEDAKLQLSKDTYDDDLDNLLAQIGDQYADLFLAAKNLSDAILLSDILRVNTEITKAPLSASMIKRYDEHHQDLTLLKALVRQQLPEKYKEIFFDQSKNGYAGYIDGGASQEEFYKFIKPILEKMDGTEELLVKLNREDLLRKQRTFDNGSIPHQIHLGELHAILRRQEDFYPFLKDNREKIEKILTFRIPYYVGPLARGNSRFAWMTRKSEETITPWNFEEVVDKGASAQSFIERMTNFDKNLPNEKVLPKHSLLYEYFTVYNELTKVKYVTEGMRKPAFLSGEQKKAIVDLLFKTNRKVTVKQLKEDYFKKIECFDSVEISGVEDRFNASLGTYHDLLKIIKDKDFLDNEENEDILEDIVLTLTLFEDREMIEERLKTYAHLFDDKVMKQLKRRRYTGWGRLSRKLINGIRDKQSGKTILDFLKSDGFANRNFMQLIHDDSLTFKEDIQKAQVSGQGDSLHEHIANLAGSPAIKKGILQTVKVVDELVKVMGRHKPENIVIEMARENQTTQKGQKNSRERMKRIEEGIKELGSQILKEHPVENTQLQNEKLYLYYLQNGRDMYVDQELDINRLSDYDVDHIVPQSFLKDDSIDNKVLTRSDKARGKSDNVPSEEVVKKMKNYWRQLLNAKLITQRKFDNLTKAERGGLSELDKAGFIKRQLVETRQITKHVAQILDSRMNTKYDENDKLIREVKVITLKSKLVSDFRKDFQFYKVREINNYHHAHDAYLNAVVGTALIKKYPKLESEFVYGDYKVYDVRKMIAKSEQEIGKATAKYFFYSNIMNFFKTEITLANGEIRKRPLIETNGETGEIVWDKGRDFATVRKVLSMPQVNIVKKTEVQTGGFSKESILPKRNSDKLIARKKDWDPKKYGGFDSPTVAYSVLVVAKVEKGKSKKLKSVKELLGITIMERSSFEKNPIDFLEAKGYKEVKKDLIIKLPKYSLFELENGRKRMLASAGELQKGNELALPSKYVNFLYLASHYEKLKGSPEDNEQKQLFVEQHKHYLDEIIEQISEFSKRVILADANLDKVLSAYNKHRDKPIREQAENIIHLFTLTNLGAPAAFKYFDTTIDRKRYTSTKEVLDATLIHQSITGLYETRIDLSQLGGDGGGGGPAPGSSGGTLNIEDEYRLHETSKEPDVSLGSTWLSDFPQAWAETGGMGLAVRQAPLIIPLKATSTPVSIKQYPMSQEARLGIKPHIQRLLDQGILVPCQSPWNTPLLPVKKPGTNDYRPVQDLREVNKRVEDIHPTVPNPYNLLSGLPPSHQWYTVLDLKDAFFCLRLHPTSQPLFAFEWRDPEMGISGQLTWTRLPQGFKNSPTLFNEALHRDLADFRIQHPDLILLQYVDDLLLAATSELDCQQGTRALLQTLGNLGYRASAKKAQICQKQVKYLGYLLKEGQRWLTEARKETVMGQPTPKTPRQLREFLGKAGFCRLFIPGFAEMAAPLYPLTKPGTLFNWGPDQQKAYQEIKQALLTAPALGLPDLTKPFELFVDEKQGYAKGVLTQKLGPWRRPVAYLSKKLDPVAAGWPPCLRMVAAIAVLTKDAGKLTMGQPLVILAPHAVEALVKQPPDRWLSNARMTHYQALLLDTDRVQFGPVVALNPATLLPLPEEGLQHNCLDILAEAHGTRPDLTDQPLPDADHTWYTDGSSLLQEGQRKAGAAVTTETEVIWAKALPAGTSAQRAELIALTQALKMAEGKKLNVYTDSRYAFATAHIHGEIYRRRGWLTSEGKEIKNKDEILALLKALFLPKRLSIIHCPGHQKGHSAEARGNRMADQAARKAAITETPDTSTLLIENSSPSGGSKRTADGSEFEAGKRTADGSEFEKRTADGSEFESPKKKAKVE

SEQ ID NO: 2699 - protein, 2114 aa, synthetic construct
MPAAKRVKLDGGDKKYSIGLDIGTNSVGWAVITDEYKVPSKKFKVLGNTDRHSIKKNLIGALLFDSGETAEATRLKRTARRRYTRRKNRICYLQEIFSNEMAKVDDSFFHRLEESFLVEEDKKHERHPIFGNIVDEVAYHEKYPTIYHLRKKLVDSTDKADLRLIYLALAHMIKFRGHFLIEGDLNPDNSDVDKLFIQLVQTYNQLFEENPINASGVDAKAILSARLSKSRRLENLIAQLPGEKKNGLFGNLIALSLGLTPNFKSNFDLAEDAKLQLSKDTYDDDLDNLLAQIGDQYADLFLAAKNLSDAILLSDILRVNTEITKAPLSASMIKRYDEHHQDLTLLKALVRQQLPEKYKEIFFDQSKNGYAGYIDGGASQEEFYKFIKPILEKMDGTEELLVKLNREDLLRKQRTFDNGSIPHQIHLGELHAILRRQEDFYPFLKDNREKIEKILTFRIPYYVGPLARGNSRFAWMTRKSEETITPWNFEEVVDKGASAQSFIERMTNFDKNLPNEKVLPKHSLLYEYFTVYNELTKVKYVTEGMRKPAFLSGEQKKAIVDLLFKTNRKVTVKQLKEDYFKKIECFDSVEISGVEDRFNASLGTYHDLLKIIKDKDFLDNEENEDILEDIVLTLTLFEDREMIEERLKTYAHLFDDKVMKQLKRRRYTGWGRLSRKLINGIRDKQSGKTILDFLKSDGFANRNFMQLIHDDSLTFKEDIQKAQVSGQGDSLHEHIANLAGSPAIKKGILQTVKVVDELVKVMGRHKPENIVIEMARENQTTQKGQKNSRERMKRIEEGIKELGSQILKEHPVENTQLQNEKLYLYYLQNGRDMYVDQELDINRLSDYDVDHIVPQSFLKDDSIDNKVLTRSDKARGKSDNVPSEEVVKKMKNYWRQLLNAKLITQRKFDNLTKAERGGLSELDKAGFIKRQLVETRQITKHVAQILDSRMNTKYDENDKLIREVKVITLKSKLVSDFRKDFQFYKVREINNYHHAHDAYLNAVVGTALIKKYPKLESEFVYGDYKVYDVRKMIAKSEQEIGKATAKYFFYSNIMNFFKTEITLANGEIRKRPLIETNGETGEIVWDKGRDFATVRKVLSMPQVNIVKKTEVQTGGFSKESILPKRNSDKLIARKKDWDPKKYGGFDSPTVAYSVLVVAKVEKGKSKKLKSVKELLGITIMERSSFEKNPIDFLEAKGYKEVKKDLIIKLPKYSLFELENGRKRMLASAGELQKGNELALPSKYVNFLYLASHYEKLKGSPEDNEQKQLFVEQHKHYLDEIIEQISEFSKRVILADANLDKVLSAYNKHRDKPIREQAENIIHLFTLTNLGAPAAFKYFDTTIDRKRYTSTKEVLDATLIHQSITGLYETRIDLSQLGGDGGGSSGGSPAPGGTLNIEDEYRLHETSKEPDVSLGSTWLSDFPQAWAETGGMGLAVRQAPLIIPLKATSTPVSIKQYPMSQEARLGIKPHIQRLLDQGILVPCQSPWNTPLLPVKKPGTNDYRPVQDLREVNKRVEDIHPTVPNPYNLLSGLPPSHQWYTVLDLKDAFFCLRLHPTSQPLFAFEWRDPEMGISGQLTWTRLPQGFKNSPTLFNEALHRDLADFRIQHPDLILLQYVDDLLLAATSELDCQQGTRALLQTLGNLGYRASAKKAQICQKQVKYLGYLLKEGQRWLTEARKETVMGQPTPKTPRQLREFLGKAGFCRLFIPGFAEMAAPLYPLTKPGTLFNWGPDQQKAYQEIKQALLTAPALGLPDLTKPFELFVDEKQGYAKGVLTQKLGPWRRPVAYLSKKLDPVAAGWPPCLRMVAAIAVLTKDAGKLTMGQPLVILAPHAVEALVKQPPDRWLSNARMTHYQALLLDTDRVQFGPVVALNPATLLPLPEEGLQHNCLDILAEAHGTRPDLTDQPLPDADHTWYTDGSSLLQEGQRKAGAAVTTETEVIWAKALPAGTSAQRAELIALTQALKMAEGKKLNVYTDSRYAFATAHIHGEIYRRRGWLTSEGKEIKNKDEILALLKALFLPKRLSIIHCPGHQKGHSAEARGNRMADQAARKAAITETPDTSTLLIENSSPSGGSKRTADGSEFEAGKRTADGSEFEKRTADGSEFESPKKKAKVE

SEQ ID NO: 2700 - protein, 2113 aa, synthetic construct
MPAAKRVKLDGGDKKYSIGLDIGTNSVGWAVITDEYKVPSKKFKVLGNTDRHSIKKNLIGALLFDSGETAEATRLKRTARRRYTRRKNRICYLQEIFSNEMAKVDDSFFHRLEESFLVEEDKKHERHPIFGNIVDEVAYHEKYPTIYHLRKKLVDSTDKADLRLIYLALAHMIKFRGHFLIEGDLNPDNSDVDKLFIQLVQTYNQLFEENPINASGVDAKAILSARLSKSRRLENLIAQLPGEKKNGLFGNLIALSLGLTPNFKSNFDLAEDAKLQLSKDTYDDDLDNLLAQIGDQYADLFLAAKNLSDAILLSDILRVNTEITKAPLSASMIKRYDEHHQDLTLLKALVRQQLPEKYKEIFFDQSKNGYAGYIDGGASQEEFYKFIKPILEKMDGTEELLVKLNREDLLRKQRTFDNGSIPHQIHLGELHAILRRQEDFYPFLKDNREKIEKILTFRIPYYVGPLARGNSRFAWMTRKSEETITPWNFEEVVDKGASAQSFIERMTNFDKNLPNEKVLPKHSLLYEYFTVYNELTKVKYVTEGMRKPAFLSGEQKKAIVDLLFKTNRKVTVKQLKEDYFKKIECFDSVEISGVEDRFNASLGTYHDLLKIIKDKDFLDNEENEDILEDIVLTLTLFEDREMIEERLKTYAHLFDDKVMKQLKRRRYTGWGRLSRKLINGIRDKQSGKTILDFLKSDGFANRNFMQLIHDDSLTFKEDIQKAQVSGQGDSLHEHIANLAGSPAIKKGILQTVKVVDELVKVMGRHKPENIVIEMARENQTTQKGQKNSRERMKRIEEGIKELGSQILKEHPVENTQLQNEKLYLYYLQNGRDMYVDQELDINRLSDYDVDHIVPQSFLKDDSIDNKVLTRSDKARGKSDNVPSEEVVKKMKNYWRQLLNAKLITQRKFDNLTKAERGGLSELDKAGFIKRQLVETRQITKHVAQILDSRMNTKYDENDKLIREVKVITLKSKLVSDFRKDFQFYKVREINNYHHAHDAYLNAVVGTALIKKYPKLESEFVYGDYKVYDVRKMIAKSEQEIGKATAKYFFYSNIMNFFKTEITLANGEIRKRPLIETNGETGEIVWDKGRDFATVRKVLSMPQVNIVKKTEVQTGGFSKESILPKRNSDKLIARKKDWDPKKYGGFDSPTVAYSVLVVAKVEKGKSKKLKSVKELLGITIMERSSFEKNPIDFLEAKGYKEVKKDLIIKLPKYSLFELENGRKRMLASAGELQKGNELALPSKYVNFLYLASHYEKLKGSPEDNEQKQLFVEQHKHYLDEIIEQISEFSKRVILADANLDKVLSAYNKHRDKPIREQAENIIHLFTLTNLGAPAAFKYFDTTIDRKRYTSTKEVLDATLIHQSITGLYETRIDLSQLGGDGGGGSEAAAKGGTLNIEDEYRLHETSKEPDVSLGSTWLSDFPQAWAETGGMGLAVRQAPLIIPLKATSTPVSIKQYPMSQEARLGIKPHIQRLLDQGILVPCQSPWNTPLLPVKKPGTNDYRPVQDLREVNKRVEDIHPTVPNPYNLLSGLPPSHQWYTVLDLKDAFFCLRLHPTSQPLFAFEWRDPEMGISGQLTWTRLPQGFKNSPTLFNEALHRDLADFRIQHPDLILLQYVDDLLLAATSELDCQQGTRALLQTLGNLGYRASAKKAQICQKQVKYLGYLLKEGQRWLTEARKETVMGQPTPKTPRQLREFLGKAGFCRLFIPGFAEMAAPLYPLTKPGTLFNWGPDQQKAYQEIKQALLTAPALGLPDLTKPFELFVDEKQGYAKGVLTQKLGPWRRPVAYLSKKLDPVAAGWPPCLRMVAAIAVLTKDAGKLTMGQPLVILAPHAVEALVKQPPDRWLSNARMTHYQALLLDTDRVQFGPVVALNPATLLPLPEEGLQHNCLDILAEAHGTRPDLTDQPLPDADHTWYTDGSSLLQEGQRKAGAAVTTETEVIWAKALPAGTSAQRAELIALTQALKMAEGKKLNVYTDSRYAFATAHIHGEIYRRRGWLTSEGKEIKNKDEILALLKALFLPKRLSIIHCPGHQKGHSAEARGNRMADQAARKAAITETPDTSTLLIENSSPSGGSKRTADGSEFEAGKRTADGSEFEKRTADGSEFESPKKKAKVE

SEQ ID NO: 2701 - protein, 2116 aa, synthetic construct
MPAAKRVKLDGGDKKYSIGLDIGTNSVGWAVITDEYKVPSKKFKVLGNTDRHSIKKNLIGALLFDSGETAEATRLKRTARRRYTRRKNRICYLQEIFSNEMAKVDDSFFHRLEESFLVEEDKKHERHPIFGNIVDEVAYHEKYPTIYHLRKKLVDSTDKADLRLIYLALAHMIKFRGHFLIEGDLNPDNSDVDKLFIQLVQTYNQLFEENPINASGVDAKAILSARLSKSRRLENLIAQLPGEKKNGLFGNLIALSLGLTPNFKSNFDLAEDAKLQLSKDTYDDDLDNLLAQIGDQYADLFLAAKNLSDAILLSDILRVNTEITKAPLSASMIKRYDEHHQDLTLLKALVRQQLPEKYKEIFFDQSKNGYAGYIDGGASQEEFYKFIKPILEKMDGTEELLVKLNREDLLRKQRTFDNGSIPHQIHLGELHAILRRQEDFYPFLKDNREKIEKILTFRIPYYVGPLARGNSRFAWMTRKSEETITPWNFEEVVDKGASAQSFIERMTNFDKNLPNEKVLPKHSLLYEYFTVYNELTKVKYVTEGMRKPAFLSGEQKKAIVDLLFKTNRKVTVKQLKEDYFKKIECFDSVEISGVEDRFNASLGTYHDLLKIIKDKDFLDNEENEDILEDIVLTLTLFEDREMIEERLKTYAHLFDDKVMKQLKRRRYTGWGRLSRKLINGIRDKQSGKTILDFLKSDGFANRNFMQLIHDDSLTFKEDIQKAQVSGQGDSLHEHIANLAGSPAIKKGILQTVKVVDELVKVMGRHKPENIVIEMARENQTTQKGQKNSRERMKRIEEGIKELGSQILKEHPVENTQLQNEKLYLYYLQNGRDMYVDQELDINRLSDYDVDHIVPQSFLKDDSIDNKVLTRSDKARGKSDNVPSEEVVKKMKNYWRQLLNAKLITQRKFDNLTKAERGGLSELDKAGFIKRQLVETRQITKHVAQILDSRMNTKYDENDKLIREVKVITLKSKLVSDFRKDFQFYKVREINNYHHAHDAYLNAVVGTALIKKYPKLESEFVYGDYKVYDVRKMIAKSEQEIGKATAKYFFYSNIMNFFKTEITLANGEIRKRPLIETNGETGEIVWDKGRDFATVRKVLSMPQVNIVKKTEVQTGGFSKESILPKRNSDKLIARKKDWDPKKYGGFDSPTVAYSVLVVAKVEKGKSKKLKSVKELLGITIMERSSFEKNPIDFLEAKGYKEVKKDLIIKLPKYSLFELENGRKRMLASAGELQKGNELALPSKYVNFLYLASHYEKLKGSPEDNEQKQLFVEQHKHYLDEIIEQISEFSKRVILADANLDKVLSAYNKHRDKPIREQAENIIHLFTLTNLGAPAAFKYFDTTIDRKRYTSTKEVLDATLIHQSITGLYETRIDLSQLGGDGGGGSPAPEAAAKGGTLNIEDEYRLHETSKEPDVSLGSTWLSDFPQAWAETGGMGLAVRQAPLIIPLKATSTPVSIKQYPMSQEARLGIKPHIQRLLDQGILVPCQSPWNTPLLPVKKPGTNDYRPVQDLREVNKRVEDIHPTVPNPYNLLSGLPPSHQWYTVLDLKDAFFCLRLHPTSQPLFAFEWRDPEMGISGQLTWTRLPQGFKNSPTLFNEALHRDLADFRIQHPDLILLQYVDDLLLAATSELDCQQGTRALLQTLGNLGYRASAKKAQICQKQVKYLGYLLKEGQRWLTEARKETVMGQPTPKTPRQLREFLGKAGFCRLFIPGFAEMAAPLYPLTKPGTLFNWGPDQQKAYQEIKQALLTAPALGLPDLTKPFELFVDEKQGYAKGVLTQKLGPWRRPVAYLSKKLDPVAAGWPPCLRMVAAIAVLTKDAGKLTMGQPLVILAPHAVEALVKQPPDRWLSNARMTHYQALLLDTDRVQFGPVVALNPATLLPLPEEGLQHNCLDILAEAHGTRPDLTDQPLPDADHTWYTDGSSLLQEGQRKAGAAVTTETEVIWAKALPAGTSAQRAELIALTQALKMAEGKKLNVYTDSRYAFATAHIHGEIYRRRGWLTSEGKEIKNKDEILALLKALFLPKRLSIIHCPGHQKGHSAEARGNRMADQAARKAAITETPDTSTLLIENSSPSGGSKRTADGSEFEAGKRTADGSEFEKRTADGSEFESPKKKAKVE

SEQ ID NO: 2702 - protein, 2114 aa, synthetic construct
MPAAKRVKLDGGDKKYSIGLDIGTNSVGWAVITDEYKVPSKKFKVLGNTDRHSIKKNLIGALLFDSGETAEATRLKRTARRRYTRRKNRICYLQEIFSNEMAKVDDSFFHRLEESFLVEEDKKHERHPIFGNIVDEVAYHEKYPTIYHLRKKLVDSTDKADLRLIYLALAHMIKFRGHFLIEGDLNPDNSDVDKLFIQLVQTYNQLFEENPINASGVDAKAILSARLSKSRRLENLIAQLPGEKKNGLFGNLIALSLGLTPNFKSNFDLAEDAKLQLSKDTYDDDLDNLLAQIGDQYADLFLAAKNLSDAILLSDILRVNTEITKAPLSASMIKRYDEHHQDLTLLKALVRQQLPEKYKEIFFDQSKNGYAGYIDGGASQEEFYKFIKPILEKMDGTEELLVKLNREDLLRKQRTFDNGSIPHQIHLGELHAILRRQEDFYPFLKDNREKIEKILTFRIPYYVGPLARGNSRFAWMTRKSEETITPWNFEEVVDKGASAQSFIERMTNFDKNLPNEKVLPKHSLLYEYFTVYNELTKVKYVTEGMRKPAFLSGEQKKAIVDLLFKTNRKVTVKQLKEDYFKKIECFDSVEISGVEDRFNASLGTYHDLLKIIKDKDFLDNEENEDILEDIVLTLTLFEDREMIEERLKTYAHLFDDKVMKQLKRRRYTGWGRLSRKLINGIRDKQSGKTILDFLKSDGFANRNFMQLIHDDSLTFKEDIQKAQVSGQGDSLHEHIANLAGSPAIKKGILQTVKVVDELVKVMGRHKPENIVIEMARENQTTQKGQKNSRERMKRIEEGIKELGSQILKEHPVENTQLQNEKLYLYYLQNGRDMYVDQELDINRLSDYDVDHIVPQSFLKDDSIDNKVLTRSDKARGKSDNVPSEEVVKKMKNYWRQLLNAKLITQRKFDNLTKAERGGLSELDKAGFIKRQLVETRQITKHVAQILDSRMNTKYDENDKLIREVKVITLKSKLVSDFRKDFQFYKVREINNYHHAHDAYLNAVVGTALIKKYPKLESEFVYGDYKVYDVRKMIAKSEQEIGKATAKYFFYSNIMNFFKTEITLANGEIRKRPLIETNGETGEIVWDKGRDFATVRKVLSMPQVNIVKKTEVQTGGFSKESILPKRNSDKLIARKKDWDPKKYGGFDSPTVAYSVLVVAKVEKGKSKKLKSVKELLGITIMERSSFEKNPIDFLEAKGYKEVKKDLIIKLPKYSLFELENGRKRMLASAGELQKGNELALPSKYVNFLYLASHYEKLKGSPEDNEQKQLFVEQHKHYLDEIIEQISEFSKRVILADANLDKVLSAYNKHRDKPIREQAENIIHLFTLTNLGAPAAFKYFDTTIDRKRYTSTKEVLDATLIHQSITGLYETRIDLSQLGGDGGGGSGGGGSSGGTLNIEDEYRLHETSKEPDVSLGSTWLSDFPQAWAETGGMGLAVRQAPLIIPLKATSTPVSIKQYPMSQEARLGIKPHIQRLLDQGILVPCQSPWNTPLLPVKKPGTNDYRPVQDLREVNKRVEDIHPTVPNPYNLLSGLPPSHQWYTVLDLKDAFFCLRLHPTSQPLFAFEWRDPEMGISGQLTWTRLPQGFKNSPTLFNEALHRDLADFRIQHPDLILLQYVDDLLLAATSELDCQQGTRALLQTLGNLGYRASAKKAQICQKQVKYLGYLLKEGQRWLTEARKETVMGQPTPKTPRQLREFLGKAGFCRLFIPGFAEMAAPLYPLTKPGTLFNWGPDQQKAYQEIKQALLTAPALGLPDLTKPFELFVDEKQGYAKGVLTQKLGPWRRPVAYLSKKLDPVAAGWPPCLRMVAAIAVLTKDAGKLTMGQPLVILAPHAVEALVKQPPDRWLSNARMTHYQALLLDTDRVQFGPVVALNPATLLPLPEEGLQHNCLDILAEAHGTRPDLTDQPLPDADHTWYTDGSSLLQEGQRKAGAAVTTETEVIWAKALPAGTSAQRAELIALTQALKMAEGKKLNVYTDSRYAFATAHIHGEIYRRRGWLTSEGKEIKNKDEILALLKALFLPKRLSIIHCPGHQKGHSAEARGNRMADQAARKAAITETPDTSTLLIENSSPSGGSKRTADGSEFEAGKRTADGSEFEKRTADGSEFESPKKKAKVE

SEQ ID NO: 2703 - protein, 2116 aa, synthetic construct
MPAAKRVKLDGGDKKYSIGLDIGTNSVGWAVITDEYKVPSKKFKVLGNTDRHSIKKNLIGALLFDSGETAEATRLKRTARRRYTRRKNRICYLQEIFSNEMAKVDDSFFHRLEESFLVEEDKKHERHPIFGNIVDEVAYHEKYPTIYHLRKKLVDSTDKADLRLIYLALAHMIKFRGHFLIEGDLNPDNSDVDKLFIQLVQTYNQLFEENPINASGVDAKAILSARLSKSRRLENLIAQLPGEKKNGLFGNLIALSLGLTPNFKSNFDLAEDAKLQLSKDTYDDDLDNLLAQIGDQYADLFLAAKNLSDAILLSDILRVNTEITKAPLSASMIKRYDEHHQDLTLLKALVRQQLPEKYKEIFFDQSKNGYAGYIDGGASQEEFYKFIKPILEKMDGTEELLVKLNREDLLRKQRTFDNGSIPHQIHLGELHAILRRQEDFYPFLKDNREKIEKILTFRIPYYVGPLARGNSRFAWMTRKSEETITPWNFEEVVDKGASAQSFIERMTNFDKNLPNEKVLPKHSLLYEYFTVYNELTKVKYVTEGMRKPAFLSGEQKKAIVDLLFKTNRKVTVKQLKEDYFKKIECFDSVEISGVEDRFNASLGTYHDLLKIIKDKDFLDNEENEDILEDIVLTLTLFEDREMIEERLKTYAHLFDDKVMKQLKRRRYTGWGRLSRKLINGIRDKQSGKTILDFLKSDGFANRNFMQLIHDDSLTFKEDIQKAQVSGQGDSLHEHIANLAGSPAIKKGILQTVKVVDELVKVMGRHKPENIVIEMARENQTTQKGQKNSRERMKRIEEGIKELGSQILKEHPVENTQLQNEKLYLYYLQNGRDMYVDQELDINRLSDYDVDHIVPQSFLKDDSIDNKVLTRSDKARGKSDNVPSEEVVKKMKNYWRQLLNAKLITQRKFDNLTKAERGGLSELDKAGFIKRQLVETRQITKHVAQILDSRMNTKYDENDKLIREVKVITLKSKLVSDFRKDFQFYKVREINNYHHAHDAYLNAVVGTALIKKYPKLESEFVYGDYKVYDVRKMIAKSEQEIGKATAKYFFYSNIMNFFKTEITLANGEIRKRPLIETNGETGEIVWDKGRDFATVRKVLSMPQVNIVKKTEVQTGGFSKESILPKRNSDKLIARKKDWDPKKYGGFDSPTVAYSVLVVAKVEKGKSKKLKSVKELLGITIMERSSFEKNPIDFLEAKGYKEVKKDLIIKLPKYSLFELENGRKRMLASAGELQKGNELALPSKYVNFLYLASHYEKLKGSPEDNEQKQLFVEQHKHYLDEIIEQISEFSKRVILADANLDKVLSAYNKHRDKPIREQAENIIHLFTLTNLGAPAAFKYFDTTIDRKRYTSTKEVLDATLIHQSITGLYETRIDLSQLGGDGGGSSEAAAKGGSGGTLNIEDEYRLHETSKEPDVSLGSTWLSDFPQAWAETGGMGLAVRQAPLIIPLKATSTPVSIKQYPMSQEARLGIKPHIQRLLDQGILVPCQSPWNTPLLPVKKPGTNDYRPVQDLREVNKRVEDIHPTVPNPYNLLSGLPPSHQWYTVLDLKDAFFCLRLHPTSQPLFAFEWRDPEMGISGQLTWTRLPQGFKNSPTLFNEALHRDLADFRIQHPDLILLQYVDDLLLAATSELDCQQGTRALLQTLGNLGYRASAKKAQICQKQVKYLGYLLKEGQRWLTEARKETVMGQPTPKTPRQLREFLGKAGFCRLFIPGFAEMAAPLYPLTKPGTLFNWGPDQQKAYQEIKQALLTAPALGLPDLTKPFELFVDEKQGYAKGVLTQKLGPWRRPVAYLSKKLDPVAAGWPPCLRMVAAIAVLTKDAGKLTMGQPLVILAPHAVEALVKQPPDRWLSNARMTHYQALLLDTDRVQFGPVVALNPATLLPLPEEGLQHNCLDILAEAHGTRPDLTDQPLPDADHTWYTDGSSLLQEGQRKAGAAVTTETEVIWAKALPAGTSAQRAELIALTQALKMAEGKKLNVYTDSRYAFATAHIHGEIYRRRGWLTSEGKEIKNKDEILALLKALFLPKRLSIIHCPGHQKGHSAEARGNRMADQAARKAAITETPDTSTLLIENSSPSGGSKRTADGSEFEAGKRTADGSEFEKRTADGSEFESPKKKAKVE

SEQ ID NO: 2704 - protein, 2094 aa, synthetic construct
MPAAKRVKLDGGDKKYSIGLDIGTNSVGWAVITDEYKVPSKKFKVLGNTDRHSIKKNLIGALLFDSGETAEATRLKRTARRRYTRRKNRICYLQEIFSNEMAKVDDSFFHRLEESFLVEEDKKHERHPIFGNIVDEVAYHEKYPTIYHLRKKLVDSTDKADLRLIYLALAHMIKFRGHFLIEGDLNPDNSDVDKLFIQLVQTYNQLFEENPINASGVDAKAILSARLSKSRRLENLIAQLPGEKKNGLFGNLIALSLGLTPNFKSNFDLAEDAKLQLSKDTYDDDLDNLLAQIGDQYADLFLAAKNLSDAILLSDILRVNTEITKAPLSASMIKRYDEHHQDLTLLKALVRQQLPEKYKEIFFDQSKNGYAGYIDGGASQEEFYKFIKPILEKMDGTEELLVKLNREDLLRKQRTFDNGSIPHQIHLGELHAILRRQEDFYPFLKDNREKIEKILTFRIPYYVGPLARGNSRFAWMTRKSEETITPWNFEEVVDKGASAQSFIERMTNFDKNLPNEKVLPKHSLLYEYFTVYNELTKVKYVTEGMRKPAFLSGEQKKAIVDLLFKTNRKVTVKQLKEDYFKKIECFDSVEISGVEDRFNASLGTYHDLLKIIKDKDFLDNEENEDILEDIVLTLTLFEDREMIEERLKTYAHLFDDKVMKQLKRRRYTGWGRLSRKLINGIRDKQSGKTILDFLKSDGFANRNFMQLIHDDSLTFKEDIQKAQVSGQGDSLHEHIANLAGSPAIKKGILQTVKVVDELVKVMGRHKPENIVIEMARENQTTQKGQKNSRERMKRIEEGIKELGSQILKEHPVENTQLQNEKLYLYYLQNGRDMYVDQELDINRLSDYDVDHIVPQSFLKDDSIDNKVLTRSDKARGKSDNVPSEEVVKKMKNYWRQLLNAKLITQRKFDNLTKAERGGLSELDKAGFIKRQLVETRQITKHVAQILDSRMNTKYDENDKLIREVKVITLKSKLVSDFRKDFQFYKVREINNYHHAHDAYLNAVVGTALIKKYPKLESEFVYGDYKVYDVRKMIAKSEQEIGKATAKYFFYSNIMNFFKTEITLANGEIRKRPLIETNGETGEIVWDKGRDFATVRKVLSMPQVNIVKKTEVQTGGFSKESILPKRNSDKLIARKKDWDPKKYGGFDSPTVAYSVLVVAKVEKGKSKKLKSVKELLGITIMERSSFEKNPIDFLEAKGYKEVKKDLIIKLPKYSLFELENGRKRMLASAGELQKGNELALPSKYVNFLYLASHYEKLKGSPEDNEQKQLFVEQHKHYLDEIIEQISEFSKRVILADANLDKVLSAYNKHRDKPIREQAENIIHLFTLTNLGAPAAFKYFDTTIDRKRYTSTKEVLDATLIHQSITGLYETRIDLSQLGGDGGGGSPAPGSSGGTLNIEDEHRLHETSKEPDVSLGSTWLSDFPQAWAETGGMGLAVRQAPLIIPLKATSTPVSIKQYPMSQEARLGIKPHIQRLLDQGILVPCQSPWNTPLLPVKKPGTNDYRPVQDLREVNKRVEDIHPTVPNPYNLLSGLPPSHQWYTVLDLKDAFFCLRLHPTSQPLFAFEWRDPEMGISGQLTWTRLPQGFKNSPTLFDEALHRDLADFRIQHPDLILLQYVDDLLLAATSELDCQQGTRALLQTLGNLGYRASAKKAQICQKQVKYLGYLLKEGQRWLTEARKETVMGQPTPKTPRQLREFLGTAGFCRLWIPGFAEMAAPLYPLTKTGTLFNWGPDQQKAYQEIKQALLTAPALGLPDLTKPFELFVDEKQGYAKGVLTQKLGPWRRPVAYLSKKLDPVAAGWPPCLRMVAAIAVLTKDAGKLTMGQPLVILAPHAVEALVKQPPDRWLSNARMTHYQALLLDTDRVQFGPVVALNPATLLPLPEEGLQHNCLDILAEAHGTRPDLTDQPLPDADHTWYTDGSSLLQEGQRKAGAAVTTETEVIWAKALPAGTSAQRAELIALTQALKMAEGKKLNVYTDSRYAFATAHIHGEIYRRRGLLTSEGKEIKNKDEILALLKALFLPKRLSIIHCPGHQKGHSAEARGNRMADQAARKAAITETPDTSTLLAGKRTADGSEFEKRTADGSEFESPKKKAKVE

SEQ ID NO: 2705 - protein, 2096 aa, synthetic construct
MPAAKRVKLDGGDKKYSIGLDIGTNSVGWAVITDEYKVPSKKFKVLGNTDRHSIKKNLIGALLFDSGETAEATRLKRTARRRYTRRKNRICYLQEIFSNEMAKVDDSFFHRLEESFLVEEDKKHERHPIFGNIVDEVAYHEKYPTIYHLRKKLVDSTDKADLRLIYLALAHMIKFRGHFLIEGDLNPDNSDVDKLFIQLVQTYNQLFEENPINASGVDAKAILSARLSKSRRLENLIAQLPGEKKNGLFGNLIALSLGLTPNFKSNFDLAEDAKLQLSKDTYDDDLDNLLAQIGDQYADLFLAAKNLSDAILLSDILRVNTEITKAPLSASMIKRYDEHHQDLTLLKALVRQQLPEKYKEIFFDQSKNGYAGYIDGGASQEEFYKFIKPILEKMDGTEELLVKLNREDLLRKQRTFDNGSIPHQIHLGELHAILRRQEDFYPFLKDNREKIEKILTFRIPYYVGPLARGNSRFAWMTRKSEETITPWNFEEVVDKGASAQSFIERMTNFDKNLPNEKVLPKHSLLYEYFTVYNELTKVKYVTEGMRKPAFLSGEQKKAIVDLLFKTNRKVTVKQLKEDYFKKIECFDSVEISGVEDRFNASLGTYHDLLKIIKDKDFLDNEENEDILEDIVLTLTLFEDREMIEERLKTYAHLFDDKVMKQLKRRRYTGWGRLSRKLINGIRDKQSGKTILDFLKSDGFANRNFMQLIHDDSLTFKEDIQKAQVSGQGDSLHEHIANLAGSPAIKKGILQTVKVVDELVKVMGRHKPENIVIEMARENQTTQKGQKNSRERMKRIEEGIKELGSQILKEHPVENTQLQNEKLYLYYLQNGRDMYVDQELDINRLSDYDVDHIVPQSFLKDDSIDNKVLTRSDKARGKSDNVPSEEVVKKMKNYWRQLLNAKLITQRKFDNLTKAERGGLSELDKAGFIKRQLVETRQITKHVAQILDSRMNTKYDENDKLIREVKVITLKSKLVSDFRKDFQFYKVREINNYHHAHDAYLNAVVGTALIKKYPKLESEFVYGDYKVYDVRKMIAKSEQEIGKATAKYFFYSNIMNFFKTEITLANGEIRKRPLIETNGETGEIVWDKGRDFATVRKVLSMPQVNIVKKTEVQTGGFSKESILPKRNSDKLIARKKDWDPKKYGGFDSPTVAYSVLVVAKVEKGKSKKLKSVKELLGITIMERSSFEKNPIDFLEAKGYKEVKKDLIIKLPKYSLFELENGRKRMLASAGELQKGNELALPSKYVNFLYLASHYEKLKGSPEDNEQKQLFVEQHKHYLDEIIEQISEFSKRVILADANLDKVLSAYNKHRDKPIREQAENIIHLFTLTNLGAPAAFKYFDTTIDRKRYTSTKEVLDATLIHQSITGLYETRIDLSQLGGDGGEAAAKGSSGGGGGTLNIEDEHRLHETSKEPDVSLGSTWLSDFPQAWAETGGMGLAVRQAPLIIPLKATSTPVSIKQYPMSQEARLGIKPHIQRLLDQGILVPCQSPWNTPLLPVKKPGTNDYRPVQDLREVNKRVEDIHPTVPNPYNLLSGLPPSHQWYTVLDLKDAFFCLRLHPTSQPLFAFEWRDPEMGISGQLTWTRLPQGFKNSPTLFDEALHRDLADFRIQHPDLILLQYVDDLLLAATSELDCQQGTRALLQTLGNLGYRASAKKAQICQKQVKYLGYLLKEGQRWLTEARKETVMGQPTPKTPRQLREFLGTAGFCRLWIPGFAEMAAPLYPLTKTGTLFNWGPDQQKAYQEIKQALLTAPALGLPDLTKPFELFVDEKQGYAKGVLTQKLGPWRRPVAYLSKKLDPVAAGWPPCLRMVAAIAVLTKDAGKLTMGQPLVILAPHAVEALVKQPPDRWLSNARMTHYQALLLDTDRVQFGPVVALNPATLLPLPEEGLQHNCLDILAEAHGTRPDLTDQPLPDADHTWYTDGSSLLQEGQRKAGAAVTTETEVIWAKALPAGTSAQRAELIALTQALKMAEGKKLNVYTDSRYAFATAHIHGEIYRRRGLLTSEGKEIKNKDEILALLKALFLPKRLSIIHCPGHQKGHSAEARGNRMADQAARKAAITETPDTSTLLAGKRTADGSEFEKRTADGSEFESPKKKAKVE

SEQ ID NO: 2706 - protein, 2096 aa, synthetic construct
MPAAKRVKLDGGDKKYSIGLDIGTNSVGWAVITDEYKVPSKKFKVLGNTDRHSIKKNLIGALLFDSGETAEATRLKRTARRRYTRRKNRICYLQEIFSNEMAKVDDSFFHRLEESFLVEEDKKHERHPIFGNIVDEVAYHEKYPTIYHLRKKLVDSTDKADLRLIYLALAHMIKFRGHFLIEGDLNPDNSDVDKLFIQLVQTYNQLFEENPINASGVDAKAILSARLSKSRRLENLIAQLPGEKKNGLFGNLIALSLGLTPNFKSNFDLAEDAKLQLSKDTYDDDLDNLLAQIGDQYADLFLAAKNLSDAILLSDILRVNTEITKAPLSASMIKRYDEHHQDLTLLKALVRQQLPEKYKEIFFDQSKNGYAGYIDGGASQEEFYKFIKPILEKMDGTEELLVKLNREDLLRKQRTFDNGSIPHQIHLGELHAILRRQEDFYPFLKDNREKIEKILTFRIPYYVGPLARGNSRFAWMTRKSEETITPWNFEEVVDKGASAQSFIERMTNFDKNLPNEKVLPKHSLLYEYFTVYNELTKVKYVTEGMRKPAFLSGEQKKAIVDLLFKTNRKVTVKQLKEDYFKKIECFDSVEISGVEDRFNASLGTYHDLLKIIKDKDFLDNEENEDILEDIVLTLTLFEDREMIEERLKTYAHLFDDKVMKQLKRRRYTGWGRLSRKLINGIRDKQSGKTILDFLKSDGFANRNFMQLIHDDSLTFKEDIQKAQVSGQGDSLHEHIANLAGSPAIKKGILQTVKVVDELVKVMGRHKPENIVIEMARENQTTQKGQKNSRERMKRIEEGIKELGSQILKEHPVENTQLQNEKLYLYYLQNGRDMYVDQELDINRLSDYDVDHIVPQSFLKDDSIDNKVLTRSDKARGKSDNVPSEEVVKKMKNYWRQLLNAKLITQRKFDNLTKAERGGLSELDKAGFIKRQLVETRQITKHVAQILDSRMNTKYDENDKLIREVKVITLKSKLVSDFRKDFQFYKVREINNYHHAHDAYLNAVVGTALIKKYPKLESEFVYGDYKVYDVRKMIAKSEQEIGKATAKYFFYSNIMNFFKTEITLANGEIRKRPLIETNGETGEIVWDKGRDFATVRKVLSMPQVNIVKKTEVQTGGFSKESILPKRNSDKLIARKKDWDPKKYGGFDSPTVAYSVLVVAKVEKGKSKKLKSVKELLGITIMERSSFEKNPIDFLEAKGYKEVKKDLIIKLPKYSLFELENGRKRMLASAGELQKGNELALPSKYVNFLYLASHYEKLKGSPEDNEQKQLFVEQHKHYLDEIIEQISEFSKRVILADANLDKVLSAYNKHRDKPIREQAENIIHLFTLTNLGAPAAFKYFDTTIDRKRYTSTKEVLDATLIHQSITGLYETRIDLSQLGGDGGGSSGGGEAAAKGGTLNIEDEHRLHETSKEPDVSLGSTWLSDFPQAWAETGGMGLAVRQAPLIIPLKATSTPVSIKQYPMSQEARLGIKPHIQRLLDQGILVPCQSPWNTPLLPVKKPGTNDYRPVQDLREVNKRVEDIHPTVPNPYNLLSGLPPSHQWYTVLDLKDAFFCLRLHPTSQPLFAFEWRDPEMGISGQLTWTRLPQGFKNSPTLFDEALHRDLADFRIQHPDLILLQYVDDLLLAATSELDCQQGTRALLQTLGNLGYRASAKKAQICQKQVKYLGYLLKEGQRWLTEARKETVMGQPTPKTPRQLREFLGTAGFCRLWIPGFAEMAAPLYPLTKTGTLFNWGPDQQKAYQEIKQALLTAPALGLPDLTKPFELFVDEKQGYAKGVLTQKLGPWRRPVAYLSKKLDPVAAGWPPCLRMVAAIAVLTKDAGKLTMGQPLVILAPHAVEALVKQPPDRWLSNARMTHYQALLLDTDRVQFGPVVALNPATLLPLPEEGLQHNCLDILAEAHGTRPDLTDQPLPDADHTWYTDGSSLLQEGQRKAGAAVTTETEVIWAKALPAGTSAQRAELIALTQALKMAEGKKLNVYTDSRYAFATAHIHGEIYRRRGLLTSEGKEIKNKDEILALLKALFLPKRLSIIHCPGHQKGHSAEARGNRMADQAARKAAITETPDTSTLLAGKRTADGSEFEKRTADGSEFESPKKKAKVE

SEQ ID NO: 2707 - protein, 2093 aa, synthetic construct
MPAAKRVKLDGGDKKYSIGLDIGTNSVGWAVITDEYKVPSKKFKVLGNTDRHSIKKNLIGALLFDSGETAEATRLKRTARRRYTRRKNRICYLQEIFSNEMAKVDDSFFHRLEESFLVEEDKKHERHPIFGNIVDEVAYHEKYPTIYHLRKKLVDSTDKADLRLIYLALAHMIKFRGHFLIEGDLNPDNSDVDKLFIQLVQTYNQLFEENPINASGVDAKAILSARLSKSRRLENLIAQLPGEKKNGLFGNLIALSLGLTPNFKSNFDLAEDAKLQLSKDTYDDDLDNLLAQIGDQYADLFLAAKNLSDAILLSDILRVNTEITKAPLSASMIKRYDEHHQDLTLLKALVRQQLPEKYKEIFFDQSKNGYAGYIDGGASQEEFYKFIKPILEKMDGTEELLVKLNREDLLRKQRTFDNGSIPHQIHLGELHAILRRQEDFYPFLKDNREKIEKILTFRIPYYVGPLARGNSRFAWMTRKSEETITPWNFEEVVDKGASAQSFIERMTNFDKNLPNEKVLPKHSLLYEYFTVYNELTKVKYVTEGMRKPAFLSGEQKKAIVDLLFKTNRKVTVKQLKEDYFKKIECFDSVEISGVEDRFNASLGTYHDLLKIIKDKDFLDNEENEDILEDIVLTLTLFEDREMIEERLKTYAHLFDDKVMKQLKRRRYTGWGRLSRKLINGIRDKQSGKTILDFLKSDGFANRNFMQLIHDDSLTFKEDIQKAQVSGQGDSLHEHIANLAGSPAIKKGILQTVKVVDELVKVMGRHKPENIVIEMARENQTTQKGQKNSRERMKRIEEGIKELGSQILKEHPVENTQLQNEKLYLYYLQNGRDMYVDQELDINRLSDYDVDHIVPQSFLKDDSIDNKVLTRSDKARGKSDNVPSEEVVKKMKNYWRQLLNAKLITQRKFDNLTKAERGGLSELDKAGFIKRQLVETRQITKHVAQILDSRMNTKYDENDKLIREVKVITLKSKLVSDFRKDFQFYKVREINNYHHAHDAYLNAVVGTALIKKYPKLESEFVYGDYKVYDVRKMIAKSEQEIGKATAKYFFYSNIMNFFKTEITLANGEIRKRPLIETNGETGEIVWDKGRDFATVRKVLSMPQVNIVKKTEVQTGGFSKESILPKRNSDKLIARKKDWDPKKYGGFDSPTVAYSVLVVAKVEKGKSKKLKSVKELLGITIMERSSFEKNPIDFLEAKGYKEVKKDLIIKLPKYSLFELENGRKRMLASAGELQKGNELALPSKYVNFLYLASHYEKLKGSPEDNEQKQLFVEQHKHYLDEIIEQISEFSKRVILADANLDKVLSAYNKHRDKPIREQAENIIHLFTLTNLGAPAAFKYFDTTIDRKRYTSTKEVLDATLIHQSITGLYETRIDLSQLGGDGGEAAAKGSSGGTLNIEDEHRLHETSKEPDVSLGSTWLSDFPQAWAETGGMGLAVRQAPLIIPLKATSTPVSIKQYPMSQEARLGIKPHIQRLLDQGILVPCQSPWNTPLLPVKKPGTNDYRPVQDLREVNKRVEDIHPTVPNPYNLLSGLPPSHQWYTVLDLKDAFFCLRLHPTSQPLFAFEWRDPEMGISGQLTWTRLPQGFKNSPTLFDEALHRDLADFRIQHPDLILLQYVDDLLLAATSELDCQQGTRALLQTLGNLGYRASAKKAQICQKQVKYLGYLLKEGQRWLTEARKETVMGQPTPKTPRQLREFLGTAGFCRLWIPGFAEMAAPLYPLTKTGTLFNWGPDQQKAYQEIKQALLTAPALGLPDLTKPFELFVDEKQGYAKGVLTQKLGPWRRPVAYLSKKLDPVAAGWPPCLRMVAAIAVLTKDAGKLTMGQPLVILAPHAVEALVKQPPDRWLSNARMTHYQALLLDTDRVQFGPVVALNPATLLPLPEEGLQHNCLDILAEAHGTRPDLTDQPLPDADHTWYTDGSSLLQEGQRKAGAAVTTETEVIWAKALPAGTSAQRAELIALTQALKMAEGKKLNVYTDSRYAFATAHIHGEIYRRRGLLTSEGKEIKNKDEILALLKALFLPKRLSIIHCPGHQKGHSAEARGNRMADQAARKAAITETPDTSTLLAGKRTADGSEFEKRTADGSEFESPKKKAKVE

SEQ ID NO: 2708 - protein, 2096 aa, synthetic construct
MPAAKRVKLDGGDKKYSIGLDIGTNSVGWAVITDEYKVPSKKFKVLGNTDRHSIKKNLIGALLFDSGETAEATRLKRTARRRYTRRKNRICYLQEIFSNEMAKVDDSFFHRLEESFLVEEDKKHERHPIFGNIVDEVAYHEKYPTIYHLRKKLVDSTDKADLRLIYLALAHMIKFRGHFLIEGDLNPDNSDVDKLFIQLVQTYNQLFEENPINASGVDAKAILSARLSKSRRLENLIAQLPGEKKNGLFGNLIALSLGLTPNFKSNFDLAEDAKLQLSKDTYDDDLDNLLAQIGDQYADLFLAAKNLSDAILLSDILRVNTEITKAPLSASMIKRYDEHHQDLTLLKALVRQQLPEKYKEIFFDQSKNGYAGYIDGGASQEEFYKFIKPILEKMDGTEELLVKLNREDLLRKQRTFDNGSIPHQIHLGELHAILRRQEDFYPFLKDNREKIEKILTFRIPYYVGPLARGNSRFAWMTRKSEETITPWNFEEVVDKGASAQSFIERMTNFDKNLPNEKVLPKHSLLYEYFTVYNELTKVKYVTEGMRKPAFLSGEQKKAIVDLLFKTNRKVTVKQLKEDYFKKIECFDSVEISGVEDRFNASLGTYHDLLKIIKDKDFLDNEENEDILEDIVLTLTLFEDREMIEERLKTYAHLFDDKVMKQLKRRRYTGWGRLSRKLINGIRDKQSGKTILDFLKSDGFANRNFMQLIHDDSLTFKEDIQKAQVSGQGDSLHEHIANLAGSPAIKKGILQTVKVVDELVKVMGRHKPENIVIEMARENQTTQKGQKNSRERMKRIEEGIKELGSQILKEHPVENTQLQNEKLYLYYLQNGRDMYVDQELDINRLSDYDVDHIVPQSFLKDDSIDNKVLTRSDKARGKSDNVPSEEVVKKMKNYWRQLLNAKLITQRKFDNLTKAERGGLSELDKAGFIKRQLVETRQITKHVAQILDSRMNTKYDENDKLIREVKVITLKSKLVSDFRKDFQFYKVREINNYHHAHDAYLNAVVGTALIKKYPKLESEFVYGDYKVYDVRKMIAKSEQEIGKATAKYFFYSNIMNFFKTEITLANGEIRKRPLIETNGETGEIVWDKGRDFATVRKVLSMPQVNIVKKTEVQTGGFSKESILPKRNSDKLIARKKDWDPKKYGGFDSPTVAYSVLVVAKVEKGKSKKLKSVKELLGITIMERSSFEKNPIDFLEAKGYKEVKKDLIIKLPKYSLFELENGRKRMLASAGELQKGNELALPSKYVNFLYLASHYEKLKGSPEDNEQKQLFVEQHKHYLDEIIEQISEFSKRVILADANLDKVLSAYNKHRDKPIREQAENIIHLFTLTNLGAPAAFKYFDTTIDRKRYTSTKEVLDATLIHQSITGLYETRIDLSQLGGDGGGGGGGSEAAAKGGTLNIEDEHRLHETSKEPDVSLGSTWLSDFPQAWAETGGMGLAVRQAPLIIPLKATSTPVSIKQYPMSQEARLGIKPHIQRLLDQGILVPCQSPWNTPLLPVKKPGTNDYRPVQDLREVNKRVEDIHPTVPNPYNLLSGLPPSHQWYTVLDLKDAFFCLRLHPTSQPLFAFEWRDPEMGISGQLTWTRLPQGFKNSPTLFDEALHRDLADFRIQHPDLILLQYVDDLLLAATSELDCQQGTRALLQTLGNLGYRASAKKAQICQKQVKYLGYLLKEGQRWLTEARKETVMGQPTPKTPRQLREFLGTAGFCRLWIPGFAEMAAPLYPLTKTGTLFNWGPDQQKAYQEIKQALLTAPALGLPDLTKPFELFVDEKQGYAKGVLTQKLGPWRRPVAYLSKKLDPVAAGWPPCLRMVAAIAVLTKDAGKLTMGQPLVILAPHAVEALVKQPPDRWLSNARMTHYQALLLDTDRVQFGPVVALNPATLLPLPEEGLQHNCLDILAEAHGTRPDLTDQPLPDADHTWYTDGSSLLQEGQRKAGAAVTTETEVIWAKALPAGTSAQRAELIALTQALKMAEGKKLNVYTDSRYAFATAHIHGEIYRRRGLLTSEGKEIKNKDEILALLKALFLPKRLSIIHCPGHQKGHSAEARGNRMADQAARKAAITETPDTSTLLAGKRTADGSEFEKRTADGSEFESPKKKAKVE

SEQ ID NO: 2709 - protein, 2096 aa, synthetic construct
MPAAKRVKLDGGDKKYSIGLDIGTNSVGWAVITDEYKVPSKKFKVLGNTDRHSIKKNLIGALLFDSGETAEATRLKRTARRRYTRRKNRICYLQEIFSNEMAKVDDSFFHRLEESFLVEEDKKHERHPIFGNIVDEVAYHEKYPTIYHLRKKLVDSTDKADLRLIYLALAHMIKFRGHFLIEGDLNPDNSDVDKLFIQLVQTYNQLFEENPINASGVDAKAILSARLSKSRRLENLIAQLPGEKKNGLFGNLIALSLGLTPNFKSNFDLAEDAKLQLSKDTYDDDLDNLLAQIGDQYADLFLAAKNLSDAILLSDILRVNTEITKAPLSASMIKRYDEHHQDLTLLKALVRQQLPEKYKEIFFDQSKNGYAGYIDGGASQEEFYKFIKPILEKMDGTEELLVKLNREDLLRKQRTFDNGSIPHQIHLGELHAILRRQEDFYPFLKDNREKIEKILTFRIPYYVGPLARGNSRFAWMTRKSEETITPWNFEEVVDKGASAQSFIERMTNFDKNLPNEKVLPKHSLLYEYFTVYNELTKVKYVTEGMRKPAFLSGEQKKAIVDLLFKTNRKVTVKQLKEDYFKKIECFDSVEISGVEDRFNASLGTYHDLLKIIKDKDFLDNEENEDILEDIVLTLTLFEDREMIEERLKTYAHLFDDKVMKQLKRRRYTGWGRLSRKLINGIRDKQSGKTILDFLKSDGFANRNFMQLIHDDSLTFKEDIQKAQVSGQGDSLHEHIANLAGSPAIKKGILQTVKVVDELVKVMGRHKPENIVIEMARENQTTQKGQKNSRERMKRIEEGIKELGSQILKEHPVENTQLQNEKLYLYYLQNGRDMYVDQELDINRLSDYDVDHIVPQSFLKDDSIDNKVLTRSDKARGKSDNVPSEEVVKKMKNYWRQLLNAKLITQRKFDNLTKAERGGLSELDKAGFIKRQLVETRQITKHVAQILDSRMNTKYDENDKLIREVKVITLKSKLVSDFRKDFQFYKVREINNYHHAHDAYLNAVVGTALIKKYPKLESEFVYGDYKVYDVRKMIAKSEQEIGKATAKYFFYSNIMNFFKTEITLANGEIRKRPLIETNGETGEIVWDKGRDFATVRKVLSMPQVNIVKKTEVQTGGFSKESILPKRNSDKLIARKKDWDPKKYGGFDSPTVAYSVLVVAKVEKGKSKKLKSVKELLGITIMERSSFEKNPIDFLEAKGYKEVKKDLIIKLPKYSLFELENGRKRMLASAGELQKGNELALPSKYVNFLYLASHYEKLKGSPEDNEQKQLFVEQHKHYLDEIIEQISEFSKRVILADANLDKVLSAYNKHRDKPIREQAENIIHLFTLTNLGAPAAFKYFDTTIDRKRYTSTKEVLDATLIHQSITGLYETRIDLSQLGGDGGPAPAPAPAPAPGGTLNIEDEHRLHETSKEPDVSLGSTWLSDFPQAWAETGGMGLAVRQAPLIIPLKATSTPVSIKQYPMSQEARLGIKPHIQRLLDQGILVPCQSPWNTPLLPVKKPGTNDYRPVQDLREVNKRVEDIHPTVPNPYNLLSGLPPSHQWYTVLDLKDAFFCLRLHPTSQPLFAFEWRDPEMGISGQLTWTRLPQGFKNSPTLFDEALHRDLADFRIQHPDLILLQYVDDLLLAATSELDCQQGTRALLQTLGNLGYRASAKKAQICQKQVKYLGYLLKEGQRWLTEARKETVMGQPTPKTPRQLREFLGTAGFCRLWIPGFAEMAAPLYPLTKTGTLFNWGPDQQKAYQEIKQALLTAPALGLPDLTKPFELFVDEKQGYAKGVLTQKLGPWRRPVAYLSKKLDPVAAGWPPCLRMVAAIAVLTKDAGKLTMGQPLVILAPHAVEALVKQPPDRWLSNARMTHYQALLLDTDRVQFGPVVALNPATLLPLPEEGLQHNCLDILAEAHGTRPDLTDQPLPDADHTWYTDGSSLLQEGQRKAGAAVTTETEVIWAKALPAGTSAQRAELIALTQALKMAEGKKLNVYTDSRYAFATAHIHGEIYRRRGLLTSEGKEIKNKDEILALLKALFLPKRLSIIHCPGHQKGHSAEARGNRMADQAARKAAITETPDTSTLLAGKRTADGSEFEKRTADGSEFESPKKKAKVE

SEQ ID NO: 2710 - protein, 2091 aa, synthetic construct
MPAAKRVKLDGGDKKYSIGLDIGTNSVGWAVITDEYKVPSKKFKVLGNTDRHSIKKNLIGALLFDSGETAEATRLKRTARRRYTRRKNRICYLQEIFSNEMAKVDDSFFHRLEESFLVEEDKKHERHPIFGNIVDEVAYHEKYPTIYHLRKKLVDSTDKADLRLIYLALAHMIKFRGHFLIEGDLNPDNSDVDKLFIQLVQTYNQLFEENPINASGVDAKAILSARLSKSRRLENLIAQLPGEKKNGLFGNLIALSLGLTPNFKSNFDLAEDAKLQLSKDTYDDDLDNLLAQIGDQYADLFLAAKNLSDAILLSDILRVNTEITKAPLSASMIKRYDEHHQDLTLLKALVRQQLPEKYKEIFFDQSKNGYAGYIDGGASQEEFYKFIKPILEKMDGTEELLVKLNREDLLRKQRTFDNGSIPHQIHLGELHAILRRQEDFYPFLKDNREKIEKILTFRIPYYVGPLARGNSRFAWMTRKSEETITPWNFEEVVDKGASAQSFIERMTNFDKNLPNEKVLPKHSLLYEYFTVYNELTKVKYVTEGMRKPAFLSGEQKKAIVDLLFKTNRKVTVKQLKEDYFKKIECFDSVEISGVEDRFNASLGTYHDLLKIIKDKDFLDNEENEDILEDIVLTLTLFEDREMIEERLKTYAHLFDDKVMKQLKRRRYTGWGRLSRKLINGIRDKQSGKTILDFLKSDGFANRNFMQLIHDDSLTFKEDIQKAQVSGQGDSLHEHIANLAGSPAIKKGILQTVKVVDELVKVMGRHKPENIVIEMARENQTTQKGQKNSRERMKRIEEGIKELGSQILKEHPVENTQLQNEKLYLYYLQNGRDMYVDQELDINRLSDYDVDHIVPQSFLKDDSIDNKVLTRSDKARGKSDNVPSEEVVKKMKNYWRQLLNAKLITQRKFDNLTKAERGGLSELDKAGFIKRQLVETRQITKHVAQILDSRMNTKYDENDKLIREVKVITLKSKLVSDFRKDFQFYKVREINNYHHAHDAYLNAVVGTALIKKYPKLESEFVYGDYKVYDVRKMIAKSEQEIGKATAKYFFYSNIMNFFKTEITLANGEIRKRPLIETNGETGEIVWDKGRDFATVRKVLSMPQVNIVKKTEVQTGGFSKESILPKRNSDKLIARKKDWDPKKYGGFDSPTVAYSVLVVAKVEKGKSKKLKSVKELLGITIMERSSFEKNPIDFLEAKGYKEVKKDLIIKLPKYSLFELENGRKRMLASAGELQKGNELALPSKYVNFLYLASHYEKLKGSPEDNEQKQLFVEQHKHYLDEIIEQISEFSKRVILADANLDKVLSAYNKHRDKPIREQAENIIHLFTLTNLGAPAAFKYFDTTIDRKRYTSTKEVLDATLIHQSITGLYETRIDLSQLGGDGGGSSPAPGGTLNIEDEHRLHETSKEPDVSLGSTWLSDFPQAWAETGGMGLAVRQAPLIIPLKATSTPVSIKQYPMSQEARLGIKPHIQRLLDQGILVPCQSPWNTPLLPVKKPGTNDYRPVQDLREVNKRVEDIHPTVPNPYNLLSGLPPSHQWYTVLDLKDAFFCLRLHPTSQPLFAFEWRDPEMGISGQLTWTRLPQGFKNSPTLFDEALHRDLADFRIQHPDLILLQYVDDLLLAATSELDCQQGTRALLQTLGNLGYRASAKKAQICQKQVKYLGYLLKEGQRWLTEARKETVMGQPTPKTPRQLREFLGTAGFCRLWIPGFAEMAAPLYPLTKTGTLFNWGPDQQKAYQEIKQALLTAPALGLPDLTKPFELFVDEKQGYAKGVLTQKLGPWRRPVAYLSKKLDPVAAGWPPCLRMVAAIAVLTKDAGKLTMGQPLVILAPHAVEALVKQPPDRWLSNARMTHYQALLLDTDRVQFGPVVALNPATLLPLPEEGLQHNCLDILAEAHGTRPDLTDQPLPDADHTWYTDGSSLLQEGQRKAGAAVTTETEVIWAKALPAGTSAQRAELIALTQALKMAEGKKLNVYTDSRYAFATAHIHGEIYRRRGLLTSEGKEIKNKDEILALLKALFLPKRLSIIHCPGHQKGHSAEARGNRMADQAARKAAITETPDTSTLLAGKRTADGSEFEKRTADGSEFESPKKKAKVE

SEQ ID NO: 2711 - protein, 2131 aa, synthetic construct
MPAAKRVKLDGGDKKYSIGLDIGTNSVGWAVITDEYKVPSKKFKVLGNTDRHSIKKNLIGALLFDSGETAEATRLKRTARRRYTRRKNRICYLQEIFSNEMAKVDDSFFHRLEESFLVEEDKKHERHPIFGNIVDEVAYHEKYPTIYHLRKKLVDSTDKADLRLIYLALAHMIKFRGHFLIEGDLNPDNSDVDKLFIQLVQTYNQLFEENPINASGVDAKAILSARLSKSRRLENLIAQLPGEKKNGLFGNLIALSLGLTPNFKSNFDLAEDAKLQLSKDTYDDDLDNLLAQIGDQYADLFLAAKNLSDAILLSDILRVNTEITKAPLSASMIKRYDEHHQDLTLLKALVRQQLPEKYKEIFFDQSKNGYAGYIDGGASQEEFYKFIKPILEKMDGTEELLVKLNREDLLRKQRTFDNGSIPHQIHLGELHAILRRQEDFYPFLKDNREKIEKILTFRIPYYVGPLARGNSRFAWMTRKSEETITPWNFEEVVDKGASAQSFIERMTNFDKNLPNEKVLPKHSLLYEYFTVYNELTKVKYVTEGMRKPAFLSGEQKKAIVDLLFKTNRKVTVKQLKEDYFKKIECFDSVEISGVEDRFNASLGTYHDLLKIIKDKDFLDNEENEDILEDIVLTLTLFEDREMIEERLKTYAHLFDDKVMKQLKRRRYTGWGRLSRKLINGIRDKQSGKTILDFLKSDGFANRNFMQLIHDDSLTFKEDIQKAQVSGQGDSLHEHIANLAGSPAIKKGILQTVKVVDELVKVMGRHKPENIVIEMARENQTTQKGQKNSRERMKRIEEGIKELGSQILKEHPVENTQLQNEKLYLYYLQNGRDMYVDQELDINRLSDYDVDHIVPQSFLKDDSIDNKVLTRSDKARGKSDNVPSEEVVKKMKNYWRQLLNAKLITQRKFDNLTKAERGGLSELDKAGFIKRQLVETRQITKHVAQILDSRMNTKYDENDKLIREVKVITLKSKLVSDFRKDFQFYKVREINNYHHAHDAYLNAVVGTALIKKYPKLESEFVYGDYKVYDVRKMIAKSEQEIGKATAKYFFYSNIMNFFKTEITLANGEIRKRPLIETNGETGEIVWDKGRDFATVRKVLSMPQVNIVKKTEVQTGGFSKESILPKRNSDKLIARKKDWDPKKYGGFDSPTVAYSVLVVAKVEKGKSKKLKSVKELLGITIMERSSFEKNPIDFLEAKGYKEVKKDLIIKLPKYSLFELENGRKRMLASAGELQKGNELALPSKYVNFLYLASHYEKLKGSPEDNEQKQLFVEQHKHYLDEIIEQISEFSKRVILADANLDKVLSAYNKHRDKPIREQAENIIHLFTLTNLGAPAAFKYFDTTIDRKRYTSTKEVLDATLIHQSITGLYETRIDLSQLGGDGGAEAAAKEAAAKEAAAKEAAAKALEAEAAAKEAAAKEAAAKEAAAKAGGTLNIEDEHRLHETSKEPDVSLGSTWLSDFPQAWAETGGMGLAVRQAPLIIPLKATSTPVSIKQYPMSQEARLGIKPHIQRLLDQGILVPCQSPWNTPLLPVKKPGTNDYRPVQDLREVNKRVEDIHPTVPNPYNLLSGLPPSHQWYTVLDLKDAFFCLRLHPTSQPLFAFEWRDPEMGISGQLTWTRLPQGFKNSPTLFNEALHRDLADFRIQHPDLILLQYVDDLLLAATSELDCQQGTRALLQTLGNLGYRASAKKAQICQKQVKYLGYLLKEGQRWLTEARKETVMGQPTPKTPRQLREFLGTAGFCRLWIPGFAEMAAPLYPLTKPGTLFNWGPDQQKAYQEIKQALLTAPALGLPDLTKPFELFVDEKQGYAKGVLTQKLGPWRRPVAYLSKKLDPVAAGWPPCLRMVAAIAVLTKDAGKLTMGQPLVILAPHAVEALVKQPPDRWLSNARMTHYQALLLDTDRVQFGPVVALNPATLLPLPEEGLQHNCLDILAEAHGTRPDLTDQPLPDADHTWYTDGSSLLQEGQRKAGAAVTTETEVIWAKALPAGTSAQRAELIALTQALKMAEGKKLNVYTDSRYAFATAHIHGEIYRRRGWLTSEGKEIKNKDEILALLKALFLPKRLSIIHCPGHQKGHSAEARGNRMADQAARKAAITETPDTSTLLAGKRTADGSEFEKRTADGSEFESPKKKAKVE

SEQ ID NO: 2712 - protein, 2100 aa, synthetic construct
MPAAKRVKLDGGDKKYSIGLDIGTNSVGWAVITDEYKVPSKKFKVLGNTDRHSIKKNLIGALLFDSGETAEATRLKRTARRRYTRRKNRICYLQEIFSNEMAKVDDSFFHRLEESFLVEEDKKHERHPIFGNIVDEVAYHEKYPTIYHLRKKLVDSTDKADLRLIYLALAHMIKFRGHFLIEGDLNPDNSDVDKLFIQLVQTYNQLFEENPINASGVDAKAILSARLSKSRRLENLIAQLPGEKKNGLFGNLIALSLGLTPNFKSNFDLAEDAKLQLSKDTYDDDLDNLLAQIGDQYADLFLAAKNLSDAILLSDILRVNTEITKAPLSASMIKRYDEHHQDLTLLKALVRQQLPEKYKEIFFDQSKNGYAGYIDGGASQEEFYKFIKPILEKMDGTEELLVKLNREDLLRKQRTFDNGSIPHQIHLGELHAILRRQEDFYPFLKDNREKIEKILTFRIPYYVGPLARGNSRFAWMTRKSEETITPWNFEEVVDKGASAQSFIERMTNFDKNLPNEKVLPKHSLLYEYFTVYNELTKVKYVTEGMRKPAFLSGEQKKAIVDLLFKTNRKVTVKQLKEDYFKKIECFDSVEISGVEDRFNASLGTYHDLLKIIKDKDFLDNEENEDILEDIVLTLTLFEDREMIEERLKTYAHLFDDKVMKQLKRRRYTGWGRLSRKLINGIRDKQSGKTILDFLKSDGFANRNFMQLIHDDSLTFKEDIQKAQVSGQGDSLHEHIANLAGSPAIKKGILQTVKVVDELVKVMGRHKPENIVIEMARENQTTQKGQKNSRERMKRIEEGIKELGSQILKEHPVENTQLQNEKLYLYYLQNGRDMYVDQELDINRLSDYDVDHIVPQSFLKDDSIDNKVLTRSDKARGKSDNVPSEEVVKKMKNYWRQLLNAKLITQRKFDNLTKAERGGLSELDKAGFIKRQLVETRQITKHVAQILDSRMNTKYDENDKLIREVKVITLKSKLVSDFRKDFQFYKVREINNYHHAHDAYLNAVVGTALIKKYPKLESEFVYGDYKVYDVRKMIAKSEQEIGKATAKYFFYSNIMNFFKTEITLANGEIRKRPLIETNGETGEIVWDKGRDFATVRKVLSMPQVNIVKKTEVQTGGFSKESILPKRNSDKLIARKKDWDPKKYGGFDSPTVAYSVLVVAKVEKGKSKKLKSVKELLGITIMERSSFEKNPIDFLEAKGYKEVKKDLIIKLPKYSLFELENGRKRMLASAGELQKGNELALPSKYVNFLYLASHYEKLKGSPEDNEQKQLFVEQHKHYLDEIIEQISEFSKRVILADANLDKVLSAYNKHRDKPIREQAENIIHLFTLTNLGAPAAFKYFDTTIDRKRYTSTKEVLDATLIHQSITGLYETRIDLSQLGGDGGEAAAKGGGGSEAAAKGGTLNIEDEHRLHETSKEPDVSLGSTWLSDFPQAWAETGGMGLAVRQAPLIIPLKATSTPVSIKQYPMSQEARLGIKPHIQRLLDQGILVPCQSPWNTPLLPVKKPGTNDYRPVQDLREVNKRVEDIHPTVPNPYNLLSGLPPSHQWYTVLDLKDAFFCLRLHPTSQPLFAFEWRDPEMGISGQLTWTRLPQGFKNSPTLFNEALHRDLADFRIQHPDLILLQYVDDLLLAATSELDCQQGTRALLQTLGNLGYRASAKKAQICQKQVKYLGYLLKEGQRWLTEARKETVMGQPTPKTPRQLREFLGTAGFCRLWIPGFAEMAAPLYPLTKPGTLFNWGPDQQKAYQEIKQALLTAPALGLPDLTKPFELFVDEKQGYAKGVLTQKLGPWRRPVAYLSKKLDPVAAGWPPCLRMVAAIAVLTKDAGKLTMGQPLVILAPHAVEALVKQPPDRWLSNARMTHYQALLLDTDRVQFGPVVALNPATLLPLPEEGLQHNCLDILAEAHGTRPDLTDQPLPDADHTWYTDGSSLLQEGQRKAGAAVTTETEVIWAKALPAGTSAQRAELIALTQALKMAEGKKLNVYTDSRYAFATAHIHGEIYRRRGWLTSEGKEIKNKDEILALLKALFLPKRLSIIHCPGHQKGHSAEARGNRMADQAARKAAITETPDTSTLLAGKRTADGSEFEKRTADGSEFESPKKKAKVE

SEQ ID NO: 2713 - protein, 2096 aa, synthetic construct
MPAAKRVKLDGGDKKYSIGLDIGTNSVGWAVITDEYKVPSKKFKVLGNTDRHSIKKNLIGALLFDSGETAEATRLKRTARRRYTRRKNRICYLQEIFSNEMAKVDDSFFHRLEESFLVEEDKKHERHPIFGNIVDEVAYHEKYPTIYHLRKKLVDSTDKADLRLIYLALAHMIKFRGHFLIEGDLNPDNSDVDKLFIQLVQTYNQLFEENPINASGVDAKAILSARLSKSRRLENLIAQLPGEKKNGLFGNLIALSLGLTPNFKSNFDLAEDAKLQLSKDTYDDDLDNLLAQIGDQYADLFLAAKNLSDAILLSDILRVNTEITKAPLSASMIKRYDEHHQDLTLLKALVRQQLPEKYKEIFFDQSKNGYAGYIDGGASQEEFYKFIKPILEKMDGTEELLVKLNREDLLRKQRTFDNGSIPHQIHLGELHAILRRQEDFYPFLKDNREKIEKILTFRIPYYVGPLARGNSRFAWMTRKSEETITPWNFEEVVDKGASAQSFIERMTNFDKNLPNEKVLPKHSLLYEYFTVYNELTKVKYVTEGMRKPAFLSGEQKKAIVDLLFKTNRKVTVKQLKEDYFKKIECFDSVEISGVEDRFNASLGTYHDLLKIIKDKDFLDNEENEDILEDIVLTLTLFEDREMIEERLKTYAHLFDDKVMKQLKRRRYTGWGRLSRKLINGIRDKQSGKTILDFLKSDGFANRNFMQLIHDDSLTFKEDIQKAQVSGQGDSLHEHIANLAGSPAIKKGILQTVKVVDELVKVMGRHKPENIVIEMARENQTTQKGQKNSRERMKRIEEGIKELGSQILKEHPVENTQLQNEKLYLYYLQNGRDMYVDQELDINRLSDYDVDHIVPQSFLKDDSIDNKVLTRSDKARGKSDNVPSEEVVKKMKNYWRQLLNAKLITQRKFDNLTKAERGGLSELDKAGFIKRQLVETRQITKHVAQILDSRMNTKYDENDKLIREVKVITLKSKLVSDFRKDFQFYKVREINNYHHAHDAYLNAVVGTALIKKYPKLESEFVYGDYKVYDVRKMIAKSEQEIGKATAKYFFYSNIMNFFKTEITLANGEIRKRPLIETNGETGEIVWDKGRDFATVRKVLSMPQVNIVKKTEVQTGGFSKESILPKRNSDKLIARKKDWDPKKYGGFDSPTVAYSVLVVAKVEKGKSKKLKSVKELLGITIMERSSFEKNPIDFLEAKGYKEVKKDLIIKLPKYSLFELENGRKRMLASAGELQKGNELALPSKYVNFLYLASHYEKLKGSPEDNEQKQLFVEQHKHYLDEIIEQISEFSKRVILADANLDKVLSAYNKHRDKPIREQAENIIHLFTLTNLGAPAAFKYFDTTIDRKRYTSTKEVLDATLIHQSITGLYETRIDLSQLGGDGGGGSEAAAKGGGGGTLNIEDEHRLHETSKEPDVSLGSTWLSDFPQAWAETGGMGLAVRQAPLIIPLKATSTPVSIKQYPMSQEARLGIKPHIQRLLDQGILVPCQSPWNTPLLPVKKPGTNDYRPVQDLREVNKRVEDIHPTVPNPYNLLSGLPPSHQWYTVLDLKDAFFCLRLHPTSQPLFAFEWRDPEMGISGQLTWTRLPQGFKNSPTLFNEALHRDLADFRIQHPDLILLQYVDDLLLAATSELDCQQGTRALLQTLGNLGYRASAKKAQICQKQVKYLGYLLKEGQRWLTEARKETVMGQPTPKTPRQLREFLGTAGFCRLWIPGFAEMAAPLYPLTKPGTLFNWGPDQQKAYQEIKQALLTAPALGLPDLTKPFELFVDEKQGYAKGVLTQKLGPWRRPVAYLSKKLDPVAAGWPPCLRMVAAIAVLTKDAGKLTMGQPLVILAPHAVEALVKQPPDRWLSNARMTHYQALLLDTDRVQFGPVVALNPATLLPLPEEGLQHNCLDILAEAHGTRPDLTDQPLPDADHTWYTDGSSLLQEGQRKAGAAVTTETEVIWAKALPAGTSAQRAELIALTQALKMAEGKKLNVYTDSRYAFATAHIHGEIYRRRGWLTSEGKEIKNKDEILALLKALFLPKRLSIIHCPGHQKGHSAEARGNRMADQAARKAAITETPDTSTLLAGKRTADGSEFEKRTADGSEFESPKKKAKVE

SEQ ID NO: 2714 - protein, 2096 aa, synthetic construct
MPAAKRVKLDGGDKKYSIGLDIGTNSVGWAVITDEYKVPSKKFKVLGNTDRHSIKKNLIGALLFDSGETAEATRLKRTARRRYTRRKNRICYLQEIFSNEMAKVDDSFFHRLEESFLVEEDKKHERHPIFGNIVDEVAYHEKYPTIYHLRKKLVDSTDKADLRLIYLALAHMIKFRGHFLIEGDLNPDNSDVDKLFIQLVQTYNQLFEENPINASGVDAKAILSARLSKSRRLENLIAQLPGEKKNGLFGNLIALSLGLTPNFKSNFDLAEDAKLQLSKDTYDDDLDNLLAQIGDQYADLFLAAKNLSDAILLSDILRVNTEITKAPLSASMIKRYDEHHQDLTLLKALVRQQLPEKYKEIFFDQSKNGYAGYIDGGASQEEFYKFIKPILEKMDGTEELLVKLNREDLLRKQRTFDNGSIPHQIHLGELHAILRRQEDFYPFLKDNREKIEKILTFRIPYYVGPLARGNSRFAWMTRKSEETITPWNFEEVVDKGASAQSFIERMTNFDKNLPNEKVLPKHSLLYEYFTVYNELTKVKYVTEGMRKPAFLSGEQKKAIVDLLFKTNRKVTVKQLKEDYFKKIECFDSVEISGVEDRFNASLGTYHDLLKIIKDKDFLDNEENEDILEDIVLTLTLFEDREMIEERLKTYAHLFDDKVMKQLKRRRYTGWGRLSRKLINGIRDKQSGKTILDFLKSDGFANRNFMQLIHDDSLTFKEDIQKAQVSGQGDSLHEHIANLAGSPAIKKGILQTVKVVDELVKVMGRHKPENIVIEMARENQTTQKGQKNSRERMKRIEEGIKELGSQILKEHPVENTQLQNEKLYLYYLQNGRDMYVDQELDINRLSDYDVDHIVPQSFLKDDSIDNKVLTRSDKARGKSDNVPSEEVVKKMKNYWRQLLNAKLITQRKFDNLTKAERGGLSELDKAGFIKRQLVETRQITKHVAQILDSRMNTKYDENDKLIREVKVITLKSKLVSDFRKDFQFYKVREINNYHHAHDAYLNAVVGTALIKKYPKLESEFVYGDYKVYDVRKMIAKSEQEIGKATAKYFFYSNIMNFFKTEITLANGEIRKRPLIETNGETGEIVWDKGRDFATVRKVLSMPQVNIVKKTEVQTGGFSKESILPKRNSDKLIARKKDWDPKKYGGFDSPTVAYSVLVVAKVEKGKSKKLKSVKELLGITIMERSSFEKNPIDFLEAKGYKEVKKDLIIKLPKYSLFELENGRKRMLASAGELQKGNELALPSKYVNFLYLASHYEKLKGSPEDNEQKQLFVEQHKHYLDEIIEQISEFSKRVILADANLDKVLSAYNKHRDKPIREQAENIIHLFTLTNLGAPAAFKYFDTTIDRKRYTSTKEVLDATLIHQSITGLYETRIDLSQLGGDGGEAAAKPAPGGSGGTLNIEDEHRLHETSKEPDVSLGSTWLSDFPQAWAETGGMGLAVRQAPLIIPLKATSTPVSIKQYPMSQEARLGIKPHIQRLLDQGILVPCQSPWNTPLLPVKKPGTNDYRPVQDLREVNKRVEDIHPTVPNPYNLLSGLPPSHQWYTVLDLKDAFFCLRLHPTSQPLFAFEWRDPEMGISGQLTWTRLPQGFKNSPTLFNEALHRDLADFRIQHPDLILLQYVDDLLLAATSELDCQQGTRALLQTLGNLGYRASAKKAQICQKQVKYLGYLLKEGQRWLTEARKETVMGQPTPKTPRQLREFLGTAGFCRLWIPGFAEMAAPLYPLTKPGTLFNWGPDQQKAYQEIKQALLTAPALGLPDLTKPFELFVDEKQGYAKGVLTQKLGPWRRPVAYLSKKLDPVAAGWPPCLRMVAAIAVLTKDAGKLTMGQPLVILAPHAVEALVKQPPDRWLSNARMTHYQALLLDTDRVQFGPVVALNPATLLPLPEEGLQHNCLDILAEAHGTRPDLTDQPLPDADHTWYTDGSSLLQEGQRKAGAAVTTETEVIWAKALPAGTSAQRAELIALTQALKMAEGKKLNVYTDSRYAFATAHIHGEIYRRRGWLTSEGKEIKNKDEILALLKALFLPKRLSIIHCPGHQKGHSAEARGNRMADQAARKAAITETPDTSTLLAGKRTADGSEFEKRTADGSEFESPKKKAKVE

SEQ ID NO: 2715 - protein, 2094 aa, synthetic construct
MPAAKRVKLDGGDKKYSIGLDIGTNSVGWAVITDEYKVPSKKFKVLGNTDRHSIKKNLIGALLFDSGETAEATRLKRTARRRYTRRKNRICYLQEIFSNEMAKVDDSFFHRLEESFLVEEDKKHERHPIFGNIVDEVAYHEKYPTIYHLRKKLVDSTDKADLRLIYLALAHMIKFRGHFLIEGDLNPDNSDVDKLFIQLVQTYNQLFEENPINASGVDAKAILSARLSKSRRLENLIAQLPGEKKNGLFGNLIALSLGLTPNFKSNFDLAEDAKLQLSKDTYDDDLDNLLAQIGDQYADLFLAAKNLSDAILLSDILRVNTEITKAPLSASMIKRYDEHHQDLTLLKALVRQQLPEKYKEIFFDQSKNGYAGYIDGGASQEEFYKFIKPILEKMDGTEELLVKLNREDLLRKQRTFDNGSIPHQIHLGELHAILRRQEDFYPFLKDNREKIEKILTFRIPYYVGPLARGNSRFAWMTRKSEETITPWNFEEVVDKGASAQSFIERMTNFDKNLPNEKVLPKHSLLYEYFTVYNELTKVKYVTEGMRKPAFLSGEQKKAIVDLLFKTNRKVTVKQLKEDYFKKIECFDSVEISGVEDRFNASLGTYHDLLKIIKDKDFLDNEENEDILEDIVLTLTLFEDREMIEERLKTYAHLFDDKVMKQLKRRRYTGWGRLSRKLINGIRDKQSGKTILDFLKSDGFANRNFMQLIHDDSLTFKEDIQKAQVSGQGDSLHEHIANLAGSPAIKKGILQTVKVVDELVKVMGRHKPENIVIEMARENQTTQKGQKNSRERMKRIEEGIKELGSQILKEHPVENTQLQNEKLYLYYLQNGRDMYVDQELDINRLSDYDVDHIVPQSFLKDDSIDNKVLTRSDKARGKSDNVPSEEVVKKMKNYWRQLLNAKLITQRKFDNLTKAERGGLSELDKAGFIKRQLVETRQITKHVAQILDSRMNTKYDENDKLIREVKVITLKSKLVSDFRKDFQFYKVREINNYHHAHDAYLNAVVGTALIKKYPKLESEFVYGDYKVYDVRKMIAKSEQEIGKATAKYFFYSNIMNFFKTEITLANGEIRKRPLIETNGETGEIVWDKGRDFATVRKVLSMPQVNIVKKTEVQTGGFSKESILPKRNSDKLIARKKDWDPKKYGGFDSPTVAYSVLVVAKVEKGKSKKLKSVKELLGITIMERSSFEKNPIDFLEAKGYKEVKKDLIIKLPKYSLFELENGRKRMLASAGELQKGNELALPSKYVNFLYLASHYEKLKGSPEDNEQKQLFVEQHKHYLDEIIEQISEFSKRVILADANLDKVLSAYNKHRDKPIREQAENIIHLFTLTNLGAPAAFKYFDTTIDRKRYTSTKEVLDATLIHQSITGLYETRIDLSQLGGDGGGSSGGGGGSGGTLNIEDEHRLHETSKEPDVSLGSTWLSDFPQAWAETGGMGLAVRQAPLIIPLKATSTPVSIKQYPMSQEARLGIKPHIQRLLDQGILVPCQSPWNTPLLPVKKPGTNDYRPVQDLREVNKRVEDIHPTVPNPYNLLSGLPPSHQWYTVLDLKDAFFCLRLHPTSQPLFAFEWRDPEMGISGQLTWTRLPQGFKNSPTLFNEALHRDLADFRIQHPDLILLQYVDDLLLAATSELDCQQGTRALLQTLGNLGYRASAKKAQICQKQVKYLGYLLKEGQRWLTEARKETVMGQPTPKTPRQLREFLGTAGFCRLWIPGFAEMAAPLYPLTKPGTLFNWGPDQQKAYQEIKQALLTAPALGLPDLTKPFELFVDEKQGYAKGVLTQKLGPWRRPVAYLSKKLDPVAAGWPPCLRMVAAIAVLTKDAGKLTMGQPLVILAPHAVEALVKQPPDRWLSNARMTHYQALLLDTDRVQFGPVVALNPATLLPLPEEGLQHNCLDILAEAHGTRPDLTDQPLPDADHTWYTDGSSLLQEGQRKAGAAVTTETEVIWAKALPAGTSAQRAELIALTQALKMAEGKKLNVYTDSRYAFATAHIHGEIYRRRGWLTSEGKEIKNKDEILALLKALFLPKRLSIIHCPGHQKGHSAEARGNRMADQAARKAAITETPDTSTLLAGKRTADGSEFEKRTADGSEFESPKKKAKVE

SEQ ID NO: 2716 - protein, 2110 aa, synthetic construct
MPAAKRVKLDGGDKKYSIGLDIGTNSVGWAVITDEYKVPSKKFKVLGNTDRHSIKKNLIGALLFDSGETAEATRLKRTARRRYTRRKNRICYLQEIFSNEMAKVDDSFFHRLEESFLVEEDKKHERHPIFGNIVDEVAYHEKYPTIYHLRKKLVDSTDKADLRLIYLALAHMIKFRGHFLIEGDLNPDNSDVDKLFIQLVQTYNQLFEENPINASGVDAKAILSARLSKSRRLENLIAQLPGEKKNGLFGNLIALSLGLTPNFKSNFDLAEDAKLQLSKDTYDDDLDNLLAQIGDQYADLFLAAKNLSDAILLSDILRVNTEITKAPLSASMIKRYDEHHQDLTLLKALVRQQLPEKYKEIFFDQSKNGYAGYIDGGASQEEFYKFIKPILEKMDGTEELLVKLNREDLLRKQRTFDNGSIPHQIHLGELHAILRRQEDFYPFLKDNREKIEKILTFRIPYYVGPLARGNSRFAWMTRKSEETITPWNFEEVVDKGASAQSFIERMTNFDKNLPNEKVLPKHSLLYEYFTVYNELTKVKYVTEGMRKPAFLSGEQKKAIVDLLFKTNRKVTVKQLKEDYFKKIECFDSVEISGVEDRFNASLGTYHDLLKIIKDKDFLDNEENEDILEDIVLTLTLFEDREMIEERLKTYAHLFDDKVMKQLKRRRYTGWGRLSRKLINGIRDKQSGKTILDFLKSDGFANRNFMQLIHDDSLTFKEDIQKAQVSGQGDSLHEHIANLAGSPAIKKGILQTVKVVDELVKVMGRHKPENIVIEMARENQTTQKGQKNSRERMKRIEEGIKELGSQILKEHPVENTQLQNEKLYLYYLQNGRDMYVDQELDINRLSDYDVDHIVPQSFLKDDSIDNKVLTRSDKARGKSDNVPSEEVVKKMKNYWRQLLNAKLITQRKFDNLTKAERGGLSELDKAGFIKRQLVETRQITKHVAQILDSRMNTKYDENDKLIREVKVITLKSKLVSDFRKDFQFYKVREINNYHHAHDAYLNAVVGTALIKKYPKLESEFVYGDYKVYDVRKMIAKSEQEIGKATAKYFFYSNIMNFFKTEITLANGEIRKRPLIETNGETGEIVWDKGRDFATVRKVLSMPQVNIVKKTEVQTGGFSKESILPKRNSDKLIARKKDWDPKKYGGFDSPTVAYSVLVVAKVEKGKSKKLKSVKELLGITIMERSSFEKNPIDFLEAKGYKEVKKDLIIKLPKYSLFELENGRKRMLASAGELQKGNELALPSKYVNFLYLASHYEKLKGSPEDNEQKQLFVEQHKHYLDEIIEQISEFSKRVILADANLDKVLSAYNKHRDKPIREQAENIIHLFTLTNLGAPAAFKYFDTTIDRKRYTSTKEVLDATLIHQSITGLYETRIDLSQLGGDGGEAAAKEAAAKEAAAKEAAAKEAAAKGGTLNIEDEHRLHETSKEPDVSLGSTWLSDFPQAWAETGGMGLAVRQAPLIIPLKATSTPVSIKQYPMSQEARLGIKPHIQRLLDQGILVPCQSPWNTPLLPVKKPGTNDYRPVQDLREVNKRVEDIHPTVPNPYNLLSGLPPSHQWYTVLDLKDAFFCLRLHPTSQPLFAFEWRDPEMGISGQLTWTRLPQGFKNSPTLFNEALHRDLADFRIQHPDLILLQYVDDLLLAATSELDCQQGTRALLQTLGNLGYRASAKKAQICQKQVKYLGYLLKEGQRWLTEARKETVMGQPTPKTPRQLREFLGTAGFCRLWIPGFAEMAAPLYPLTKPGTLFNWGPDQQKAYQEIKQALLTAPALGLPDLTKPFELFVDEKQGYAKGVLTQKLGPWRRPVAYLSKKLDPVAAGWPPCLRMVAAIAVLTKDAGKLTMGQPLVILAPHAVEALVKQPPDRWLSNARMTHYQALLLDTDRVQFGPVVALNPATLLPLPEEGLQHNCLDILAEAHGTRPDLTDQPLPDADHTWYTDGSSLLQEGQRKAGAAVTTETEVIWAKALPAGTSAQRAELIALTQALKMAEGKKLNVYTDSRYAFATAHIHGEIYRRRGWLTSEGKEIKNKDEILALLKALFLPKRLSIIHCPGHQKGHSAEARGNRMADQAARKAAITETPDTSTLLAGKRTADGSEFEKRTADGSEFESPKKKAKVE

SEQ ID NO: 2717 - protein, 2091 aa, synthetic construct
MPAAKRVKLDGGDKKYSIGLDIGTNSVGWAVITDEYKVPSKKFKVLGNTDRHSIKKNLIGALLFDSGETAEATRLKRTARRRYTRRKNRICYLQEIFSNEMAKVDDSFFHRLEESFLVEEDKKHERHPIFGNIVDEVAYHEKYPTIYHLRKKLVDSTDKADLRLIYLALAHMIKFRGHFLIEGDLNPDNSDVDKLFIQLVQTYNQLFEENPINASGVDAKAILSARLSKSRRLENLIAQLPGEKKNGLFGNLIALSLGLTPNFKSNFDLAEDAKLQLSKDTYDDDLDNLLAQIGDQYADLFLAAKNLSDAILLSDILRVNTEITKAPLSASMIKRYDEHHQDLTLLKALVRQQLPEKYKEIFFDQSKNGYAGYIDGGASQEEFYKFIKPILEKMDGTEELLVKLNREDLLRKQRTFDNGSIPHQIHLGELHAILRRQEDFYPFLKDNREKIEKILTFRIPYYVGPLARGNSRFAWMTRKSEETITPWNFEEVVDKGASAQSFIERMTNFDKNLPNEKVLPKHSLLYEYFTVYNELTKVKYVTEGMRKPAFLSGEQKKAIVDLLFKTNRKVTVKQLKEDYFKKIECFDSVEISGVEDRFNASLGTYHDLLKIIKDKDFLDNEENEDILEDIVLTLTLFEDREMIEERLKTYAHLFDDKVMKQLKRRRYTGWGRLSRKLINGIRDKQSGKTILDFLKSDGFANRNFMQLIHDDSLTFKEDIQKAQVSGQGDSLHEHIANLAGSPAIKKGILQTVKVVDELVKVMGRHKPENIVIEMARENQTTQKGQKNSRERMKRIEEGIKELGSQILKEHPVENTQLQNEKLYLYYLQNGRDMYVDQELDINRLSDYDVDHIVPQSFLKDDSIDNKVLTRSDKARGKSDNVPSEEVVKKMKNYWRQLLNAKLITQRKFDNLTKAERGGLSELDKAGFIKRQLVETRQITKHVAQILDSRMNTKYDENDKLIREVKVITLKSKLVSDFRKDFQFYKVREINNYHHAHDAYLNAVVGTALIKKYPKLESEFVYGDYKVYDVRKMIAKSEQEIGKATAKYFFYSNIMNFFKTEITLANGEIRKRPLIETNGETGEIVWDKGRDFATVRKVLSMPQVNIVKKTEVQTGGFSKESILPKRNSDKLIARKKDWDPKKYGGFDSPTVAYSVLVVAKVEKGKSKKLKSVKELLGITIMERSSFEKNPIDFLEAKGYKEVKKDLIIKLPKYSLFELENGRKRMLASAGELQKGNELALPSKYVNFLYLASHYEKLKGSPEDNEQKQLFVEQHKHYLDEIIEQISEFSKRVILADANLDKVLSAYNKHRDKPIREQAENIIHLFTLTNLGAPAAFKYFDTTIDRKRYTSTKEVLDATLIHQSITGLYETRIDLSQLGGDGGGGGGGSGGTLNIEDEHRLHETSKEPDVSLGSTWLSDFPQAWAETGGMGLAVRQAPLIIPLKATSTPVSIKQYPMSQEARLGIKPHIQRLLDQGILVPCQSPWNTPLLPVKKPGTNDYRPVQDLREVNKRVEDIHPTVPNPYNLLSGLPPSHQWYTVLDLKDAFFCLRLHPTSQPLFAFEWRDPEMGISGQLTWTRLPQGFKNSPTLFNEALHRDLADFRIQHPDLILLQYVDDLLLAATSELDCQQGTRALLQTLGNLGYRASAKKAQICQKQVKYLGYLLKEGQRWLTEARKETVMGQPTPKTPRQLREFLGTAGFCRLWIPGFAEMAAPLYPLTKPGTLFNWGPDQQKAYQEIKQALLTAPALGLPDLTKPFELFVDEKQGYAKGVLTQKLGPWRRPVAYLSKKLDPVAAGWPPCLRMVAAIAVLTKDAGKLTMGQPLVILAPHAVEALVKQPPDRWLSNARMTHYQALLLDTDRVQFGPVVALNPATLLPLPEEGLQHNCLDILAEAHGTRPDLTDQPLPDADHTWYTDGSSLLQEGQRKAGAAVTTETEVIWAKALPAGTSAQRAELIALTQALKMAEGKKLNVYTDSRYAFATAHIHGEIYRRRGWLTSEGKEIKNKDEILALLKALFLPKRLSIIHCPGHQKGHSAEARGNRMADQAARKAAITETPDTSTLLAGKRTADGSEFEKRTADGSEFESPKKKAKVE

SEQ ID NO: 2718 - protein, 2093 aa, synthetic construct
MPAAKRVKLDGGDKKYSIGLDIGTNSVGWAVITDEYKVPSKKFKVLGNTDRHSIKKNLIGALLFDSGETAEATRLKRTARRRYTRRKNRICYLQEIFSNEMAKVDDSFFHRLEESFLVEEDKKHERHPIFGNIVDEVAYHEKYPTIYHLRKKLVDSTDKADLRLIYLALAHMIKFRGHFLIEGDLNPDNSDVDKLFIQLVQTYNQLFEENPINASGVDAKAILSARLSKSRRLENLIAQLPGEKKNGLFGNLIALSLGLTPNFKSNFDLAEDAKLQLSKDTYDDDLDNLLAQIGDQYADLFLAAKNLSDAILLSDILRVNTEITKAPLSASMIKRYDEHHQDLTLLKALVRQQLPEKYKEIFFDQSKNGYAGYIDGGASQEEFYKFIKPILEKMDGTEELLVKLNREDLLRKQRTFDNGSIPHQIHLGELHAILRRQEDFYPFLKDNREKIEKILTFRIPYYVGPLARGNSRFAWMTRKSEETITPWNFEEVVDKGASAQSFIERMTNFDKNLPNEKVLPKHSLLYEYFTVYNELTKVKYVTEGMRKPAFLSGEQKKAIVDLLFKTNRKVTVKQLKEDYFKKIECFDSVEISGVEDRFNASLGTYHDLLKIIKDKDFLDNEENEDILEDIVLTLTLFEDREMIEERLKTYAHLFDDKVMKQLKRRRYTGWGRLSRKLINGIRDKQSGKTILDFLKSDGFANRNFMQLIHDDSLTFKEDIQKAQVSGQGDSLHEHIANLAGSPAIKKGILQTVKVVDELVKVMGRHKPENIVIEMARENQTTQKGQKNSRERMKRIEEGIKELGSQILKEHPVENTQLQNEKLYLYYLQNGRDMYVDQELDINRLSDYDVDHIVPQSFLKDDSIDNKVLTRSDKARGKSDNVPSEEVVKKMKNYWRQLLNAKLITQRKFDNLTKAERGGLSELDKAGFIKRQLVETRQITKHVAQILDSRMNTKYDENDKLIREVKVITLKSKLVSDFRKDFQFYKVREINNYHHAHDAYLNAVVGTALIKKYPKLESEFVYGDYKVYDVRKMIAKSEQEIGKATAKYFFYSNIMNFFKTEITLANGEIRKRPLIETNGETGEIVWDKGRDFATVRKVLSMPQVNIVKKTEVQTGGFSKESILPKRNSDKLIARKKDWDPKKYGGFDSPTVAYSVLVVAKVEKGKSKKLKSVKELLGITIMERSSFEKNPIDFLEAKGYKEVKKDLIIKLPKYSLFELENGRKRMLASAGELQKGNELALPSKYVNFLYLASHYEKLKGSPEDNEQKQLFVEQHKHYLDEIIEQISEFSKRVILADANLDKVLSAYNKHRDKPIREQAENIIHLFTLTNLGAPAAFKYFDTTIDRKRYTSTKEVLDATLIHQSITGLYETRIDLSQLGGDGGGSSEAAAKGGTLNIEDEHRLHETSKEPDVSLGSTWLSDFPQAWAETGGMGLAVRQAPLIIPLKATSTPVSIKQYPMSQEARLGIKPHIQRLLDQGILVPCQSPWNTPLLPVKKPGTNDYRPVQDLREVNKRVEDIHPTVPNPYNLLSGLPPSHQWYTVLDLKDAFFCLRLHPTSQPLFAFEWRDPEMGISGQLTWTRLPQGFKNSPTLFNEALHRDLADFRIQHPDLILLQYVDDLLLAATSELDCQQGTRALLQTLGNLGYRASAKKAQICQKQVKYLGYLLKEGQRWLTEARKETVMGQPTPKTPRQLREFLGTAGFCRLWIPGFAEMAAPLYPLTKPGTLFNWGPDQQKAYQEIKQALLTAPALGLPDLTKPFELFVDEKQGYAKGVLTQKLGPWRRPVAYLSKKLDPVAAGWPPCLRMVAAIAVLTKDAGKLTMGQPLVILAPHAVEALVKQPPDRWLSNARMTHYQALLLDTDRVQFGPVVALNPATLLPLPEEGLQHNCLDILAEAHGTRPDLTDQPLPDADHTWYTDGSSLLQEGQRKAGAAVTTETEVIWAKALPAGTSAQRAELIALTQALKMAEGKKLNVYTDSRYAFATAHIHGEIYRRRGWLTSEGKEIKNKDEILALLKALFLPKRLSIIHCPGHQKGHSAEARGNRMADQAARKAAITETPDTSTLLAGKRTADGSEFEKRTADGSEFESPKKKAKVE

SEQ ID NO: 2719 - protein, 2096 aa, synthetic construct
MPAAKRVKLDGGDKKYSIGLDIGTNSVGWAVITDEYKVPSKKFKVLGNTDRHSIKKNLIGALLFDSGETAEATRLKRTARRRYTRRKNRICYLQEIFSNEMAKVDDSFFHRLEESFLVEEDKKHERHPIFGNIVDEVAYHEKYPTIYHLRKKLVDSTDKADLRLIYLALAHMIKFRGHFLIEGDLNPDNSDVDKLFIQLVQTYNQLFEENPINASGVDAKAILSARLSKSRRLENLIAQLPGEKKNGLFGNLIALSLGLTPNFKSNFDLAEDAKLQLSKDTYDDDLDNLLAQIGDQYADLFLAAKNLSDAILLSDILRVNTEITKAPLSASMIKRYDEHHQDLTLLKALVRQQLPEKYKEIFFDQSKNGYAGYIDGGASQEEFYKFIKPILEKMDGTEELLVKLNREDLLRKQRTFDNGSIPHQIHLGELHAILRRQEDFYPFLKDNREKIEKILTFRIPYYVGPLARGNSRFAWMTRKSEETITPWNFEEVVDKGASAQSFIERMTNFDKNLPNEKVLPKHSLLYEYFTVYNELTKVKYVTEGMRKPAFLSGEQKKAIVDLLFKTNRKVTVKQLKEDYFKKIECFDSVEISGVEDRFNASLGTYHDLLKIIKDKDFLDNEENEDILEDIVLTLTLFEDREMIEERLKTYAHLFDDKVMKQLKRRRYTGWGRLSRKLINGIRDKQSGKTILDFLKSDGFANRNFMQLIHDDSLTFKEDIQKAQVSGQGDSLHEHIANLAGSPAIKKGILQTVKVVDELVKVMGRHKPENIVIEMARENQTTQKGQKNSRERMKRIEEGIKELGSQILKEHPVENTQLQNEKLYLYYLQNGRDMYVDQELDINRLSDYDVDHIVPQSFLKDDSIDNKVLTRSDKARGKSDNVPSEEVVKKMKNYWRQLLNAKLITQRKFDNLTKAERGGLSELDKAGFIKRQLVETRQITKHVAQILDSRMNTKYDENDKLIREVKVITLKSKLVSDFRKDFQFYKVREINNYHHAHDAYLNAVVGTALIKKYPKLESEFVYGDYKVYDVRKMIAKSEQEIGKATAKYFFYSNIMNFFKTEITLANGEIRKRPLIETNGETGEIVWDKGRDFATVRKVLSMPQVNIVKKTEVQTGGFSKESILPKRNSDKLIARKKDWDPKKYGGFDSPTVAYSVLVVAKVEKGKSKKLKSVKELLGITIMERSSFEKNPIDFLEAKGYKEVKKDLIIKLPKYSLFELENGRKRMLASAGELQKGNELALPSKYVNFLYLASHYEKLKGSPEDNEQKQLFVEQHKHYLDEIIEQISEFSKRVILADANLDKVLSAYNKHRDKPIREQAENIIHLFTLTNLGAPAAFKYFDTTIDRKRYTSTKEVLDATLIHQSITGLYETRIDLSQLGGDGGGGGEAAAKPAPGGTLNIEDEHRLHETSKEPDVSLGSTWLSDFPQAWAETGGMGLAVRQAPLIIPLKATSTPVSIKQYPMSQEARLGIKPHIQRLLDQGILVPCQSPWNTPLLPVKKPGTNDYRPVQDLREVNKRVEDIHPTVPNPYNLLSGLPPSHQWYTVLDLKDAFFCLRLHPTSQPLFAFEWRDPEMGISGQLTWTRLPQGFKNSPTLFNEALHRDLADFRIQHPDLILLQYVDDLLLAATSELDCQQGTRALLQTLGNLGYRASAKKAQICQKQVKYLGYLLKEGQRWLTEARKETVMGQPTPKTPRQLREFLGTAGFCRLWIPGFAEMAAPLYPLTKPGTLFNWGPDQQKAYQEIKQALLTAPALGLPDLTKPFELFVDEKQGYAKGVLTQKLGPWRRPVAYLSKKLDPVAAGWPPCLRMVAAIAVLTKDAGKLTMGQPLVILAPHAVEALVKQPPDRWLSNARMTHYQALLLDTDRVQFGPVVALNPATLLPLPEEGLQHNCLDILAEAHGTRPDLTDQPLPDADHTWYTDGSSLLQEGQRKAGAAVTTETEVIWAKALPAGTSAQRAELIALTQALKMAEGKKLNVYTDSRYAFATAHIHGEIYRRRGWLTSEGKEIKNKDEILALLKALFLPKRLSIIHCPGHQKGHSAEARGNRMADQAARKAAITETPDTSTLLAGKRTADGSEFEKRTADGSEFESPKKKAKVE

SEQ ID NO: 2720 - protein, 2105 aa, synthetic construct
MPAAKRVKLDGGDKKYSIGLDIGTNSVGWAVITDEYKVPSKKFKVLGNTDRHSIKKNLIGALLFDSGETAEATRLKRTARRRYTRRKNRICYLQEIFSNEMAKVDDSFFHRLEESFLVEEDKKHERHPIFGNIVDEVAYHEKYPTIYHLRKKLVDSTDKADLRLIYLALAHMIKFRGHFLIEGDLNPDNSDVDKLFIQLVQTYNQLFEENPINASGVDAKAILSARLSKSRRLENLIAQLPGEKKNGLFGNLIALSLGLTPNFKSNFDLAEDAKLQLSKDTYDDDLDNLLAQIGDQYADLFLAAKNLSDAILLSDILRVNTEITKAPLSASMIKRYDEHHQDLTLLKALVRQQLPEKYKEIFFDQSKNGYAGYIDGGASQEEFYKFIKPILEKMDGTEELLVKLNREDLLRKQRTFDNGSIPHQIHLGELHAILRRQEDFYPFLKDNREKIEKILTFRIPYYVGPLARGNSRFAWMTRKSEETITPWNFEEVVDKGASAQSFIERMTNFDKNLPNEKVLPKHSLLYEYFTVYNELTKVKYVTEGMRKPAFLSGEQKKAIVDLLFKTNRKVTVKQLKEDYFKKIECFDSVEISGVEDRFNASLGTYHDLLKIIKDKDFLDNEENEDILEDIVLTLTLFEDREMIEERLKTYAHLFDDKVMKQLKRRRYTGWGRLSRKLINGIRDKQSGKTILDFLKSDGFANRNFMQLIHDDSLTFKEDIQKAQVSGQGDSLHEHIANLAGSPAIKKGILQTVKVVDELVKVMGRHKPENIVIEMARENQTTQKGQKNSRERMKRIEEGIKELGSQILKEHPVENTQLQNEKLYLYYLQNGRDMYVDQELDINRLSDYDVDHIVPQSFLKDDSIDNKVLTRSDKARGKSDNVPSEEVVKKMKNYWRQLLNAKLITQRKFDNLTKAERGGLSELDKAGFIKRQLVETRQITKHVAQILDSRMNTKYDENDKLIREVKVITLKSKLVSDFRKDFQFYKVREINNYHHAHDAYLNAVVGTALIKKYPKLESEFVYGDYKVYDVRKMIAKSEQEIGKATAKYFFYSNIMNFFKTEITLANGEIRKRPLIETNGETGEIVWDKGRDFATVRKVLSMPQVNIVKKTEVQTGGFSKESILPKRNSDKLIARKKDWDPKKYGGFDSPTVAYSVLVVAKVEKGKSKKLKSVKELLGITIMERSSFEKNPIDFLEAKGYKEVKKDLIIKLPKYSLFELENGRKRMLASAGELQKGNELALPSKYVNFLYLASHYEKLKGSPEDNEQKQLFVEQHKHYLDEIIEQISEFSKRVILADANLDKVLSAYNKHRDKPIREQAENIIHLFTLTNLGAPAAFKYFDTTIDRKRYTSTKEVLDATLIHQSITGLYETRIDLSQLGGDGGEAAAKEAAAKEAAAKEAAAKGGTLNIEDEHRLHETSKEPDVSLGSTWLSDFPQAWAETGGMGLAVRQAPLIIPLKATSTPVSIKQYPMSQEARLGIKPHIQRLLDQGILVPCQSPWNTPLLPVKKPGTNDYRPVQDLREVNKRVEDIHPTVPNPYNLLSGLPPSHQWYTVLDLKDAFFCLRLHPTSQPLFAFEWRDPEMGISGQLTWTRLPQGFKNSPTLFNEALHRDLADFRIQHPDLILLQYVDDLLLAATSELDCQQGTRALLQTLGNLGYRASAKKAQICQKQVKYLGYLLKEGQRWLTEARKETVMGQPTPKTPRQLREFLGTAGFCRLWIPGFAEMAAPLYPLTKPGTLFNWGPDQQKAYQEIKQALLTAPALGLPDLTKPFELFVDEKQGYAKGVLTQKLGPWRRPVAYLSKKLDPVAAGWPPCLRMVAAIAVLTKDAGKLTMGQPLVILAPHAVEALVKQPPDRWLSNARMTHYQALLLDTDRVQFGPVVALNPATLLPLPEEGLQHNCLDILAEAHGTRPDLTDQPLPDADHTWYTDGSSLLQEGQRKAGAAVTTETEVIWAKALPAGTSAQRAELIALTQALKMAEGKKLNVYTDSRYAFATAHIHGEIYRRRGWLTSEGKEIKNKDEILALLKALFLPKRLSIIHCPGHQKGHSAEARGNRMADQAARKAAITETPDTSTLLAGKRTADGSEFEKRTADGSEFESPKKKAKVE

SEQ ID NO: 2721 - protein, 2096 aa, synthetic construct
MPAAKRVKLDGGDKKYSIGLDIGTNSVGWAVITDEYKVPSKKFKVLGNTDRHSIKKNLIGALLFDSGETAEATRLKRTARRRYTRRKNRICYLQEIFSNEMAKVDDSFFHRLEESFLVEEDKKHERHPIFGNIVDEVAYHEKYPTIYHLRKKLVDSTDKADLRLIYLALAHMIKFRGHFLIEGDLNPDNSDVDKLFIQLVQTYNQLFEENPINASGVDAKAILSARLSKSRRLENLIAQLPGEKKNGLFGNLIALSLGLTPNFKSNFDLAEDAKLQLSKDTYDDDLDNLLAQIGDQYADLFLAAKNLSDAILLSDILRVNTEITKAPLSASMIKRYDEHHQDLTLLKALVRQQLPEKYKEIFFDQSKNGYAGYIDGGASQEEFYKFIKPILEKMDGTEELLVKLNREDLLRKQRTFDNGSIPHQIHLGELHAILRRQEDFYPFLKDNREKIEKILTFRIPYYVGPLARGNSRFAWMTRKSEETITPWNFEEVVDKGASAQSFIERMTNFDKNLPNEKVLPKHSLLYEYFTVYNELTKVKYVTEGMRKPAFLSGEQKKAIVDLLFKTNRKVTVKQLKEDYFKKIECFDSVEISGVEDRFNASLGTYHDLLKIIKDKDFLDNEENEDILEDIVLTLTLFEDREMIEERLKTYAHLFDDKVMKQLKRRRYTGWGRLSRKLINGIRDKQSGKTILDFLKSDGFANRNFMQLIHDDSLTFKEDIQKAQVSGQGDSLHEHIANLAGSPAIKKGILQTVKVVDELVKVMGRHKPENIVIEMARENQTTQKGQKNSRERMKRIEEGIKELGSQILKEHPVENTQLQNEKLYLYYLQNGRDMYVDQELDINRLSDYDVDHIVPQSFLKDDSIDNKVLTRSDKARGKSDNVPSEEVVKKMKNYWRQLLNAKLITQRKFDNLTKAERGGLSELDKAGFIKRQLVETRQITKHVAQILDSRMNTKYDENDKLIREVKVITLKSKLVSDFRKDFQFYKVREINNYHHAHDAYLNAVVGTALIKKYPKLESEFVYGDYKVYDVRKMIAKSEQEIGKATAKYFFYSNIMNFFKTEITLANGEIRKRPLIETNGETGEIVWDKGRDFATVRKVLSMPQVNIVKKTEVQTGGFSKESILPKRNSDKLIARKKDWDPKKYGGFDSPTVAYSVLVVAKVEKGKSKKLKSVKELLGITIMERSSFEKNPIDFLEAKGYKEVKKDLIIKLPKYSLFELENGRKRMLASAGELQKGNELALPSKYVNFLYLASHYEKLKGSPEDNEQKQLFVEQHKHYLDEIIEQISEFSKRVILADANLDKVLSAYNKHRDKPIREQAENIIHLFTLTNLGAPAAFKYFDTTIDRKRYTSTKEVLDATLIHQSITGLYETRIDLSQLGGDGGGGGEAAAKGGSGGTLNIEDEHRLHETSKEPDVSLGSTWLSDFPQAWAETGGMGLAVRQAPLIIPLKATSTPVSIKQYPMSQEARLGIKPHIQRLLDQGILVPCQSPWNTPLLPVKKPGTNDYRPVQDLREVNKRVEDIHPTVPNPYNLLSGLPPSHQWYTVLDLKDAFFCLRLHPTSQPLFAFEWRDPEMGISGQLTWTRLPQGFKNSPTLFNEALHRDLADFRIQHPDLILLQYVDDLLLAATSELDCQQGTRALLQTLGNLGYRASAKKAQICQKQVKYLGYLLKEGQRWLTEARKETVMGQPTPKTPRQLREFLGTAGFCRLWIPGFAEMAAPLYPLTKPGTLFNWGPDQQKAYQEIKQALLTAPALGLPDLTKPFELFVDEKQGYAKGVLTQKLGPWRRPVAYLSKKLDPVAAGWPPCLRMVAAIAVLTKDAGKLTMGQPLVILAPHAVEALVKQPPDRWLSNARMTHYQALLLDTDRVQFGPVVALNPATLLPLPEEGLQHNCLDILAEAHGTRPDLTDQPLPDADHTWYTDGSSLLQEGQRKAGAAVTTETEVIWAKALPAGTSAQRAELIALTQALKMAEGKKLNVYTDSRYAFATAHIHGEIYRRRGWLTSEGKEIKNKDEILALLKALFLPKRLSIIHCPGHQKGHSAEARGNRMADQAARKAAITETPDTSTLLAGKRTADGSEFEKRTADGSEFESPKKKAKVE

SEQ ID NO: 2722 - protein, 2096 aa, synthetic construct
MPAAKRVKLDGGDKKYSIGLDIGTNSVGWAVITDEYKVPSKKFKVLGNTDRHSIKKNLIGALLFDSGETAEATRLKRTARRRYTRRKNRICYLQEIFSNEMAKVDDSFFHRLEESFLVEEDKKHERHPIFGNIVDEVAYHEKYPTIYHLRKKLVDSTDKADLRLIYLALAHMIKFRGHFLIEGDLNPDNSDVDKLFIQLVQTYNQLFEENPINASGVDAKAILSARLSKSRRLENLIAQLPGEKKNGLFGNLIALSLGLTPNFKSNFDLAEDAKLQLSKDTYDDDLDNLLAQIGDQYADLFLAAKNLSDAILLSDILRVNTEITKAPLSASMIKRYDEHHQDLTLLKALVRQQLPEKYKEIFFDQSKNGYAGYIDGGASQEEFYKFIKPILEKMDGTEELLVKLNREDLLRKQRTFDNGSIPHQIHLGELHAILRRQEDFYPFLKDNREKIEKILTFRIPYYVGPLARGNSRFAWMTRKSEETITPWNFEEVVDKGASAQSFIERMTNFDKNLPNEKVLPKHSLLYEYFTVYNELTKVKYVTEGMRKPAFLSGEQKKAIVDLLFKTNRKVTVKQLKEDYFKKIECFDSVEISGVEDRFNASLGTYHDLLKIIKDKDFLDNEENEDILEDIVLTLTLFEDREMIEERLKTYAHLFDDKVMKQLKRRRYTGWGRLSRKLINGIRDKQSGKTILDFLKSDGFANRNFMQLIHDDSLTFKEDIQKAQVSGQGDSLHEHIANLAGSPAIKKGILQTVKVVDELVKVMGRHKPENIVIEMARENQTTQKGQKNSRERMKRIEEGIKELGSQILKEHPVENTQLQNEKLYLYYLQNGRDMYVDQELDINRLSDYDVDHIVPQSFLKDDSIDNKVLTRSDKARGKSDNVPSEEVVKKMKNYWRQLLNAKLITQRKFDNLTKAERGGLSELDKAGFIKRQLVETRQITKHVAQILDSRMNTKYDENDKLIREVKVITLKSKLVSDFRKDFQFYKVREINNYHHAHDAYLNAVVGTALIKKYPKLESEFVYGDYKVYDVRKMIAKSEQEIGKATAKYFFYSNIMNFFKTEITLANGEIRKRPLIETNGETGEIVWDKGRDFATVRKVLSMPQVNIVKKTEVQTGGFSKESILPKRNSDKLIARKKDWDPKKYGGFDSPTVAYSVLVVAKVEKGKSKKLKSVKELLGITIMERSSFEKNPIDFLEAKGYKEVKKDLIIKLPKYSLFELENGRKRMLASAGELQKGNELALPSKYVNFLYLASHYEKLKGSPEDNEQKQLFVEQHKHYLDEIIEQISEFSKRVILADANLDKVLSAYNKHRDKPIREQAENIIHLFTLTNLGAPAAFKYFDTTIDRKRYTSTKEVLDATLIHQSITGLYETRIDLSQLGGDGGGGGGGSEAAAKGGTLNIEDEHRLHETSKEPDVSLGSTWLSDFPQAWAETGGMGLAVRQAPLIIPLKATSTPVSIKQYPMSQEARLGIKPHIQRLLDQGILVPCQSPWNTPLLPVKKPGTNDYRPVQDLREVNKRVEDIHPTVPNPYNLLSGLPPSHQWYTVLDLKDAFFCLRLHPTSQPLFAFEWRDPEMGISGQLTWTRLPQGFKNSPTLFNEALHRDLADFRIQHPDLILLQYVDDLLLAATSELDCQQGTRALLQTLGNLGYRASAKKAQICQKQVKYLGYLLKEGQRWLTEARKETVMGQPTPKTPRQLREFLGTAGFCRLWIPGFAEMAAPLYPLTKPGTLFNWGPDQQKAYQEIKQALLTAPALGLPDLTKPFELFVDEKQGYAKGVLTQKLGPWRRPVAYLSKKLDPVAAGWPPCLRMVAAIAVLTKDAGKLTMGQPLVILAPHAVEALVKQPPDRWLSNARMTHYQALLLDTDRVQFGPVVALNPATLLPLPEEGLQHNCLDILAEAHGTRPDLTDQPLPDADHTWYTDGSSLLQEGQRKAGAAVTTETEVIWAKALPAGTSAQRAELIALTQALKMAEGKKLNVYTDSRYAFATAHIHGEIYRRRGWLTSEGKEIKNKDEILALLKALFLPKRLSIIHCPGHQKGHSAEARGNRMADQAARKAAITETPDTSTLLAGKRTADGSEFEKRTADGSEFESPKKKAKVE

SEQ ID NO: 2723 - protein, 2096 aa, synthetic construct
MPAAKRVKLDGGDKKYSIGLDIGTNSVGWAVITDEYKVPSKKFKVLGNTDRHSIKKNLIGALLFDSGETAEATRLKRTARRRYTRRKNRICYLQEIFSNEMAKVDDSFFHRLEESFLVEEDKKHERHPIFGNIVDEVAYHEKYPTIYHLRKKLVDSTDKADLRLIYLALAHMIKFRGHFLIEGDLNPDNSDVDKLFIQLVQTYNQLFEENPINASGVDAKAILSARLSKSRRLENLIAQLPGEKKNGLFGNLIALSLGLTPNFKSNFDLAEDAKLQLSKDTYDDDLDNLLAQIGDQYADLFLAAKNLSDAILLSDILRVNTEITKAPLSASMIKRYDEHHQDLTLLKALVRQQLPEKYKEIFFDQSKNGYAGYIDGGASQEEFYKFIKPILEKMDGTEELLVKLNREDLLRKQRTFDNGSIPHQIHLGELHAILRRQEDFYPFLKDNREKIEKILTFRIPYYVGPLARGNSRFAWMTRKSEETITPWNFEEVVDKGASAQSFIERMTNFDKNLPNEKVLPKHSLLYEYFTVYNELTKVKYVTEGMRKPAFLSGEQKKAIVDLLFKTNRKVTVKQLKEDYFKKIECFDSVEISGVEDRFNASLGTYHDLLKIIKDKDFLDNEENEDILEDIVLTLTLFEDREMIEERLKTYAHLFDDKVMKQLKRRRYTGWGRLSRKLINGIRDKQSGKTILDFLKSDGFANRNFMQLIHDDSLTFKEDIQKAQVSGQGDSLHEHIANLAGSPAIKKGILQTVKVVDELVKVMGRHKPENIVIEMARENQTTQKGQKNSRERMKRIEEGIKELGSQILKEHPVENTQLQNEKLYLYYLQNGRDMYVDQELDINRLSDYDVDHIVPQSFLKDDSIDNKVLTRSDKARGKSDNVPSEEVVKKMKNYWRQLLNAKLITQRKFDNLTKAERGGLSELDKAGFIKRQLVETRQITKHVAQILDSRMNTKYDENDKLIREVKVITLKSKLVSDFRKDFQFYKVREINNYHHAHDAYLNAVVGTALIKKYPKLESEFVYGDYKVYDVRKMIAKSEQEIGKATAKYFFYSNIMNFFKTEITLANGEIRKRPLIETNGETGEIVWDKGRDFATVRKVLSMPQVNIVKKTEVQTGGFSKESILPKRNSDKLIARKKDWDPKKYGGFDSPTVAYSVLVVAKVEKGKSKKLKSVKELLGITIMERSSFEKNPIDFLEAKGYKEVKKDLIIKLPKYSLFELENGRKRMLASAGELQKGNELALPSKYVNFLYLASHYEKLKGSPEDNEQKQLFVEQHKHYLDEIIEQISEFSKRVILADANLDKVLSAYNKHRDKPIREQAENIIHLFTLTNLGAPAAFKYFDTTIDRKRYTSTKEVLDATLIHQSITGLYETRIDLSQLGGDGGEAAAKGSSPAPGGTLNIEDEHRLHETSKEPDVSLGSTWLSDFPQAWAETGGMGLAVRQAPLIIPLKATSTPVSIKQYPMSQEARLGIKPHIQRLLDQGILVPCQSPWNTPLLPVKKPGTNDYRPVQDLREVNKRVEDIHPTVPNPYNLLSGLPPSHQWYTVLDLKDAFFCLRLHPTSQPLFAFEWRDPEMGISGQLTWTRLPQGFKNSPTLFNEALHRDLADFRIQHPDLILLQYVDDLLLAATSELDCQQGTRALLQTLGNLGYRASAKKAQICQKQVKYLGYLLKEGQRWLTEARKETVMGQPTPKTPRQLREFLGTAGFCRLWIPGFAEMAAPLYPLTKPGTLFNWGPDQQKAYQEIKQALLTAPALGLPDLTKPFELFVDEKQGYAKGVLTQKLGPWRRPVAYLSKKLDPVAAGWPPCLRMVAAIAVLTKDAGKLTMGQPLVILAPHAVEALVKQPPDRWLSNARMTHYQALLLDTDRVQFGPVVALNPATLLPLPEEGLQHNCLDILAEAHGTRPDLTDQPLPDADHTWYTDGSSLLQEGQRKAGAAVTTETEVIWAKALPAGTSAQRAELIALTQALKMAEGKKLNVYTDSRYAFATAHIHGEIYRRRGWLTSEGKEIKNKDEILALLKALFLPKRLSIIHCPGHQKGHSAEARGNRMADQAARKAAITETPDTSTLLAGKRTADGSEFEKRTADGSEFESPKKKAKVE

SEQ ID NO: 2724 - protein, 2093 aa, synthetic construct
MPAAKRVKLDGGDKKYSIGLDIGTNSVGWAVITDEYKVPSKKFKVLGNTDRHSIKKNLIGALLFDSGETAEATRLKRTARRRYTRRKNRICYLQEIFSNEMAKVDDSFFHRLEESFLVEEDKKHERHPIFGNIVDEVAYHEKYPTIYHLRKKLVDSTDKADLRLIYLALAHMIKFRGHFLIEGDLNPDNSDVDKLFIQLVQTYNQLFEENPINASGVDAKAILSARLSKSRRLENLIAQLPGEKKNGLFGNLIALSLGLTPNFKSNFDLAEDAKLQLSKDTYDDDLDNLLAQIGDQYADLFLAAKNLSDAILLSDILRVNTEITKAPLSASMIKRYDEHHQDLTLLKALVRQQLPEKYKEIFFDQSKNGYAGYIDGGASQEEFYKFIKPILEKMDGTEELLVKLNREDLLRKQRTFDNGSIPHQIHLGELHAILRRQEDFYPFLKDNREKIEKILTFRIPYYVGPLARGNSRFAWMTRKSEETITPWNFEEVVDKGASAQSFIERMTNFDKNLPNEKVLPKHSLLYEYFTVYNELTKVKYVTEGMRKPAFLSGEQKKAIVDLLFKTNRKVTVKQLKEDYFKKIECFDSVEISGVEDRFNASLGTYHDLLKIIKDKDFLDNEENEDILEDIVLTLTLFEDREMIEERLKTYAHLFDDKVMKQLKRRRYTGWGRLSRKLINGIRDKQSGKTILDFLKSDGFANRNFMQLIHDDSLTFKEDIQKAQVSGQGDSLHEHIANLAGSPAIKKGILQTVKVVDELVKVMGRHKPENIVIEMARENQTTQKGQKNSRERMKRIEEGIKELGSQILKEHPVENTQLQNEKLYLYYLQNGRDMYVDQELDINRLSDYDVDHIVPQSFLKDDSIDNKVLTRSDKARGKSDNVPSEEVVKKMKNYWRQLLNAKLITQRKFDNLTKAERGGLSELDKAGFIKRQLVETRQITKHVAQILDSRMNTKYDENDKLIREVKVITLKSKLVSDFRKDFQFYKVREINNYHHAHDAYLNAVVGTALIKKYPKLESEFVYGDYKVYDVRKMIAKSEQEIGKATAKYFFYSNIMNFFKTEITLANGEIRKRPLIETNGETGEIVWDKGRDFATVRKVLSMPQVNIVKKTEVQTGGFSKESILPKRNSDKLIARKKDWDPKKYGGFDSPTVAYSVLVVAKVEKGKSKKLKSVKELLGITIMERSSFEKNPIDFLEAKGYKEVKKDLIIKLPKYSLFELENGRKRMLASAGELQKGNELALPSKYVNFLYLASHYEKLKGSPEDNEQKQLFVEQHKHYLDEIIEQISEFSKRVILADANLDKVLSAYNKHRDKPIREQAENIIHLFTLTNLGAPAAFKYFDTTIDRKRYTSTKEVLDATLIHQSITGLYETRIDLSQLGGDGGEAAAKPAPGGTLNIEDEHRLHETSKEPDVSLGSTWLSDFPQAWAETGGMGLAVRQAPLIIPLKATSTPVSIKQYPMSQEARLGIKPHIQRLLDQGILVPCQSPWNTPLLPVKKPGTNDYRPVQDLREVNKRVEDIHPTVPNPYNLLSGLPPSHQWYTVLDLKDAFFCLRLHPTSQPLFAFEWRDPEMGISGQLTWTRLPQGFKNSPTLFNEALHRDLADFRIQHPDLILLQYVDDLLLAATSELDCQQGTRALLQTLGNLGYRASAKKAQICQKQVKYLGYLLKEGQRWLTEARKETVMGQPTPKTPRQLREFLGTAGFCRLWIPGFAEMAAPLYPLTKPGTLFNWGPDQQKAYQEIKQALLTAPALGLPDLTKPFELFVDEKQGYAKGVLTQKLGPWRRPVAYLSKKLDPVAAGWPPCLRMVAAIAVLTKDAGKLTMGQPLVILAPHAVEALVKQPPDRWLSNARMTHYQALLLDTDRVQFGPVVALNPATLLPLPEEGLQHNCLDILAEAHGTRPDLTDQPLPDADHTWYTDGSSLLQEGQRKAGAAVTTETEVIWAKALPAGTSAQRAELIALTQALKMAEGKKLNVYTDSRYAFATAHIHGEIYRRRGWLTSEGKEIKNKDEILALLKALFLPKRLSIIHCPGHQKGHSAEARGNRMADQAARKAAITETPDTSTLLAGKRTADGSEFEKRTADGSEFESPKKKAKVE

SEQ ID NO: 2725 - protein, 2100 aa, synthetic construct
MPAAKRVKLDGGDKKYSIGLDIGTNSVGWAVITDEYKVPSKKFKVLGNTDRHSIKKNLIGALLFDSGETAEATRLKRTARRRYTRRKNRICYLQEIFSNEMAKVDDSFFHRLEESFLVEEDKKHERHPIFGNIVDEVAYHEKYPTIYHLRKKLVDSTDKADLRLIYLALAHMIKFRGHFLIEGDLNPDNSDVDKLFIQLVQTYNQLFEENPINASGVDAKAILSARLSKSRRLENLIAQLPGEKKNGLFGNLIALSLGLTPNFKSNFDLAEDAKLQLSKDTYDDDLDNLLAQIGDQYADLFLAAKNLSDAILLSDILRVNTEITKAPLSASMIKRYDEHHQDLTLLKALVRQQLPEKYKEIFFDQSKNGYAGYIDGGASQEEFYKFIKPILEKMDGTEELLVKLNREDLLRKQRTFDNGSIPHQIHLGELHAILRRQEDFYPFLKDNREKIEKILTFRIPYYVGPLARGNSRFAWMTRKSEETITPWNFEEVVDKGASAQSFIERMTNFDKNLPNEKVLPKHSLLYEYFTVYNELTKVKYVTEGMRKPAFLSGEQKKAIVDLLFKTNRKVTVKQLKEDYFKKIECFDSVEISGVEDRFNASLGTYHDLLKIIKDKDFLDNEENEDILEDIVLTLTLFEDREMIEERLKTYAHLFDDKVMKQLKRRRYTGWGRLSRKLINGIRDKQSGKTILDFLKSDGFANRNFMQLIHDDSLTFKEDIQKAQVSGQGDSLHEHIANLAGSPAIKKGILQTVKVVDELVKVMGRHKPENIVIEMARENQTTQKGQKNSRERMKRIEEGIKELGSQILKEHPVENTQLQNEKLYLYYLQNGRDMYVDQELDINRLSDYDVDHIVPQSFLKDDSIDNKVLTRSDKARGKSDNVPSEEVVKKMKNYWRQLLNAKLITQRKFDNLTKAERGGLSELDKAGFIKRQLVETRQITKHVAQILDSRMNTKYDENDKLIREVKVITLKSKLVSDFRKDFQFYKVREINNYHHAHDAYLNAVVGTALIKKYPKLESEFVYGDYKVYDVRKMIAKSEQEIGKATAKYFFYSNIMNFFKTEITLANGEIRKRPLIETNGETGEIVWDKGRDFATVRKVLSMPQVNIVKKTEVQTGGFSKESILPKRNSDKLIARKKDWDPKKYGGFDSPTVAYSVLVVAKVEKGKSKKLKSVKELLGITIMERSSFEKNPIDFLEAKGYKEVKKDLIIKLPKYSLFELENGRKRMLASAGELQKGNELALPSKYVNFLYLASHYEKLKGSPEDNEQKQLFVEQHKHYLDEIIEQISEFSKRVILADANLDKVLSAYNKHRDKPIREQAENIIHLFTLTNLGAPAAFKYFDTTIDRKRYTSTKEVLDATLIHQSITGLYETRIDLSQLGGDGGGGGGSEAAAKGGGGSGGTLNIEDEHRLHETSKEPDVSLGSTWLSDFPQAWAETGGMGLAVRQAPLIIPLKATSTPVSIKQYPMSQEARLGIKPHIQRLLDQGILVPCQSPWNTPLLPVKKPGTNDYRPVQDLREVNKRVEDIHPTVPNPYNLLSGLPPSHQWYTVLDLKDAFFCLRLHPTSQPLFAFEWRDPEMGISGQLTWTRLPQGFKNSPTLFNEALHRDLADFRIQHPDLILLQYVDDLLLAATSELDCQQGTRALLQTLGNLGYRASAKKAQICQKQVKYLGYLLKEGQRWLTEARKETVMGQPTPKTPRQLREFLGTAGFCRLWIPGFAEMAAPLYPLTKPGTLFNWGPDQQKAYQEIKQALLTAPALGLPDLTKPFELFVDEKQGYAKGVLTQKLGPWRRPVAYLSKKLDPVAAGWPPCLRMVAAIAVLTKDAGKLTMGQPLVILAPHAVEALVKQPPDRWLSNARMTHYQALLLDTDRVQFGPVVALNPATLLPLPEEGLQHNCLDILAEAHGTRPDLTDQPLPDADHTWYTDGSSLLQEGQRKAGAAVTTETEVIWAKALPAGTSAQRAELIALTQALKMAEGKKLNVYTDSRYAFATAHIHGEIYRRRGWLTSEGKEIKNKDEILALLKALFLPKRLSIIHCPGHQKGHSAEARGNRMADQAARKAAITETPDTSTLLAGKRTADGSEFEKRTADGSEFESPKKKAKVE

SEQ ID NO: 2726 - protein, 2093 aa, synthetic construct
MPAAKRVKLDGGDKKYSIGLDIGTNSVGWAVITDEYKVPSKKFKVLGNTDRHSIKKNLIGALLFDSGETAEATRLKRTARRRYTRRKNRICYLQEIFSNEMAKVDDSFFHRLEESFLVEEDKKHERHPIFGNIVDEVAYHEKYPTIYHLRKKLVDSTDKADLRLIYLALAHMIKFRGHFLIEGDLNPDNSDVDKLFIQLVQTYNQLFEENPINASGVDAKAILSARLSKSRRLENLIAQLPGEKKNGLFGNLIALSLGLTPNFKSNFDLAEDAKLQLSKDTYDDDLDNLLAQIGDQYADLFLAAKNLSDAILLSDILRVNTEITKAPLSASMIKRYDEHHQDLTLLKALVRQQLPEKYKEIFFDQSKNGYAGYIDGGASQEEFYKFIKPILEKMDGTEELLVKLNREDLLRKQRTFDNGSIPHQIHLGELHAILRRQEDFYPFLKDNREKIEKILTFRIPYYVGPLARGNSRFAWMTRKSEETITPWNFEEVVDKGASAQSFIERMTNFDKNLPNEKVLPKHSLLYEYFTVYNELTKVKYVTEGMRKPAFLSGEQKKAIVDLLFKTNRKVTVKQLKEDYFKKIECFDSVEISGVEDRFNASLGTYHDLLKIIKDKDFLDNEENEDILEDIVLTLTLFEDREMIEERLKTYAHLFDDKVMKQLKRRRYTGWGRLSRKLINGIRDKQSGKTILDFLKSDGFANRNFMQLIHDDSLTFKEDIQKAQVSGQGDSLHEHIANLAGSPAIKKGILQTVKVVDELVKVMGRHKPENIVIEMARENQTTQKGQKNSRERMKRIEEGIKELGSQILKEHPVENTQLQNEKLYLYYLQNGRDMYVDQELDINRLSDYDVDHIVPQSFLKDDSIDNKVLTRSDKARGKSDNVPSEEVVKKMKNYWRQLLNAKLITQRKFDNLTKAERGGLSELDKAGFIKRQLVETRQITKHVAQILDSRMNTKYDENDKLIREVKVITLKSKLVSDFRKDFQFYKVREINNYHHAHDAYLNAVVGTALIKKYPKLESEFVYGDYKVYDVRKMIAKSEQEIGKATAKYFFYSNIMNFFKTEITLANGEIRKRPLIETNGETGEIVWDKGRDFATVRKVLSMPQVNIVKKTEVQTGGFSKESILPKRNSDKLIARKKDWDPKKYGGFDSPTVAYSVLVVAKVEKGKSKKLKSVKELLGITIMERSSFEKNPIDFLEAKGYKEVKKDLIIKLPKYSLFELENGRKRMLASAGELQKGNELALPSKYVNFLYLASHYEKLKGSPEDNEQKQLFVEQHKHYLDEIIEQISEFSKRVILADANLDKVLSAYNKHRDKPIREQAENIIHLFTLTNLGAPAAFKYFDTTIDRKRYTSTKEVLDATLIHQSITGLYETRIDLSQLGGDGGEAAAKGGSGGTLNIEDEHRLHETSKEPDVSLGSTWLSDFPQAWAETGGMGLAVRQAPLIIPLKATSTPVSIKQYPMSQEARLGIKPHIQRLLDQGILVPCQSPWNTPLLPVKKPGTNDYRPVQDLREVNKRVEDIHPTVPNPYNLLSGLPPSHQWYTVLDLKDAFFCLRLHPTSQPLFAFEWRDPEMGISGQLTWTRLPQGFKNSPTLFNEALHRDLADFRIQHPDLILLQYVDDLLLAATSELDCQQGTRALLQTLGNLGYRASAKKAQICQKQVKYLGYLLKEGQRWLTEARKETVMGQPTPKTPRQLREFLGTAGFCRLWIPGFAEMAAPLYPLTKPGTLFNWGPDQQKAYQEIKQALLTAPALGLPDLTKPFELFVDEKQGYAKGVLTQKLGPWRRPVAYLSKKLDPVAAGWPPCLRMVAAIAVLTKDAGKLTMGQPLVILAPHAVEALVKQPPDRWLSNARMTHYQALLLDTDRVQFGPVVALNPATLLPLPEEGLQHNCLDILAEAHGTRPDLTDQPLPDADHTWYTDGSSLLQEGQRKAGAAVTTETEVIWAKALPAGTSAQRAELIALTQALKMAEGKKLNVYTDSRYAFATAHIHGEIYRRRGWLTSEGKEIKNKDEILALLKALFLPKRLSIIHCPGHQKGHSAEARGNRMADQAARKAAITETPDTSTLLAGKRTADGSEFEKRTADGSEFESPKKKAKVE

SEQ ID NO: 2727 - protein, 2096 aa, synthetic construct
MPAAKRVKLDGGDKKYSIGLDIGTNSVGWAVITDEYKVPSKKFKVLGNTDRHSIKKNLIGALLFDSGETAEATRLKRTARRRYTRRKNRICYLQEIFSNEMAKVDDSFFHRLEESFLVEEDKKHERHPIFGNIVDEVAYHEKYPTIYHLRKKLVDSTDKADLRLIYLALAHMIKFRGHFLIEGDLNPDNSDVDKLFIQLVQTYNQLFEENPINASGVDAKAILSARLSKSRRLENLIAQLPGEKKNGLFGNLIALSLGLTPNFKSNFDLAEDAKLQLSKDTYDDDLDNLLAQIGDQYADLFLAAKNLSDAILLSDILRVNTEITKAPLSASMIKRYDEHHQDLTLLKALVRQQLPEKYKEIFFDQSKNGYAGYIDGGASQEEFYKFIKPILEKMDGTEELLVKLNREDLLRKQRTFDNGSIPHQIHLGELHAILRRQEDFYPFLKDNREKIEKILTFRIPYYVGPLARGNSRFAWMTRKSEETITPWNFEEVVDKGASAQSFIERMTNFDKNLPNEKVLPKHSLLYEYFTVYNELTKVKYVTEGMRKPAFLSGEQKKAIVDLLFKTNRKVTVKQLKEDYFKKIECFDSVEISGVEDRFNASLGTYHDLLKIIKDKDFLDNEENEDILEDIVLTLTLFEDREMIEERLKTYAHLFDDKVMKQLKRRRYTGWGRLSRKLINGIRDKQSGKTILDFLKSDGFANRNFMQLIHDDSLTFKEDIQKAQVSGQGDSLHEHIANLAGSPAIKKGILQTVKVVDELVKVMGRHKPENIVIEMARENQTTQKGQKNSRERMKRIEEGIKELGSQILKEHPVENTQLQNEKLYLYYLQNGRDMYVDQELDINRLSDYDVDHIVPQSFLKDDSIDNKVLTRSDKARGKSDNVPSEEVVKKMKNYWRQLLNAKLITQRKFDNLTKAERGGLSELDKAGFIKRQLVETRQITKHVAQILDSRMNTKYDENDKLIREVKVITLKSKLVSDFRKDFQFYKVREINNYHHAHDAYLNAVVGTALIKKYPKLESEFVYGDYKVYDVRKMIAKSEQEIGKATAKYFFYSNIMNFFKTEITLANGEIRKRPLIETNGETGEIVWDKGRDFATVRKVLSMPQVNIVKKTEVQTGGFSKESILPKRNSDKLIARKKDWDPKKYGGFDSPTVAYSVLVVAKVEKGKSKKLKSVKELLGITIMERSSFEKNPIDFLEAKGYKEVKKDLIIKLPKYSLFELENGRKRMLASAGELQKGNELALPSKYVNFLYLASHYEKLKGSPEDNEQKQLFVEQHKHYLDEIIEQISEFSKRVILADANLDKVLSAYNKHRDKPIREQAENIIHLFTLTNLGAPAAFKYFDTTIDRKRYTSTKEVLDATLIHQSITGLYETRIDLSQLGGDGGEAAAKGGSGSSGGTLNIEDEHRLHETSKEPDVSLGSTWLSDFPQAWAETGGMGLAVRQAPLIIPLKATSTPVSIKQYPMSQEARLGIKPHIQRLLDQGILVPCQSPWNTPLLPVKKPGTNDYRPVQDLREVNKRVEDIHPTVPNPYNLLSGLPPSHQWYTVLDLKDAFFCLRLHPTSQPLFAFEWRDPEMGISGQLTWTRLPQGFKNSPTLFNEALHRDLADFRIQHPDLILLQYVDDLLLAATSELDCQQGTRALLQTLGNLGYRASAKKAQICQKQVKYLGYLLKEGQRWLTEARKETVMGQPTPKTPRQLREFLGTAGFCRLWIPGFAEMAAPLYPLTKPGTLFNWGPDQQKAYQEIKQALLTAPALGLPDLTKPFELFVDEKQGYAKGVLTQKLGPWRRPVAYLSKKLDPVAAGWPPCLRMVAAIAVLTKDAGKLTMGQPLVILAPHAVEALVKQPPDRWLSNARMTHYQALLLDTDRVQFGPVVALNPATLLPLPEEGLQHNCLDILAEAHGTRPDLTDQPLPDADHTWYTDGSSLLQEGQRKAGAAVTTETEVIWAKALPAGTSAQRAELIALTQALKMAEGKKLNVYTDSRYAFATAHIHGEIYRRRGWLTSEGKEIKNKDEILALLKALFLPKRLSIIHCPGHQKGHSAEARGNRMADQAARKAAITETPDTSTLLAGKRTADGSEFEKRTADGSEFESPKKKAKVE

SEQ ID NO: 2728 - protein, 2097 aa, synthetic construct
MPAAKRVKLDGGDKKYSIGLDIGTNSVGWAVITDEYKVPSKKFKVLGNTDRHSIKKNLIGALLFDSGETAEATRLKRTARRRYTRRKNRICYLQEIFSNEMAKVDDSFFHRLEESFLVEEDKKHERHPIFGNIVDEVAYHEKYPTIYHLRKKLVDSTDKADLRLIYLALAHMIKFRGHFLIEGDLNPDNSDVDKLFIQLVQTYNQLFEENPINASGVDAKAILSARLSKSRRLENLIAQLPGEKKNGLFGNLIALSLGLTPNFKSNFDLAEDAKLQLSKDTYDDDLDNLLAQIGDQYADLFLAAKNLSDAILLSDILRVNTEITKAPLSASMIKRYDEHHQDLTLLKALVRQQLPEKYKEIFFDQSKNGYAGYIDGGASQEEFYKFIKPILEKMDGTEELLVKLNREDLLRKQRTFDNGSIPHQIHLGELHAILRRQEDFYPFLKDNREKIEKILTFRIPYYVGPLARGNSRFAWMTRKSEETITPWNFEEVVDKGASAQSFIERMTNFDKNLPNEKVLPKHSLLYEYFTVYNELTKVKYVTEGMRKPAFLSGEQKKAIVDLLFKTNRKVTVKQLKEDYFKKIECFDSVEISGVEDRFNASLGTYHDLLKIIKDKDFLDNEENEDILEDIVLTLTLFEDREMIEERLKTYAHLFDDKVMKQLKRRRYTGWGRLSRKLINGIRDKQSGKTILDFLKSDGFANRNFMQLIHDDSLTFKEDIQKAQVSGQGDSLHEHIANLAGSPAIKKGILQTVKVVDELVKVMGRHKPENIVIEMARENQTTQKGQKNSRERMKRIEEGIKELGSQILKEHPVENTQLQNEKLYLYYLQNGRDMYVDQELDINRLSDYDVDHIVPQSFLKDDSIDNKVLTRSDKARGKSDNVPSEEVVKKMKNYWRQLLNAKLITQRKFDNLTKAERGGLSELDKAGFIKRQLVETRQITKHVAQILDSRMNTKYDENDKLIREVKVITLKSKLVSDFRKDFQFYKVREINNYHHAHDAYLNAVVGTALIKKYPKLESEFVYGDYKVYDVRKMIAKSEQEIGKATAKYFFYSNIMNFFKTEITLANGEIRKRPLIETNGETGEIVWDKGRDFATVRKVLSMPQVNIVKKTEVQTGGFSKESILPKRNSDKLIARKKDWDPKKYGGFDSPTVAYSVLVVAKVEKGKSKKLKSVKELLGITIMERSSFEKNPIDFLEAKGYKEVKKDLIIKLPKYSLFELENGRKRMLASAGELQKGNELALPSKYVNFLYLASHYEKLKGSPEDNEQKQLFVEQHKHYLDEIIEQISEFSKRVILADANLDKVLSAYNKHRDKPIREQAENIIHLFTLTNLGAPAAFKYFDTTIDRKRYTSTKEVLDATLIHQSITGLYETRIDLSQLGGDGGGSSGSSGSSGSSGGTLNIEDEHRLHETSKEPDVSLGSTWLSDFPQAWAETGGMGLAVRQAPLIIPLKATSTPVSIKQYPMSQEARLGIKPHIQRLLDQGILVPCQSPWNTPLLPVKKPGTNDYRPVQDLREVNKRVEDIHPTVPNPYNLLSGLPPSHQWYTVLDLKDAFFCLRLHPTSQPLFAFEWRDPEMGISGQLTWTRLPQGFKNSPTLFNEALHRDLADFRIQHPDLILLQYVDDLLLAATSELDCQQGTRALLQTLGNLGYRASAKKAQICQKQVKYLGYLLKEGQRWLTEARKETVMGQPTPKTPRQLREFLGTAGFCRLWIPGFAEMAAPLYPLTKPGTLFNWGPDQQKAYQEIKQALLTAPALGLPDLTKPFELFVDEKQGYAKGVLTQKLGPWRRPVAYLSKKLDPVAAGWPPCLRMVAAIAVLTKDAGKLTMGQPLVILAPHAVEALVKQPPDRWLSNARMTHYQALLLDTDRVQFGPVVALNPATLLPLPEEGLQHNCLDILAEAHGTRPDLTDQPLPDADHTWYTDGSSLLQEGQRKAGAAVTTETEVIWAKALPAGTSAQRAELIALTQALKMAEGKKLNVYTDSRYAFATAHIHGEIYRRRGWLTSEGKEIKNKDEILALLKALFLPKRLSIIHCPGHQKGHSAEARGNRMADQAARKAAITETPDTSTLLAGKRTADGSEFEKRTADGSEFESPKKKAKVE

SEQ ID NO: 2729 - protein, 2095 aa, synthetic construct
MPAAKRVKLDGGDKKYSIGLDIGTNSVGWAVITDEYKVPSKKFKVLGNTDRHSIKKNLIGALLFDSGETAEATRLKRTARRRYTRRKNRICYLQEIFSNEMAKVDDSFFHRLEESFLVEEDKKHERHPIFGNIVDEVAYHEKYPTIYHLRKKLVDSTDKADLRLIYLALAHMIKFRGHFLIEGDLNPDNSDVDKLFIQLVQTYNQLFEENPINASGVDAKAILSARLSKSRRLENLIAQLPGEKKNGLFGNLIALSLGLTPNFKSNFDLAEDAKLQLSKDTYDDDLDNLLAQIGDQYADLFLAAKNLSDAILLSDILRVNTEITKAPLSASMIKRYDEHHQDLTLLKALVRQQLPEKYKEIFFDQSKNGYAGYIDGGASQEEFYKFIKPILEKMDGTEELLVKLNREDLLRKQRTFDNGSIPHQIHLGELHAILRRQEDFYPFLKDNREKIEKILTFRIPYYVGPLARGNSRFAWMTRKSEETITPWNFEEVVDKGASAQSFIERMTNFDKNLPNEKVLPKHSLLYEYFTVYNELTKVKYVTEGMRKPAFLSGEQKKAIVDLLFKTNRKVTVKQLKEDYFKKIECFDSVEISGVEDRFNASLGTYHDLLKIIKDKDFLDNEENEDILEDIVLTLTLFEDREMIEERLKTYAHLFDDKVMKQLKRRRYTGWGRLSRKLINGIRDKQSGKTILDFLKSDGFANRNFMQLIHDDSLTFKEDIQKAQVSGQGDSLHEHIANLAGSPAIKKGILQTVKVVDELVKVMGRHKPENIVIEMARENQTTQKGQKNSRERMKRIEEGIKELGSQILKEHPVENTQLQNEKLYLYYLQNGRDMYVDQELDINRLSDYDVDHIVPQSFLKDDSIDNKVLTRSDKARGKSDNVPSEEVVKKMKNYWRQLLNAKLITQRKFDNLTKAERGGLSELDKAGFIKRQLVETRQITKHVAQILDSRMNTKYDENDKLIREVKVITLKSKLVSDFRKDFQFYKVREINNYHHAHDAYLNAVVGTALIKKYPKLESEFVYGDYKVYDVRKMIAKSEQEIGKATAKYFFYSNIMNFFKTEITLANGEIRKRPLIETNGETGEIVWDKGRDFATVRKVLSMPQVNIVKKTEVQTGGFSKESILPKRNSDKLIARKKDWDPKKYGGFDSPTVAYSVLVVAKVEKGKSKKLKSVKELLGITIMERSSFEKNPIDFLEAKGYKEVKKDLIIKLPKYSLFELENGRKRMLASAGELQKGNELALPSKYVNFLYLASHYEKLKGSPEDNEQKQLFVEQHKHYLDEIIEQISEFSKRVILADANLDKVLSAYNKHRDKPIREQAENIIHLFTLTNLGAPAAFKYFDTTIDRKRYTSTKEVLDATLIHQSITGLYETRIDLSQLGGDGGEAAAKEAAAKGGTLNIEDEHRLHETSKEPDVSLGSTWLSDFPQAWAETGGMGLAVRQAPLIIPLKATSTPVSIKQYPMSQEARLGIKPHIQRLLDQGILVPCQSPWNTPLLPVKKPGTNDYRPVQDLREVNKRVEDIHPTVPNPYNLLSGLPPSHQWYTVLDLKDAFFCLRLHPTSQPLFAFEWRDPEMGISGQLTWTRLPQGFKNSPTLFNEALHRDLADFRIQHPDLILLQYVDDLLLAATSELDCQQGTRALLQTLGNLGYRASAKKAQICQKQVKYLGYLLKEGQRWLTEARKETVMGQPTPKTPRQLREFLGTAGFCRLWIPGFAEMAAPLYPLTKPGTLFNWGPDQQKAYQEIKQALLTAPALGLPDLTKPFELFVDEKQGYAKGVLTQKLGPWRRPVAYLSKKLDPVAAGWPPCLRMVAAIAVLTKDAGKLTMGQPLVILAPHAVEALVKQPPDRWLSNARMTHYQALLLDTDRVQFGPVVALNPATLLPLPEEGLQHNCLDILAEAHGTRPDLTDQPLPDADHTWYTDGSSLLQEGQRKAGAAVTTETEVIWAKALPAGTSAQRAELIALTQALKMAEGKKLNVYTDSRYAFATAHIHGEIYRRRGWLTSEGKEIKNKDEILALLKALFLPKRLSIIHCPGHQKGHSAEARGNRMADQAARKAAITETPDTSTLLAGKRTADGSEFEKRTADGSEFESPKKKAKVE

SEQ ID NO: 2730 - protein, 2090 aa, synthetic construct
MPAAKRVKLDGGDKKYSIGLDIGTNSVGWAVITDEYKVPSKKFKVLGNTDRHSIKKNLIGALLFDSGETAEATRLKRTARRRYTRRKNRICYLQEIFSNEMAKVDDSFFHRLEESFLVEEDKKHERHPIFGNIVDEVAYHEKYPTIYHLRKKLVDSTDKADLRLIYLALAHMIKFRGHFLIEGDLNPDNSDVDKLFIQLVQTYNQLFEENPINASGVDAKAILSARLSKSRRLENLIAQLPGEKKNGLFGNLIALSLGLTPNFKSNFDLAEDAKLQLSKDTYDDDLDNLLAQIGDQYADLFLAAKNLSDAILLSDILRVNTEITKAPLSASMIKRYDEHHQDLTLLKALVRQQLPEKYKEIFFDQSKNGYAGYIDGGASQEEFYKFIKPILEKMDGTEELLVKLNREDLLRKQRTFDNGSIPHQIHLGELHAILRRQEDFYPFLKDNREKIEKILTFRIPYYVGPLARGNSRFAWMTRKSEETITPWNFEEVVDKGASAQSFIERMTNFDKNLPNEKVLPKHSLLYEYFTVYNELTKVKYVTEGMRKPAFLSGEQKKAIVDLLFKTNRKVTVKQLKEDYFKKIECFDSVEISGVEDRFNASLGTYHDLLKIIKDKDFLDNEENEDILEDIVLTLTLFEDREMIEERLKTYAHLFDDKVMKQLKRRRYTGWGRLSRKLINGIRDKQSGKTILDFLKSDGFANRNFMQLIHDDSLTFKEDIQKAQVSGQGDSLHEHIANLAGSPAIKKGILQTVKVVDELVKVMGRHKPENIVIEMARENQTTQKGQKNSRERMKRIEEGIKELGSQILKEHPVENTQLQNEKLYLYYLQNGRDMYVDQELDINRLSDYDVDHIVPQSFLKDDSIDNKVLTRSDKARGKSDNVPSEEVVKKMKNYWRQLLNAKLITQRKFDNLTKAERGGLSELDKAGFIKRQLVETRQITKHVAQILDSRMNTKYDENDKLIREVKVITLKSKLVSDFRKDFQFYKVREINNYHHAHDAYLNAVVGTALIKKYPKLESEFVYGDYKVYDVRKMIAKSEQEIGKATAKYFFYSNIMNFFKTEITLANGEIRKRPLIETNGETGEIVWDKGRDFATVRKVLSMPQVNIVKKTEVQTGGFSKESILPKRNSDKLIARKKDWDPKKYGGFDSPTVAYSVLVVAKVEKGKSKKLKSVKELLGITIMERSSFEKNPIDFLEAKGYKEVKKDLIIKLPKYSLFELENGRKRMLASAGELQKGNELALPSKYVNFLYLASHYEKLKGSPEDNEQKQLFVEQHKHYLDEIIEQISEFSKRVILADANLDKVLSAYNKHRDKPIREQAENIIHLFTLTNLGAPAAFKYFDTTIDRKRYTSTKEVLDATLIHQSITGLYETRIDLSQLGGDGGEAAAKGGTLNIEDEHRLHETSKEPDVSLGSTWLSDFPQAWAETGGMGLAVRQAPLIIPLKATSTPVSIKQYPMSQEARLGIKPHIQRLLDQGILVPCQSPWNTPLLPVKKPGTNDYRPVQDLREVNKRVEDIHPTVPNPYNLLSGLPPSHQWYTVLDLKDAFFCLRLHPTSQPLFAFEWRDPEMGISGQLTWTRLPQGFKNSPTLFNEALHRDLADFRIQHPDLILLQYVDDLLLAATSELDCQQGTRALLQTLGNLGYRASAKKAQICQKQVKYLGYLLKEGQRWLTEARKETVMGQPTPKTPRQLREFLGTAGFCRLWIPGFAEMAAPLYPLTKPGTLFNWGPDQQKAYQEIKQALLTAPALGLPDLTKPFELFVDEKQGYAKGVLTQKLGPWRRPVAYLSKKLDPVAAGWPPCLRMVAAIAVLTKDAGKLTMGQPLVILAPHAVEALVKQPPDRWLSNARMTHYQALLLDTDRVQFGPVVALNPATLLPLPEEGLQHNCLDILAEAHGTRPDLTDQPLPDADHTWYTDGSSLLQEGQRKAGAAVTTETEVIWAKALPAGTSAQRAELIALTQALKMAEGKKLNVYTDSRYAFATAHIHGEIYRRRGWLTSEGKEIKNKDEILALLKALFLPKRLSIIHCPGHQKGHSAEARGNRMADQAARKAAITETPDTSTLLAGKRTADGSEFEKRTADGSEFESPKKKAKVE

SEQ ID NO: 2731 - protein, 2094 aa, synthetic construct
MPAAKRVKLDGGDKKYSIGLDIGTNSVGWAVITDEYKVPSKKFKVLGNTDRHSIKKNLIGALLFDSGETAEATRLKRTARRRYTRRKNRICYLQEIFSNEMAKVDDSFFHRLEESFLVEEDKKHERHPIFGNIVDEVAYHEKYPTIYHLRKKLVDSTDKADLRLIYLALAHMIKFRGHFLIEGDLNPDNSDVDKLFIQLVQTYNQLFEENPINASGVDAKAILSARLSKSRRLENLIAQLPGEKKNGLFGNLIALSLGLTPNFKSNFDLAEDAKLQLSKDTYDDDLDNLLAQIGDQYADLFLAAKNLSDAILLSDILRVNTEITKAPLSASMIKRYDEHHQDLTLLKALVRQQLPEKYKEIFFDQSKNGYAGYIDGGASQEEFYKFIKPILEKMDGTEELLVKLNREDLLRKQRTFDNGSIPHQIHLGELHAILRRQEDFYPFLKDNREKIEKILTFRIPYYVGPLARGNSRFAWMTRKSEETITPWNFEEVVDKGASAQSFIERMTNFDKNLPNEKVLPKHSLLYEYFTVYNELTKVKYVTEGMRKPAFLSGEQKKAIVDLLFKTNRKVTVKQLKEDYFKKIECFDSVEISGVEDRFNASLGTYHDLLKIIKDKDFLDNEENEDILEDIVLTLTLFEDREMIEERLKTYAHLFDDKVMKQLKRRRYTGWGRLSRKLINGIRDKQSGKTILDFLKSDGFANRNFMQLIHDDSLTFKEDIQKAQVSGQGDSLHEHIANLAGSPAIKKGILQTVKVVDELVKVMGRHKPENIVIEMARENQTTQKGQKNSRERMKRIEEGIKELGSQILKEHPVENTQLQNEKLYLYYLQNGRDMYVDQELDINRLSDYDVDHIVPQSFLKDDSIDNKVLTRSDKARGKSDNVPSEEVVKKMKNYWRQLLNAKLITQRKFDNLTKAERGGLSELDKAGFIKRQLVETRQITKHVAQILDSRMNTKYDENDKLIREVKVITLKSKLVSDFRKDFQFYKVREINNYHHAHDAYLNAVVGTALIKKYPKLESEFVYGDYKVYDVRKMIAKSEQEIGKATAKYFFYSNIMNFFKTEITLANGEIRKRPLIETNGETGEIVWDKGRDFATVRKVLSMPQVNIVKKTEVQTGGFSKESILPKRNSDKLIARKKDWDPKKYGGFDSPTVAYSVLVVAKVEKGKSKKLKSVKELLGITIMERSSFEKNPIDFLEAKGYKEVKKDLIIKLPKYSLFELENGRKRMLASAGELQKGNELALPSKYVNFLYLASHYEKLKGSPEDNEQKQLFVEQHKHYLDEIIEQISEFSKRVILADANLDKVLSAYNKHRDKPIREQAENIIHLFTLTNLGAPAAFKYFDTTIDRKRYTSTKEVLDATLIHQSITGLYETRIDLSQLGGDGGPAPAPAPAPGGTLNIEDEHRLHETSKEPDVSLGSTWLSDFPQAWAETGGMGLAVRQAPLIIPLKATSTPVSIKQYPMSQEARLGIKPHIQRLLDQGILVPCQSPWNTPLLPVKKPGTNDYRPVQDLREVNKRVEDIHPTVPNPYNLLSGLPPSHQWYTVLDLKDAFFCLRLHPTSQPLFAFEWRDPEMGISGQLTWTRLPQGFKNSPTLFNEALHRDLADFRIQHPDLILLQYVDDLLLAATSELDCQQGTRALLQTLGNLGYRASAKKAQICQKQVKYLGYLLKEGQRWLTEARKETVMGQPTPKTPRQLREFLGTAGFCRLWIPGFAEMAAPLYPLTKPGTLFNWGPDQQKAYQEIKQALLTAPALGLPDLTKPFELFVDEKQGYAKGVLTQKLGPWRRPVAYLSKKLDPVAAGWPPCLRMVAAIAVLTKDAGKLTMGQPLVILAPHAVEALVKQPPDRWLSNARMTHYQALLLDTDRVQFGPVVALNPATLLPLPEEGLQHNCLDILAEAHGTRPDLTDQPLPDADHTWYTDGSSLLQEGQRKAGAAVTTETEVIWAKALPAGTSAQRAELIALTQALKMAEGKKLNVYTDSRYAFATAHIHGEIYRRRGWLTSEGKEIKNKDEILALLKALFLPKRLSIIHCPGHQKGHSAEARGNRMADQAARKAAITETPDTSTLLAGKRTADGSEFEKRTADGSEFESPKKKAKVE

SEQ ID NO: 2732 - protein, 2096 aa, synthetic construct
MPAAKRVKLDGGDKKYSIGLDIGTNSVGWAVITDEYKVPSKKFKVLGNTDRHSIKKNLIGALLFDSGETAEATRLKRTARRRYTRRKNRICYLQEIFSNEMAKVDDSFFHRLEESFLVEEDKKHERHPIFGNIVDEVAYHEKYPTIYHLRKKLVDSTDKADLRLIYLALAHMIKFRGHFLIEGDLNPDNSDVDKLFIQLVQTYNQLFEENPINASGVDAKAILSARLSKSRRLENLIAQLPGEKKNGLFGNLIALSLGLTPNFKSNFDLAEDAKLQLSKDTYDDDLDNLLAQIGDQYADLFLAAKNLSDAILLSDILRVNTEITKAPLSASMIKRYDEHHQDLTLLKALVRQQLPEKYKEIFFDQSKNGYAGYIDGGASQEEFYKFIKPILEKMDGTEELLVKLNREDLLRKQRTFDNGSIPHQIHLGELHAILRRQEDFYPFLKDNREKIEKILTFRIPYYVGPLARGNSRFAWMTRKSEETITPWNFEEVVDKGASAQSFIERMTNFDKNLPNEKVLPKHSLLYEYFTVYNELTKVKYVTEGMRKPAFLSGEQKKAIVDLLFKTNRKVTVKQLKEDYFKKIECFDSVEISGVEDRFNASLGTYHDLLKIIKDKDFLDNEENEDILEDIVLTLTLFEDREMIEERLKTYAHLFDDKVMKQLKRRRYTGWGRLSRKLINGIRDKQSGKTILDFLKSDGFANRNFMQLIHDDSLTFKEDIQKAQVSGQGDSLHEHIANLAGSPAIKKGILQTVKVVDELVKVMGRHKPENIVIEMARENQTTQKGQKNSRERMKRIEEGIKELGSQILKEHPVENTQLQNEKLYLYYLQNGRDMYVDQELDINRLSDYDVDHIVPQSFLKDDSIDNKVLTRSDKARGKSDNVPSEEVVKKMKNYWRQLLNAKLITQRKFDNLTKAERGGLSELDKAGFIKRQLVETRQITKHVAQILDSRMNTKYDENDKLIREVKVITLKSKLVSDFRKDFQFYKVREINNYHHAHDAYLNAVVGTALIKKYPKLESEFVYGDYKVYDVRKMIAKSEQEIGKATAKYFFYSNIMNFFKTEITLANGEIRKRPLIETNGETGEIVWDKGRDFATVRKVLSMPQVNIVKKTEVQTGGFSKESILPKRNSDKLIARKKDWDPKKYGGFDSPTVAYSVLVVAKVEKGKSKKLKSVKELLGITIMERSSFEKNPIDFLEAKGYKEVKKDLIIKLPKYSLFELENGRKRMLASAGELQKGNELALPSKYVNFLYLASHYEKLKGSPEDNEQKQLFVEQHKHYLDEIIEQISEFSKRVILADANLDKVLSAYNKHRDKPIREQAENIIHLFTLTNLGAPAAFKYFDTTIDRKRYTSTKEVLDATLIHQSITGLYETRIDLSQLGGDGGGSSEAAAKGGGGGTLNIEDEHRLHETSKEPDVSLGSTWLSDFPQAWAETGGMGLAVRQAPLIIPLKATSTPVSIKQYPMSQEARLGIKPHIQRLLDQGILVPCQSPWNTPLLPVKKPGTNDYRPVQDLREVNKRVEDIHPTVPNPYNLLSGLPPSHQWYTVLDLKDAFFCLRLHPTSQPLFAFEWRDPEMGISGQLTWTRLPQGFKNSPTLFNEALHRDLADFRIQHPDLILLQYVDDLLLAATSELDCQQGTRALLQTLGNLGYRASAKKAQICQKQVKYLGYLLKEGQRWLTEARKETVMGQPTPKTPRQLREFLGTAGFCRLWIPGFAEMAAPLYPLTKPGTLFNWGPDQQKAYQEIKQALLTAPALGLPDLTKPFELFVDEKQGYAKGVLTQKLGPWRRPVAYLSKKLDPVAAGWPPCLRMVAAIAVLTKDAGKLTMGQPLVILAPHAVEALVKQPPDRWLSNARMTHYQALLLDTDRVQFGPVVALNPATLLPLPEEGLQHNCLDILAEAHGTRPDLTDQPLPDADHTWYTDGSSLLQEGQRKAGAAVTTETEVIWAKALPAGTSAQRAELIALTQALKMAEGKKLNVYTDSRYAFATAHIHGEIYRRRGWLTSEGKEIKNKDEILALLKALFLPKRLSIIHCPGHQKGHSAEARGNRMADQAARKAAITETPDTSTLLAGKRTADGSEFEKRTADGSEFESPKKKAKVE

SEQ ID NO: 2733 - protein, 2091 aa, synthetic construct
MPAAKRVKLDGGDKKYSIGLDIGTNSVGWAVITDEYKVPSKKFKVLGNTDRHSIKKNLIGALLFDSGETAEATRLKRTARRRYTRRKNRICYLQEIFSNEMAKVDDSFFHRLEESFLVEEDKKHERHPIFGNIVDEVAYHEKYPTIYHLRKKLVDSTDKADLRLIYLALAHMIKFRGHFLIEGDLNPDNSDVDKLFIQLVQTYNQLFEENPINASGVDAKAILSARLSKSRRLENLIAQLPGEKKNGLFGNLIALSLGLTPNFKSNFDLAEDAKLQLSKDTYDDDLDNLLAQIGDQYADLFLAAKNLSDAILLSDILRVNTEITKAPLSASMIKRYDEHHQDLTLLKALVRQQLPEKYKEIFFDQSKNGYAGYIDGGASQEEFYKFIKPILEKMDGTEELLVKLNREDLLRKQRTFDNGSIPHQIHLGELHAILRRQEDFYPFLKDNREKIEKILTFRIPYYVGPLARGNSRFAWMTRKSEETITPWNFEEVVDKGASAQSFIERMTNFDKNLPNEKVLPKHSLLYEYFTVYNELTKVKYVTEGMRKPAFLSGEQKKAIVDLLFKTNRKVTVKQLKEDYFKKIECFDSVEISGVEDRFNASLGTYHDLLKIIKDKDFLDNEENEDILEDIVLTLTLFEDREMIEERLKTYAHLFDDKVMKQLKRRRYTGWGRLSRKLINGIRDKQSGKTILDFLKSDGFANRNFMQLIHDDSLTFKEDIQKAQVSGQGDSLHEHIANLAGSPAIKKGILQTVKVVDELVKVMGRHKPENIVIEMARENQTTQKGQKNSRERMKRIEEGIKELGSQILKEHPVENTQLQNEKLYLYYLQNGRDMYVDQELDINRLSDYDVDHIVPQSFLKDDSIDNKVLTRSDKARGKSDNVPSEEVVKKMKNYWRQLLNAKLITQRKFDNLTKAERGGLSELDKAGFIKRQLVETRQITKHVAQILDSRMNTKYDENDKLIREVKVITLKSKLVSDFRKDFQFYKVREINNYHHAHDAYLNAVVGTALIKKYPKLESEFVYGDYKVYDVRKMIAKSEQEIGKATAKYFFYSNIMNFFKTEITLANGEIRKRPLIETNGETGEIVWDKGRDFATVRKVLSMPQVNIVKKTEVQTGGFSKESILPKRNSDKLIARKKDWDPKKYGGFDSPTVAYSVLVVAKVEKGKSKKLKSVKELLGITIMERSSFEKNPIDFLEAKGYKEVKKDLIIKLPKYSLFELENGRKRMLASAGELQKGNELALPSKYVNFLYLASHYEKLKGSPEDNEQKQLFVEQHKHYLDEIIEQISEFSKRVILADANLDKVLSAYNKHRDKPIREQAENIIHLFTLTNLGAPAAFKYFDTTIDRKRYTSTKEVLDATLIHQSITGLYETRIDLSQLGGDGGPAPGGSGGTLNIEDEHRLHETSKEPDVSLGSTWLSDFPQAWAETGGMGLAVRQAPLIIPLKATSTPVSIKQYPMSQEARLGIKPHIQRLLDQGILVPCQSPWNTPLLPVKKPGTNDYRPVQDLREVNKRVEDIHPTVPNPYNLLSGLPPSHQWYTVLDLKDAFFCLRLHPTSQPLFAFEWRDPEMGISGQLTWTRLPQGFKNSPTLFNEALHRDLADFRIQHPDLILLQYVDDLLLAATSELDCQQGTRALLQTLGNLGYRASAKKAQICQKQVKYLGYLLKEGQRWLTEARKETVMGQPTPKTPRQLREFLGTAGFCRLWIPGFAEMAAPLYPLTKPGTLFNWGPDQQKAYQEIKQALLTAPALGLPDLTKPFELFVDEKQGYAKGVLTQKLGPWRRPVAYLSKKLDPVAAGWPPCLRMVAAIAVLTKDAGKLTMGQPLVILAPHAVEALVKQPPDRWLSNARMTHYQALLLDTDRVQFGPVVALNPATLLPLPEEGLQHNCLDILAEAHGTRPDLTDQPLPDADHTWYTDGSSLLQEGQRKAGAAVTTETEVIWAKALPAGTSAQRAELIALTQALKMAEGKKLNVYTDSRYAFATAHIHGEIYRRRGWLTSEGKEIKNKDEILALLKALFLPKRLSIIHCPGHQKGHSAEARGNRMADQAARKAAITETPDTSTLLAGKRTADGSEFEKRTADGSEFESPKKKAKVE

SEQ ID NO: 2734 - protein, 2118 aa, synthetic construct
MPAAKRVKLDGGDKKYSIGLDIGTNSVGWAVITDEYKVPSKKFKVLGNTDRHSIKKNLIGALLFDSGETAEATRLKRTARRRYTRRKNRICYLQEIFSNEMAKVDDSFFHRLEESFLVEEDKKHERHPIFGNIVDEVAYHEKYPTIYHLRKKLVDSTDKADLRLIYLALAHMIKFRGHFLIEGDLNPDNSDVDKLFIQLVQTYNQLFEENPINASGVDAKAILSARLSKSRRLENLIAQLPGEKKNGLFGNLIALSLGLTPNFKSNFDLAEDAKLQLSKDTYDDDLDNLLAQIGDQYADLFLAAKNLSDAILLSDILRVNTEITKAPLSASMIKRYDEHHQDLTLLKALVRQQLPEKYKEIFFDQSKNGYAGYIDGGASQEEFYKFIKPILEKMDGTEELLVKLNREDLLRKQRTFDNGSIPHQIHLGELHAILRRQEDFYPFLKDNREKIEKILTFRIPYYVGPLARGNSRFAWMTRKSEETITPWNFEEVVDKGASAQSFIERMTNFDKNLPNEKVLPKHSLLYEYFTVYNELTKVKYVTEGMRKPAFLSGEQKKAIVDLLFKTNRKVTVKQLKEDYFKKIECFDSVEISGVEDRFNASLGTYHDLLKIIKDKDFLDNEENEDILEDIVLTLTLFEDREMIEERLKTYAHLFDDKVMKQLKRRRYTGWGRLSRKLINGIRDKQSGKTILDFLKSDGFANRNFMQLIHDDSLTFKEDIQKAQVSGQGDSLHEHIANLAGSPAIKKGILQTVKVVDELVKVMGRHKPENIVIEMARENQTTQKGQKNSRERMKRIEEGIKELGSQILKEHPVENTQLQNEKLYLYYLQNGRDMYVDQELDINRLSDYDVDHIVPQSFLKDDSIDNKVLTRSDKARGKSDNVPSEEVVKKMKNYWRQLLNAKLITQRKFDNLTKAERGGLSELDKAGFIKRQLVETRQITKHVAQILDSRMNTKYDENDKLIREVKVITLKSKLVSDFRKDFQFYKVREINNYHHAHDAYLNAVVGTALIKKYPKLESEFVYGDYKVYDVRKMIAKSEQEIGKATAKYFFYSNIMNFFKTEITLANGEIRKRPLIETNGETGEIVWDKGRDFATVRKVLSMPQVNIVKKTEVQTGGFSKESILPKRNSDKLIARKKDWDPKKYGGFDSPTVAYSVLVVAKVEKGKSKKLKSVKELLGITIMERSSFEKNPIDFLEAKGYKEVKKDLIIKLPKYSLFELENGRKRMLASAGELQKGNELALPSKYVNFLYLASHYEKLKGSPEDNEQKQLFVEQHKHYLDEIIEQISEFSKRVILADANLDKVLSAYNKHRDKPIREQAENIIHLFTLTNLGAPAAFKYFDTTIDRKRYTSTKEVLDATLIHQSITGLYETRIDLSQLGGDGGSGGSSGGSSGSETPGTSESATPESSGGSSGGSSGGTLNIEDEHRLHETSKEPDVSLGSTWLSDFPQAWAETGGMGLAVRQAPLIIPLKATSTPVSIKQYPMSQEARLGIKPHIQRLLDQGILVPCQSPWNTPLLPVKKPGTNDYRPVQDLREVNKRVEDIHPTVPNPYNLLSGLPPSHQWYTVLDLKDAFFCLRLHPTSQPLFAFEWRDPEMGISGQLTWTRLPQGFKNSPTLFNEALHRDLADFRIQHPDLILLQYVDDLLLAATSELDCQQGTRALLQTLGNLGYRASAKKAQICQKQVKYLGYLLKEGQRWLTEARKETVMGQPTPKTPRQLREFLGTAGFCRLWIPGFAEMAAPLYPLTKPGTLFNWGPDQQKAYQEIKQALLTAPALGLPDLTKPFELFVDEKQGYAKGVLTQKLGPWRRPVAYLSKKLDPVAAGWPPCLRMVAAIAVLTKDAGKLTMGQPLVILAPHAVEALVKQPPDRWLSNARMTHYQALLLDTDRVQFGPVVALNPATLLPLPEEGLQHNCLDILAEAHGTRPDLTDQPLPDADHTWYTDGSSLLQEGQRKAGAAVTTETEVIWAKALPAGTSAQRAELIALTQALKMAEGKKLNVYTDSRYAFATAHIHGEIYRRRGWLTSEGKEIKNKDEILALLKALFLPKRLSIIHCPGHQKGHSAEARGNRMADQAARKAAITETPDTSTLLAGKRTADGSEFEKRTADGSEFESPKKKAKVE

SEQ ID NO: 2735 - protein, 2091 aa, synthetic construct
MPAAKRVKLDGGDKKYSIGLDIGTNSVGWAVITDEYKVPSKKFKVLGNTDRHSIKKNLIGALLFDSGETAEATRLKRTARRRYTRRKNRICYLQEIFSNEMAKVDDSFFHRLEESFLVEEDKKHERHPIFGNIVDEVAYHEKYPTIYHLRKKLVDSTDKADLRLIYLALAHMIKFRGHFLIEGDLNPDNSDVDKLFIQLVQTYNQLFEENPINASGVDAKAILSARLSKSRRLENLIAQLPGEKKNGLFGNLIALSLGLTPNFKSNFDLAEDAKLQLSKDTYDDDLDNLLAQIGDQYADLFLAAKNLSDAILLSDILRVNTEITKAPLSASMIKRYDEHHQDLTLLKALVRQQLPEKYKEIFFDQSKNGYAGYIDGGASQEEFYKFIKPILEKMDGTEELLVKLNREDLLRKQRTFDNGSIPHQIHLGELHAILRRQEDFYPFLKDNREKIEKILTFRIPYYVGPLARGNSRFAWMTRKSEETITPWNFEEVVDKGASAQSFIERMTNFDKNLPNEKVLPKHSLLYEYFTVYNELTKVKYVTEGMRKPAFLSGEQKKAIVDLLFKTNRKVTVKQLKEDYFKKIECFDSVEISGVEDRFNASLGTYHDLLKIIKDKDFLDNEENEDILEDIVLTLTLFEDREMIEERLKTYAHLFDDKVMKQLKRRRYTGWGRLSRKLINGIRDKQSGKTILDFLKSDGFANRNFMQLIHDDSLTFKEDIQKAQVSGQGDSLHEHIANLAGSPAIKKGILQTVKVVDELVKVMGRHKPENIVIEMARENQTTQKGQKNSRERMKRIEEGIKELGSQILKEHPVENTQLQNEKLYLYYLQNGRDMYVDQELDINRLSDYDVDHIVPQSFLKDDSIDNKVLTRSDKARGKSDNVPSEEVVKKMKNYWRQLLNAKLITQRKFDNLTKAERGGLSELDKAGFIKRQLVETRQITKHVAQILDSRMNTKYDENDKLIREVKVITLKSKLVSDFRKDFQFYKVREINNYHHAHDAYLNAVVGTALIKKYPKLESEFVYGDYKVYDVRKMIAKSEQEIGKATAKYFFYSNIMNFFKTEITLANGEIRKRPLIETNGETGEIVWDKGRDFATVRKVLSMPQVNIVKKTEVQTGGFSKESILPKRNSDKLIARKKDWDPKKYGGFDSPTVAYSVLVVAKVEKGKSKKLKSVKELLGITIMERSSFEKNPIDFLEAKGYKEVKKDLIIKLPKYSLFELENGRKRMLASAGELQKGNELALPSKYVNFLYLASHYEKLKGSPEDNEQKQLFVEQHKHYLDEIIEQISEFSKRVILADANLDKVLSAYNKHRDKPIREQAENIIHLFTLTNLGAPAAFKYFDTTIDRKRYTSTKEVLDATLIHQSITGLYETRIDLSQLGGDGGGGSPAPGGTLNIEDEHRLHETSKEPDVSLGSTWLSDFPQAWAETGGMGLAVRQAPLIIPLKATSTPVSIKQYPMSQEARLGIKPHIQRLLDQGILVPCQSPWNTPLLPVKKPGTNDYRPVQDLREVNKRVEDIHPTVPNPYNLLSGLPPSHQWYTVLDLKDAFFCLRLHPTSQPLFAFEWRDPEMGISGQLTWTRLPQGFKNSPTLFNEALHRDLADFRIQHPDLILLQYVDDLLLAATSELDCQQGTRALLQTLGNLGYRASAKKAQICQKQVKYLGYLLKEGQRWLTEARKETVMGQPTPKTPRQLREFLGTAGFCRLWIPGFAEMAAPLYPLTKPGTLFNWGPDQQKAYQEIKQALLTAPALGLPDLTKPFELFVDEKQGYAKGVLTQKLGPWRRPVAYLSKKLDPVAAGWPPCLRMVAAIAVLTKDAGKLTMGQPLVILAPHAVEALVKQPPDRWLSNARMTHYQALLLDTDRVQFGPVVALNPATLLPLPEEGLQHNCLDILAEAHGTRPDLTDQPLPDADHTWYTDGSSLLQEGQRKAGAAVTTETEVIWAKALPAGTSAQRAELIALTQALKMAEGKKLNVYTDSRYAFATAHIHGEIYRRRGWLTSEGKEIKNKDEILALLKALFLPKRLSIIHCPGHQKGHSAEARGNRMADQAARKAAITETPDTSTLLAGKRTADGSEFEKRTADGSEFESPKKKAKVE

SEQ ID NO: 2736 - protein, 2100 aa, synthetic construct
MPAAKRVKLDGGDKKYSIGLDIGTNSVGWAVITDEYKVPSKKFKVLGNTDRHSIKKNLIGALLFDSGETAEATRLKRTARRRYTRRKNRICYLQEIFSNEMAKVDDSFFHRLEESFLVEEDKKHERHPIFGNIVDEVAYHEKYPTIYHLRKKLVDSTDKADLRLIYLALAHMIKFRGHFLIEGDLNPDNSDVDKLFIQLVQTYNQLFEENPINASGVDAKAILSARLSKSRRLENLIAQLPGEKKNGLFGNLIALSLGLTPNFKSNFDLAEDAKLQLSKDTYDDDLDNLLAQIGDQYADLFLAAKNLSDAILLSDILRVNTEITKAPLSASMIKRYDEHHQDLTLLKALVRQQLPEKYKEIFFDQSKNGYAGYIDGGASQEEFYKFIKPILEKMDGTEELLVKLNREDLLRKQRTFDNGSIPHQIHLGELHAILRRQEDFYPFLKDNREKIEKILTFRIPYYVGPLARGNSRFAWMTRKSEETITPWNFEEVVDKGASAQSFIERMTNFDKNLPNEKVLPKHSLLYEYFTVYNELTKVKYVTEGMRKPAFLSGEQKKAIVDLLFKTNRKVTVKQLKEDYFKKIECFDSVEISGVEDRFNASLGTYHDLLKIIKDKDFLDNEENEDILEDIVLTLTLFEDREMIEERLKTYAHLFDDKVMKQLKRRRYTGWGRLSRKLINGIRDKQSGKTILDFLKSDGFANRNFMQLIHDDSLTFKEDIQKAQVSGQGDSLHEHIANLAGSPAIKKGILQTVKVVDELVKVMGRHKPENIVIEMARENQTTQKGQKNSRERMKRIEEGIKELGSQILKEHPVENTQLQNEKLYLYYLQNGRDMYVDQELDINRLSDYDVDHIVPQSFLKDDSIDNKVLTRSDKARGKSDNVPSEEVVKKMKNYWRQLLNAKLITQRKFDNLTKAERGGLSELDKAGFIKRQLVETRQITKHVAQILDSRMNTKYDENDKLIREVKVITLKSKLVSDFRKDFQFYKVREINNYHHAHDAYLNAVVGTALIKKYPKLESEFVYGDYKVYDVRKMIAKSEQEIGKATAKYFFYSNIMNFFKTEITLANGEIRKRPLIETNGETGEIVWDKGRDFATVRKVLSMPQVNIVKKTEVQTGGFSKESILPKRNSDKLIARKKDWDPKKYGGFDSPTVAYSVLVVAKVEKGKSKKLKSVKELLGITIMERSSFEKNPIDFLEAKGYKEVKKDLIIKLPKYSLFELENGRKRMLASAGELQKGNELALPSKYVNFLYLASHYEKLKGSPEDNEQKQLFVEQHKHYLDEIIEQISEFSKRVILADANLDKVLSAYNKHRDKPIREQAENIIHLFTLTNLGAPAAFKYFDTTIDRKRYTSTKEVLDATLIHQSITGLYETRIDLSQLGGDGGGGGGSGGGGSGGGGSGGTLNIEDEHRLHETSKEPDVSLGSTWLSDFPQAWAETGGMGLAVRQAPLIIPLKATSTPVSIKQYPMSQEARLGIKPHIQRLLDQGILVPCQSPWNTPLLPVKKPGTNDYRPVQDLREVNKRVEDIHPTVPNPYNLLSGLPPSHQWYTVLDLKDAFFCLRLHPTSQPLFAFEWRDPEMGISGQLTWTRLPQGFKNSPTLFNEALHRDLADFRIQHPDLILLQYVDDLLLAATSELDCQQGTRALLQTLGNLGYRASAKKAQICQKQVKYLGYLLKEGQRWLTEARKETVMGQPTPKTPRQLREFLGTAGFCRLWIPGFAEMAAPLYPLTKPGTLFNWGPDQQKAYQEIKQALLTAPALGLPDLTKPFELFVDEKQGYAKGVLTQKLGPWRRPVAYLSKKLDPVAAGWPPCLRMVAAIAVLTKDAGKLTMGQPLVILAPHAVEALVKQPPDRWLSNARMTHYQALLLDTDRVQFGPVVALNPATLLPLPEEGLQHNCLDILAEAHGTRPDLTDQPLPDADHTWYTDGSSLLQEGQRKAGAAVTTETEVIWAKALPAGTSAQRAELIALTQALKMAEGKKLNVYTDSRYAFATAHIHGEIYRRRGWLTSEGKEIKNKDEILALLKALFLPKRLSIIHCPGHQKGHSAEARGNRMADQAARKAAITETPDTSTLLAGKRTADGSEFEKRTADGSEFESPKKKAKVE

SEQ ID NO: 2737 - protein, 2093 aa, synthetic construct
MPAAKRVKLDGGDKKYSIGLDIGTNSVGWAVITDEYKVPSKKFKVLGNTDRHSIKKNLIGALLFDSGETAEATRLKRTARRRYTRRKNRICYLQEIFSNEMAKVDDSFFHRLEESFLVEEDKKHERHPIFGNIVDEVAYHEKYPTIYHLRKKLVDSTDKADLRLIYLALAHMIKFRGHFLIEGDLNPDNSDVDKLFIQLVQTYNQLFEENPINASGVDAKAILSARLSKSRRLENLIAQLPGEKKNGLFGNLIALSLGLTPNFKSNFDLAEDAKLQLSKDTYDDDLDNLLAQIGDQYADLFLAAKNLSDAILLSDILRVNTEITKAPLSASMIKRYDEHHQDLTLLKALVRQQLPEKYKEIFFDQSKNGYAGYIDGGASQEEFYKFIKPILEKMDGTEELLVKLNREDLLRKQRTFDNGSIPHQIHLGELHAILRRQEDFYPFLKDNREKIEKILTFRIPYYVGPLARGNSRFAWMTRKSEETITPWNFEEVVDKGASAQSFIERMTNFDKNLPNEKVLPKHSLLYEYFTVYNELTKVKYVTEGMRKPAFLSGEQKKAIVDLLFKTNRKVTVKQLKEDYFKKIECFDSVEISGVEDRFNASLGTYHDLLKIIKDKDFLDNEENEDILEDIVLTLTLFEDREMIEERLKTYAHLFDDKVMKQLKRRRYTGWGRLSRKLINGIRDKQSGKTILDFLKSDGFANRNFMQLIHDDSLTFKEDIQKAQVSGQGDSLHEHIANLAGSPAIKKGILQTVKVVDELVKVMGRHKPENIVIEMARENQTTQKGQKNSRERMKRIEEGIKELGSQILKEHPVENTQLQNEKLYLYYLQNGRDMYVDQELDINRLSDYDVDHIVPQSFLKDDSIDNKVLTRSDKARGKSDNVPSEEVVKKMKNYWRQLLNAKLITQRKFDNLTKAERGGLSELDKAGFIKRQLVETRQITKHVAQILDSRMNTKYDENDKLIREVKVITLKSKLVSDFRKDFQFYKVREINNYHHAHDAYLNAVVGTALIKKYPKLESEFVYGDYKVYDVRKMIAKSEQEIGKATAKYFFYSNIMNFFKTEITLANGEIRKRPLIETNGETGEIVWDKGRDFATVRKVLSMPQVNIVKKTEVQTGGFSKESILPKRNSDKLIARKKDWDPKKYGGFDSPTVAYSVLVVAKVEKGKSKKLKSVKELLGITIMERSSFEKNPIDFLEAKGYKEVKKDLIIKLPKYSLFELENGRKRMLASAGELQKGNELALPSKYVNFLYLASHYEKLKGSPEDNEQKQLFVEQHKHYLDEIIEQISEFSKRVILADANLDKVLSAYNKHRDKPIREQAENIIHLFTLTNLGAPAAFKYFDTTIDRKRYTSTKEVLDATLIHQSITGLYETRIDLSQLGGDGGEAAAKGSSGGTLNIEDEHRLHETSKEPDVSLGSTWLSDFPQAWAETGGMGLAVRQAPLIIPLKATSTPVSIKQYPMSQEARLGIKPHIQRLLDQGILVPCQSPWNTPLLPVKKPGTNDYRPVQDLREVNKRVEDIHPTVPNPYNLLSGLPPSHQWYTVLDLKDAFFCLRLHPTSQPLFAFEWRDPEMGISGQLTWTRLPQGFKNSPTLFNEALHRDLADFRIQHPDLILLQYVDDLLLAATSELDCQQGTRALLQTLGNLGYRASAKKAQICQKQVKYLGYLLKEGQRWLTEARKETVMGQPTPKTPRQLREFLGTAGFCRLWIPGFAEMAAPLYPLTKPGTLFNWGPDQQKAYQEIKQALLTAPALGLPDLTKPFELFVDEKQGYAKGVLTQKLGPWRRPVAYLSKKLDPVAAGWPPCLRMVAAIAVLTKDAGKLTMGQPLVILAPHAVEALVKQPPDRWLSNARMTHYQALLLDTDRVQFGPVVALNPATLLPLPEEGLQHNCLDILAEAHGTRPDLTDQPLPDADHTWYTDGSSLLQEGQRKAGAAVTTETEVIWAKALPAGTSAQRAELIALTQALKMAEGKKLNVYTDSRYAFATAHIHGEIYRRRGWLTSEGKEIKNKDEILALLKALFLPKRLSIIHCPGHQKGHSAEARGNRMADQAARKAAITETPDTSTLLAGKRTADGSEFEKRTADGSEFESPKKKAKVE

SEQ ID NO: 2738 - protein, 2094 aa, synthetic construct
MPAAKRVKLDGGDKKYSIGLDIGTNSVGWAVITDEYKVPSKKFKVLGNTDRHSIKKNLIGALLFDSGETAEATRLKRTARRRYTRRKNRICYLQEIFSNEMAKVDDSFFHRLEESFLVEEDKKHERHPIFGNIVDEVAYHEKYPTIYHLRKKLVDSTDKADLRLIYLALAHMIKFRGHFLIEGDLNPDNSDVDKLFIQLVQTYNQLFEENPINASGVDAKAILSARLSKSRRLENLIAQLPGEKKNGLFGNLIALSLGLTPNFKSNFDLAEDAKLQLSKDTYDDDLDNLLAQIGDQYADLFLAAKNLSDAILLSDILRVNTEITKAPLSASMIKRYDEHHQDLTLLKALVRQQLPEKYKEIFFDQSKNGYAGYIDGGASQEEFYKFIKPILEKMDGTEELLVKLNREDLLRKQRTFDNGSIPHQIHLGELHAILRRQEDFYPFLKDNREKIEKILTFRIPYYVGPLARGNSRFAWMTRKSEETITPWNFEEVVDKGASAQSFIERMTNFDKNLPNEKVLPKHSLLYEYFTVYNELTKVKYVTEGMRKPAFLSGEQKKAIVDLLFKTNRKVTVKQLKEDYFKKIECFDSVEISGVEDRFNASLGTYHDLLKIIKDKDFLDNEENEDILEDIVLTLTLFEDREMIEERLKTYAHLFDDKVMKQLKRRRYTGWGRLSRKLINGIRDKQSGKTILDFLKSDGFANRNFMQLIHDDSLTFKEDIQKAQVSGQGDSLHEHIANLAGSPAIKKGILQTVKVVDELVKVMGRHKPENIVIEMARENQTTQKGQKNSRERMKRIEEGIKELGSQILKEHPVENTQLQNEKLYLYYLQNGRDMYVDQELDINRLSDYDVDHIVPQSFLKDDSIDNKVLTRSDKARGKSDNVPSEEVVKKMKNYWRQLLNAKLITQRKFDNLTKAERGGLSELDKAGFIKRQLVETRQITKHVAQILDSRMNTKYDENDKLIREVKVITLKSKLVSDFRKDFQFYKVREINNYHHAHDAYLNAVVGTALIKKYPKLESEFVYGDYKVYDVRKMIAKSEQEIGKATAKYFFYSNIMNFFKTEITLANGEIRKRPLIETNGETGEIVWDKGRDFATVRKVLSMPQVNIVKKTEVQTGGFSKESILPKRNSDKLIARKKDWDPKKYGGFDSPTVAYSVLVVAKVEKGKSKKLKSVKELLGITIMERSSFEKNPIDFLEAKGYKEVKKDLIIKLPKYSLFELENGRKRMLASAGELQKGNELALPSKYVNFLYLASHYEKLKGSPEDNEQKQLFVEQHKHYLDEIIEQISEFSKRVILADANLDKVLSAYNKHRDKPIREQAENIIHLFTLTNLGAPAAFKYFDTTIDRKRYTSTKEVLDATLIHQSITGLYETRIDLSQLGGDGGPAPGGGGGSGGTLNIEDEHRLHETSKEPDVSLGSTWLSDFPQAWAETGGMGLAVRQAPLIIPLKATSTPVSIKQYPMSQEARLGIKPHIQRLLDQGILVPCQSPWNTPLLPVKKPGTNDYRPVQDLREVNKRVEDIHPTVPNPYNLLSGLPPSHQWYTVLDLKDAFFCLRLHPTSQPLFAFEWRDPEMGISGQLTWTRLPQGFKNSPTLFNEALHRDLADFRIQHPDLILLQYVDDLLLAATSELDCQQGTRALLQTLGNLGYRASAKKAQICQKQVKYLGYLLKEGQRWLTEARKETVMGQPTPKTPRQLREFLGTAGFCRLWIPGFAEMAAPLYPLTKPGTLFNWGPDQQKAYQEIKQALLTAPALGLPDLTKPFELFVDEKQGYAKGVLTQKLGPWRRPVAYLSKKLDPVAAGWPPCLRMVAAIAVLTKDAGKLTMGQPLVILAPHAVEALVKQPPDRWLSNARMTHYQALLLDTDRVQFGPVVALNPATLLPLPEEGLQHNCLDILAEAHGTRPDLTDQPLPDADHTWYTDGSSLLQEGQRKAGAAVTTETEVIWAKALPAGTSAQRAELIALTQALKMAEGKKLNVYTDSRYAFATAHIHGEIYRRRGWLTSEGKEIKNKDEILALLKALFLPKRLSIIHCPGHQKGHSAEARGNRMADQAARKAAITETPDTSTLLAGKRTADGSEFEKRTADGSEFESPKKKAKVE

SEQ ID NO: 2739 - protein, 2093 aa, synthetic construct
MPAAKRVKLDGGDKKYSIGLDIGTNSVGWAVITDEYKVPSKKFKVLGNTDRHSIKKNLIGALLFDSGETAEATRLKRTARRRYTRRKNRICYLQEIFSNEMAKVDDSFFHRLEESFLVEEDKKHERHPIFGNIVDEVAYHEKYPTIYHLRKKLVDSTDKADLRLIYLALAHMIKFRGHFLIEGDLNPDNSDVDKLFIQLVQTYNQLFEENPINASGVDAKAILSARLSKSRRLENLIAQLPGEKKNGLFGNLIALSLGLTPNFKSNFDLAEDAKLQLSKDTYDDDLDNLLAQIGDQYADLFLAAKNLSDAILLSDILRVNTEITKAPLSASMIKRYDEHHQDLTLLKALVRQQLPEKYKEIFFDQSKNGYAGYIDGGASQEEFYKFIKPILEKMDGTEELLVKLNREDLLRKQRTFDNGSIPHQIHLGELHAILRRQEDFYPFLKDNREKIEKILTFRIPYYVGPLARGNSRFAWMTRKSEETITPWNFEEVVDKGASAQSFIERMTNFDKNLPNEKVLPKHSLLYEYFTVYNELTKVKYVTEGMRKPAFLSGEQKKAIVDLLFKTNRKVTVKQLKEDYFKKIECFDSVEISGVEDRFNASLGTYHDLLKIIKDKDFLDNEENEDILEDIVLTLTLFEDREMIEERLKTYAHLFDDKVMKQLKRRRYTGWGRLSRKLINGIRDKQSGKTILDFLKSDGFANRNFMQLIHDDSLTFKEDIQKAQVSGQGDSLHEHIANLAGSPAIKKGILQTVKVVDELVKVMGRHKPENIVIEMARENQTTQKGQKNSRERMKRIEEGIKELGSQILKEHPVENTQLQNEKLYLYYLQNGRDMYVDQELDINRLSDYDVDHIVPQSFLKDDSIDNKVLTRSDKARGKSDNVPSEEVVKKMKNYWRQLLNAKLITQRKFDNLTKAERGGLSELDKAGFIKRQLVETRQITKHVAQILDSRMNTKYDENDKLIREVKVITLKSKLVSDFRKDFQFYKVREINNYHHAHDAYLNAVVGTALIKKYPKLESEFVYGDYKVYDVRKMIAKSEQEIGKATAKYFFYSNIMNFFKTEITLANGEIRKRPLIETNGETGEIVWDKGRDFATVRKVLSMPQVNIVKKTEVQTGGFSKESILPKRNSDKLIARKKDWDPKKYGGFDSPTVAYSVLVVAKVEKGKSKKLKSVKELLGITIMERSSFEKNPIDFLEAKGYKEVKKDLIIKLPKYSLFELENGRKRMLASAGELQKGNELALPSKYVNFLYLASHYEKLKGSPEDNEQKQLFVEQHKHYLDEIIEQISEFSKRVILADANLDKVLSAYNKHRDKPIREQAENIIHLFTLTNLGAPAAFKYFDTTIDRKRYTSTKEVLDATLIHQSITGLYETRIDLSQLGGDGGGGGGGGGGGGTLNIEDEHRLHETSKEPDVSLGSTWLSDFPQAWAETGGMGLAVRQAPLIIPLKATSTPVSIKQYPMSQEARLGIKPHIQRLLDQGILVPCQSPWNTPLLPVKKPGTNDYRPVQDLREVNKRVEDIHPTVPNPYNLLSGLPPSHQWYTVLDLKDAFFCLRLHPTSQPLFAFEWRDPEMGISGQLTWTRLPQGFKNSPTLFNEALHRDLADFRIQHPDLILLQYVDDLLLAATSELDCQQGTRALLQTLGNLGYRASAKKAQICQKQVKYLGYLLKEGQRWLTEARKETVMGQPTPKTPRQLREFLGTAGFCRLWIPGFAEMAAPLYPLTKPGTLFNWGPDQQKAYQEIKQALLTAPALGLPDLTKPFELFVDEKQGYAKGVLTQKLGPWRRPVAYLSKKLDPVAAGWPPCLRMVAAIAVLTKDAGKLTMGQPLVILAPHAVEALVKQPPDRWLSNARMTHYQALLLDTDRVQFGPVVALNPATLLPLPEEGLQHNCLDILAEAHGTRPDLTDQPLPDADHTWYTDGSSLLQEGQRKAGAAVTTETEVIWAKALPAGTSAQRAELIALTQALKMAEGKKLNVYTDSRYAFATAHIHGEIYRRRGWLTSEGKEIKNKDEILALLKALFLPKRLSIIHCPGHQKGHSAEARGNRMADQAARKAAITETPDTSTLLAGKRTADGSEFEKRTADGSEFESPKKKAKVE

SEQ ID NO: 2740 - protein, 2093 aa, synthetic construct
MPAAKRVKLDGGDKKYSIGLDIGTNSVGWAVITDEYKVPSKKFKVLGNTDRHSIKKNLIGALLFDSGETAEATRLKRTARRRYTRRKNRICYLQEIFSNEMAKVDDSFFHRLEESFLVEEDKKHERHPIFGNIVDEVAYHEKYPTIYHLRKKLVDSTDKADLRLIYLALAHMIKFRGHFLIEGDLNPDNSDVDKLFIQLVQTYNQLFEENPINASGVDAKAILSARLSKSRRLENLIAQLPGEKKNGLFGNLIALSLGLTPNFKSNFDLAEDAKLQLSKDTYDDDLDNLLAQIGDQYADLFLAAKNLSDAILLSDILRVNTEITKAPLSASMIKRYDEHHQDLTLLKALVRQQLPEKYKEIFFDQSKNGYAGYIDGGASQEEFYKFIKPILEKMDGTEELLVKLNREDLLRKQRTFDNGSIPHQIHLGELHAILRRQEDFYPFLKDNREKIEKILTFRIPYYVGPLARGNSRFAWMTRKSEETITPWNFEEVVDKGASAQSFIERMTNFDKNLPNEKVLPKHSLLYEYFTVYNELTKVKYVTEGMRKPAFLSGEQKKAIVDLLFKTNRKVTVKQLKEDYFKKIECFDSVEISGVEDRFNASLGTYHDLLKIIKDKDFLDNEENEDILEDIVLTLTLFEDREMIEERLKTYAHLFDDKVMKQLKRRRYTGWGRLSRKLINGIRDKQSGKTILDFLKSDGFANRNFMQLIHDDSLTFKEDIQKAQVSGQGDSLHEHIANLAGSPAIKKGILQTVKVVDELVKVMGRHKPENIVIEMARENQTTQKGQKNSRERMKRIEEGIKELGSQILKEHPVENTQLQNEKLYLYYLQNGRDMYVDQELDINRLSDYDVDHIVPQSFLKDDSIDNKVLTRSDKARGKSDNVPSEEVVKKMKNYWRQLLNAKLITQRKFDNLTKAERGGLSELDKAGFIKRQLVETRQITKHVAQILDSRMNTKYDENDKLIREVKVITLKSKLVSDFRKDFQFYKVREINNYHHAHDAYLNAVVGTALIKKYPKLESEFVYGDYKVYDVRKMIAKSEQEIGKATAKYFFYSNIMNFFKTEITLANGEIRKRPLIETNGETGEIVWDKGRDFATVRKVLSMPQVNIVKKTEVQTGGFSKESILPKRNSDKLIARKKDWDPKKYGGFDSPTVAYSVLVVAKVEKGKSKKLKSVKELLGITIMERSSFEKNPIDFLEAKGYKEVKKDLIIKLPKYSLFELENGRKRMLASAGELQKGNELALPSKYVNFLYLASHYEKLKGSPEDNEQKQLFVEQHKHYLDEIIEQISEFSKRVILADANLDKVLSAYNKHRDKPIREQAENIIHLFTLTNLGAPAAFKYFDTTIDRKRYTSTKEVLDATLIHQSITGLYETRIDLSQLGGDGGPAPEAAAKGGTLNIEDEHRLHETSKEPDVSLGSTWLSDFPQAWAETGGMGLAVRQAPLIIPLKATSTPVSIKQYPMSQEARLGIKPHIQRLLDQGILVPCQSPWNTPLLPVKKPGTNDYRPVQDLREVNKRVEDIHPTVPNPYNLLSGLPPSHQWYTVLDLKDAFFCLRLHPTSQPLFAFEWRDPEMGISGQLTWTRLPQGFKNSPTLFNEALHRDLADFRIQHPDLILLQYVDDLLLAATSELDCQQGTRALLQTLGNLGYRASAKKAQICQKQVKYLGYLLKEGQRWLTEARKETVMGQPTPKTPRQLREFLGTAGFCRLWIPGFAEMAAPLYPLTKPGTLFNWGPDQQKAYQEIKQALLTAPALGLPDLTKPFELFVDEKQGYAKGVLTQKLGPWRRPVAYLSKKLDPVAAGWPPCLRMVAAIAVLTKDAGKLTMGQPLVILAPHAVEALVKQPPDRWLSNARMTHYQALLLDTDRVQFGPVVALNPATLLPLPEEGLQHNCLDILAEAHGTRPDLTDQPLPDADHTWYTDGSSLLQEGQRKAGAAVTTETEVIWAKALPAGTSAQRAELIALTQALKMAEGKKLNVYTDSRYAFATAHIHGEIYRRRGWLTSEGKEIKNKDEILALLKALFLPKRLSIIHCPGHQKGHSAEARGNRMADQAARKAAITETPDTSTLLAGKRTADGSEFEKRTADGSEFESPKKKAKVE

SEQ ID NO: 2741 - protein, 2115 aa, synthetic construct
MPAAKRVKLDGGDKKYSIGLDIGTNSVGWAVITDEYKVPSKKFKVLGNTDRHSIKKNLIGALLFDSGETAEATRLKRTARRRYTRRKNRICYLQEIFSNEMAKVDDSFFHRLEESFLVEEDKKHERHPIFGNIVDEVAYHEKYPTIYHLRKKLVDSTDKADLRLIYLALAHMIKFRGHFLIEGDLNPDNSDVDKLFIQLVQTYNQLFEENPINASGVDAKAILSARLSKSRRLENLIAQLPGEKKNGLFGNLIALSLGLTPNFKSNFDLAEDAKLQLSKDTYDDDLDNLLAQIGDQYADLFLAAKNLSDAILLSDILRVNTEITKAPLSASMIKRYDEHHQDLTLLKALVRQQLPEKYKEIFFDQSKNGYAGYIDGGASQEEFYKFIKPILEKMDGTEELLVKLNREDLLRKQRTFDNGSIPHQIHLGELHAILRRQEDFYPFLKDNREKIEKILTFRIPYYVGPLARGNSRFAWMTRKSEETITPWNFEEVVDKGASAQSFIERMTNFDKNLPNEKVLPKHSLLYEYFTVYNELTKVKYVTEGMRKPAFLSGEQKKAIVDLLFKTNRKVTVKQLKEDYFKKIECFDSVEISGVEDRFNASLGTYHDLLKIIKDKDFLDNEENEDILEDIVLTLTLFEDREMIEERLKTYAHLFDDKVMKQLKRRRYTGWGRLSRKLINGIRDKQSGKTILDFLKSDGFANRNFMQLIHDDSLTFKEDIQKAQVSGQGDSLHEHIANLAGSPAIKKGILQTVKVVDELVKVMGRHKPENIVIEMARENQTTQKGQKNSRERMKRIEEGIKELGSQILKEHPVENTQLQNEKLYLYYLQNGRDMYVDQELDINRLSDYDVDHIVPQSFLKDDSIDNKVLTRSDKARGKSDNVPSEEVVKKMKNYWRQLLNAKLITQRKFDNLTKAERGGLSELDKAGFIKRQLVETRQITKHVAQILDSRMNTKYDENDKLIREVKVITLKSKLVSDFRKDFQFYKVREINNYHHAHDAYLNAVVGTALIKKYPKLESEFVYGDYKVYDVRKMIAKSEQEIGKATAKYFFYSNIMNFFKTEITLANGEIRKRPLIETNGETGEIVWDKGRDFATVRKVLSMPQVNIVKKTEVQTGGFSKESILPKRNSDKLIARKKDWDPKKYGGFDSPTVAYSVLVVAKVEKGKSKKLKSVKELLGITIMERSSFEKNPIDFLEAKGYKEVKKDLIIKLPKYSLFELENGRKRMLASAGELQKGNELALPSKYVNFLYLASHYEKLKGSPEDNEQKQLFVEQHKHYLDEIIEQISEFSKRVILADANLDKVLSAYNKHRDKPIREQAENIIHLFTLTNLGAPAAFKYFDTTIDRKRYTSTKEVLDATLIHQSITGLYETRIDLSQLGGDGGGGGGSGGGGSGGGGSGGGGSGGGGSGGGGSGGTLNIEDEHRLHETSKEPDVSLGSTWLSDFPQAWAETGGMGLAVRQAPLIIPLKATSTPVSIKQYPMSQEARLGIKPHIQRLLDQGILVPCQSPWNTPLLPVKKPGTNDYRPVQDLREVNKRVEDIHPTVPNPYNLLSGLPPSHQWYTVLDLKDAFFCLRLHPTSQPLFAFEWRDPEMGISGQLTWTRLPQGFKNSPTLFNEALHRDLADFRIQHPDLILLQYVDDLLLAATSELDCQQGTRALLQTLGNLGYRASAKKAQICQKQVKYLGYLLKEGQRWLTEARKETVMGQPTPKTPRQLREFLGTAGFCRLWIPGFAEMAAPLYPLTKPGTLFNWGPDQQKAYQEIKQALLTAPALGLPDLTKPFELFVDEKQGYAKGVLTQKLGPWRRPVAYLSKKLDPVAAGWPPCLRMVAAIAVLTKDAGKLTMGQPLVILAPHAVEALVKQPPDRWLSNARMTHYQALLLDTDRVQFGPVVALNPATLLPLPEEGLQHNCLDILAEAHGTRPDLTDQPLPDADHTWYTDGSSLLQEGQRKAGAAVTTETEVIWAKALPAGTSAQRAELIALTQALKMAEGKKLNVYTDSRYAFATAHIHGEIYRRRGWLTSEGKEIKNKDEILALLKALFLPKRLSIIHCPGHQKGHSAEARGNRMADQAARKAAITETPDTSTLLAGKRTADGSEFEKRTADGSEFESPKKKAKVE

SEQ ID NO: 2742 - protein, 2094 aa, synthetic construct
MPAAKRVKLDGGDKKYSIGLDIGTNSVGWAVITDEYKVPSKKFKVLGNTDRHSIKKNLIGALLFDSGETAEATRLKRTARRRYTRRKNRICYLQEIFSNEMAKVDDSFFHRLEESFLVEEDKKHERHPIFGNIVDEVAYHEKYPTIYHLRKKLVDSTDKADLRLIYLALAHMIKFRGHFLIEGDLNPDNSDVDKLFIQLVQTYNQLFEENPINASGVDAKAILSARLSKSRRLENLIAQLPGEKKNGLFGNLIALSLGLTPNFKSNFDLAEDAKLQLSKDTYDDDLDNLLAQIGDQYADLFLAAKNLSDAILLSDILRVNTEITKAPLSASMIKRYDEHHQDLTLLKALVRQQLPEKYKEIFFDQSKNGYAGYIDGGASQEEFYKFIKPILEKMDGTEELLVKLNREDLLRKQRTFDNGSIPHQIHLGELHAILRRQEDFYPFLKDNREKIEKILTFRIPYYVGPLARGNSRFAWMTRKSEETITPWNFEEVVDKGASAQSFIERMTNFDKNLPNEKVLPKHSLLYEYFTVYNELTKVKYVTEGMRKPAFLSGEQKKAIVDLLFKTNRKVTVKQLKEDYFKKIECFDSVEISGVEDRFNASLGTYHDLLKIIKDKDFLDNEENEDILEDIVLTLTLFEDREMIEERLKTYAHLFDDKVMKQLKRRRYTGWGRLSRKLINGIRDKQSGKTILDFLKSDGFANRNFMQLIHDDSLTFKEDIQKAQVSGQGDSLHEHIANLAGSPAIKKGILQTVKVVDELVKVMGRHKPENIVIEMARENQTTQKGQKNSRERMKRIEEGIKELGSQILKEHPVENTQLQNEKLYLYYLQNGRDMYVDQELDINRLSDYDVDHIVPQSFLKDDSIDNKVLTRSDKARGKSDNVPSEEVVKKMKNYWRQLLNAKLITQRKFDNLTKAERGGLSELDKAGFIKRQLVETRQITKHVAQILDSRMNTKYDENDKLIREVKVITLKSKLVSDFRKDFQFYKVREINNYHHAHDAYLNAVVGTALIKKYPKLESEFVYGDYKVYDVRKMIAKSEQEIGKATAKYFFYSNIMNFFKTEITLANGEIRKRPLIETNGETGEIVWDKGRDFATVRKVLSMPQVNIVKKTEVQTGGFSKESILPKRNSDKLIARKKDWDPKKYGGFDSPTVAYSVLVVAKVEKGKSKKLKSVKELLGITIMERSSFEKNPIDFLEAKGYKEVKKDLIIKLPKYSLFELENGRKRMLASAGELQKGNELALPSKYVNFLYLASHYEKLKGSPEDNEQKQLFVEQHKHYLDEIIEQISEFSKRVILADANLDKVLSAYNKHRDKPIREQAENIIHLFTLTNLGAPAAFKYFDTTIDRKRYTSTKEVLDATLIHQSITGLYETRIDLSQLGGDGGGGGPAPGGSGGTLNIEDEHRLHETSKEPDVSLGSTWLSDFPQAWAETGGMGLAVRQAPLIIPLKATSTPVSIKQYPMSQEARLGIKPHIQRLLDQGILVPCQSPWNTPLLPVKKPGTNDYRPVQDLREVNKRVEDIHPTVPNPYNLLSGLPPSHQWYTVLDLKDAFFCLRLHPTSQPLFAFEWRDPEMGISGQLTWTRLPQGFKNSPTLFNEALHRDLADFRIQHPDLILLQYVDDLLLAATSELDCQQGTRALLQTLGNLGYRASAKKAQICQKQVKYLGYLLKEGQRWLTEARKETVMGQPTPKTPRQLREFLGTAGFCRLWIPGFAEMAAPLYPLTKPGTLFNWGPDQQKAYQEIKQALLTAPALGLPDLTKPFELFVDEKQGYAKGVLTQKLGPWRRPVAYLSKKLDPVAAGWPPCLRMVAAIAVLTKDAGKLTMGQPLVILAPHAVEALVKQPPDRWLSNARMTHYQALLLDTDRVQFGPVVALNPATLLPLPEEGLQHNCLDILAEAHGTRPDLTDQPLPDADHTWYTDGSSLLQEGQRKAGAAVTTETEVIWAKALPAGTSAQRAELIALTQALKMAEGKKLNVYTDSRYAFATAHIHGEIYRRRGWLTSEGKEIKNKDEILALLKALFLPKRLSIIHCPGHQKGHSAEARGNRMADQAARKAAITETPDTSTLLAGKRTADGSEFEKRTADGSEFESPKKKAKVE

SEQ ID NO: 2743 - protein, 2091 aa, synthetic construct
MPAAKRVKLDGGDKKYSIGLDIGTNSVGWAVITDEYKVPSKKFKVLGNTDRHSIKKNLIGALLFDSGETAEATRLKRTARRRYTRRKNRICYLQEIFSNEMAKVDDSFFHRLEESFLVEEDKKHERHPIFGNIVDEVAYHEKYPTIYHLRKKLVDSTDKADLRLIYLALAHMIKFRGHFLIEGDLNPDNSDVDKLFIQLVQTYNQLFEENPINASGVDAKAILSARLSKSRRLENLIAQLPGEKKNGLFGNLIALSLGLTPNFKSNFDLAEDAKLQLSKDTYDDDLDNLLAQIGDQYADLFLAAKNLSDAILLSDILRVNTEITKAPLSASMIKRYDEHHQDLTLLKALVRQQLPEKYKEIFFDQSKNGYAGYIDGGASQEEFYKFIKPILEKMDGTEELLVKLNREDLLRKQRTFDNGSIPHQIHLGELHAILRRQEDFYPFLKDNREKIEKILTFRIPYYVGPLARGNSRFAWMTRKSEETITPWNFEEVVDKGASAQSFIERMTNFDKNLPNEKVLPKHSLLYEYFTVYNELTKVKYVTEGMRKPAFLSGEQKKAIVDLLFKTNRKVTVKQLKEDYFKKIECFDSVEISGVEDRFNASLGTYHDLLKIIKDKDFLDNEENEDILEDIVLTLTLFEDREMIEERLKTYAHLFDDKVMKQLKRRRYTGWGRLSRKLINGIRDKQSGKTILDFLKSDGFANRNFMQLIHDDSLTFKEDIQKAQVSGQGDSLHEHIANLAGSPAIKKGILQTVKVVDELVKVMGRHKPENIVIEMARENQTTQKGQKNSRERMKRIEEGIKELGSQILKEHPVENTQLQNEKLYLYYLQNGRDMYVDQELDINRLSDYDVDHIVPQSFLKDDSIDNKVLTRSDKARGKSDNVPSEEVVKKMKNYWRQLLNAKLITQRKFDNLTKAERGGLSELDKAGFIKRQLVETRQITKHVAQILDSRMNTKYDENDKLIREVKVITLKSKLVSDFRKDFQFYKVREINNYHHAHDAYLNAVVGTALIKKYPKLESEFVYGDYKVYDVRKMIAKSEQEIGKATAKYFFYSNIMNFFKTEITLANGEIRKRPLIETNGETGEIVWDKGRDFATVRKVLSMPQVNIVKKTEVQTGGFSKESILPKRNSDKLIARKKDWDPKKYGGFDSPTVAYSVLVVAKVEKGKSKKLKSVKELLGITIMERSSFEKNPIDFLEAKGYKEVKKDLIIKLPKYSLFELENGRKRMLASAGELQKGNELALPSKYVNFLYLASHYEKLKGSPEDNEQKQLFVEQHKHYLDEIIEQISEFSKRVILADANLDKVLSAYNKHRDKPIREQAENIIHLFTLTNLGAPAAFKYFDTTIDRKRYTSTKEVLDATLIHQSITGLYETRIDLSQLGGDGGPAPGGGGGTLNIEDEHRLHETSKEPDVSLGSTWLSDFPQAWAETGGMGLAVRQAPLIIPLKATSTPVSIKQYPMSQEARLGIKPHIQRLLDQGILVPCQSPWNTPLLPVKKPGTNDYRPVQDLREVNKRVEDIHPTVPNPYNLLSGLPPSHQWYTVLDLKDAFFCLRLHPTSQPLFAFEWRDPEMGISGQLTWTRLPQGFKNSPTLFNEALHRDLADFRIQHPDLILLQYVDDLLLAATSELDCQQGTRALLQTLGNLGYRASAKKAQICQKQVKYLGYLLKEGQRWLTEARKETVMGQPTPKTPRQLREFLGTAGFCRLWIPGFAEMAAPLYPLTKPGTLFNWGPDQQKAYQEIKQALLTAPALGLPDLTKPFELFVDEKQGYAKGVLTQKLGPWRRPVAYLSKKLDPVAAGWPPCLRMVAAIAVLTKDAGKLTMGQPLVILAPHAVEALVKQPPDRWLSNARMTHYQALLLDTDRVQFGPVVALNPATLLPLPEEGLQHNCLDILAEAHGTRPDLTDQPLPDADHTWYTDGSSLLQEGQRKAGAAVTTETEVIWAKALPAGTSAQRAELIALTQALKMAEGKKLNVYTDSRYAFATAHIHGEIYRRRGWLTSEGKEIKNKDEILALLKALFLPKRLSIIHCPGHQKGHSAEARGNRMADQAARKAAITETPDTSTLLAGKRTADGSEFEKRTADGSEFESPKKKAKVE

SEQ ID NO: 2744 - protein, 2096 aa, synthetic construct
MPAAKRVKLDGGDKKYSIGLDIGTNSVGWAVITDEYKVPSKKFKVLGNTDRHSIKKNLIGALLFDSGETAEATRLKRTARRRYTRRKNRICYLQEIFSNEMAKVDDSFFHRLEESFLVEEDKKHERHPIFGNIVDEVAYHEKYPTIYHLRKKLVDSTDKADLRLIYLALAHMIKFRGHFLIEGDLNPDNSDVDKLFIQLVQTYNQLFEENPINASGVDAKAILSARLSKSRRLENLIAQLPGEKKNGLFGNLIALSLGLTPNFKSNFDLAEDAKLQLSKDTYDDDLDNLLAQIGDQYADLFLAAKNLSDAILLSDILRVNTEITKAPLSASMIKRYDEHHQDLTLLKALVRQQLPEKYKEIFFDQSKNGYAGYIDGGASQEEFYKFIKPILEKMDGTEELLVKLNREDLLRKQRTFDNGSIPHQIHLGELHAILRRQEDFYPFLKDNREKIEKILTFRIPYYVGPLARGNSRFAWMTRKSEETITPWNFEEVVDKGASAQSFIERMTNFDKNLPNEKVLPKHSLLYEYFTVYNELTKVKYVTEGMRKPAFLSGEQKKAIVDLLFKTNRKVTVKQLKEDYFKKIECFDSVEISGVEDRFNASLGTYHDLLKIIKDKDFLDNEENEDILEDIVLTLTLFEDREMIEERLKTYAHLFDDKVMKQLKRRRYTGWGRLSRKLINGIRDKQSGKTILDFLKSDGFANRNFMQLIHDDSLTFKEDIQKAQVSGQGDSLHEHIANLAGSPAIKKGILQTVKVVDELVKVMGRHKPENIVIEMARENQTTQKGQKNSRERMKRIEEGIKELGSQILKEHPVENTQLQNEKLYLYYLQNGRDMYVDQELDINRLSDYDVDHIVPQSFLKDDSIDNKVLTRSDKARGKSDNVPSEEVVKKMKNYWRQLLNAKLITQRKFDNLTKAERGGLSELDKAGFIKRQLVETRQITKHVAQILDSRMNTKYDENDKLIREVKVITLKSKLVSDFRKDFQFYKVREINNYHHAHDAYLNAVVGTALIKKYPKLESEFVYGDYKVYDVRKMIAKSEQEIGKATAKYFFYSNIMNFFKTEITLANGEIRKRPLIETNGETGEIVWDKGRDFATVRKVLSMPQVNIVKKTEVQTGGFSKESILPKRNSDKLIARKKDWDPKKYGGFDSPTVAYSVLVVAKVEKGKSKKLKSVKELLGITIMERSSFEKNPIDFLEAKGYKEVKKDLIIKLPKYSLFELENGRKRMLASAGELQKGNELALPSKYVNFLYLASHYEKLKGSPEDNEQKQLFVEQHKHYLDEIIEQISEFSKRVILADANLDKVLSAYNKHRDKPIREQAENIIHLFTLTNLGAPAAFKYFDTTIDRKRYTSTKEVLDATLIHQSITGLYETRIDLSQLGGDGGGGSEAAAKPAPGGTLNIEDEHRLHETSKEPDVSLGSTWLSDFPQAWAETGGMGLAVRQAPLIIPLKATSTPVSIKQYPMSQEARLGIKPHIQRLLDQGILVPCQSPWNTPLLPVKKPGTNDYRPVQDLREVNKRVEDIHPTVPNPYNLLSGLPPSHQWYTVLDLKDAFFCLRLHPTSQPLFAFEWRDPEMGISGQLTWTRLPQGFKNSPTLFNEALHRDLADFRIQHPDLILLQYVDDLLLAATSELDCQQGTRALLQTLGNLGYRASAKKAQICQKQVKYLGYLLKEGQRWLTEARKETVMGQPTPKTPRQLREFLGTAGFCRLWIPGFAEMAAPLYPLTKPGTLFNWGPDQQKAYQEIKQALLTAPALGLPDLTKPFELFVDEKQGYAKGVLTQKLGPWRRPVAYLSKKLDPVAAGWPPCLRMVAAIAVLTKDAGKLTMGQPLVILAPHAVEALVKQPPDRWLSNARMTHYQALLLDTDRVQFGPVVALNPATLLPLPEEGLQHNCLDILAEAHGTRPDLTDQPLPDADHTWYTDGSSLLQEGQRKAGAAVTTETEVIWAKALPAGTSAQRAELIALTQALKMAEGKKLNVYTDSRYAFATAHIHGEIYRRRGWLTSEGKEIKNKDEILALLKALFLPKRLSIIHCPGHQKGHSAEARGNRMADQAARKAAITETPDTSTLLAGKRTADGSEFEKRTADGSEFESPKKKAKVE

SEQ ID NO: 2745 - protein, 2096 aa, synthetic construct
MPAAKRVKLDGGDKKYSIGLDIGTNSVGWAVITDEYKVPSKKFKVLGNTDRHSIKKNLIGALLFDSGETAEATRLKRTARRRYTRRKNRICYLQEIFSNEMAKVDDSFFHRLEESFLVEEDKKHERHPIFGNIVDEVAYHEKYPTIYHLRKKLVDSTDKADLRLIYLALAHMIKFRGHFLIEGDLNPDNSDVDKLFIQLVQTYNQLFEENPINASGVDAKAILSARLSKSRRLENLIAQLPGEKKNGLFGNLIALSLGLTPNFKSNFDLAEDAKLQLSKDTYDDDLDNLLAQIGDQYADLFLAAKNLSDAILLSDILRVNTEITKAPLSASMIKRYDEHHQDLTLLKALVRQQLPEKYKEIFFDQSKNGYAGYIDGGASQEEFYKFIKPILEKMDGTEELLVKLNREDLLRKQRTFDNGSIPHQIHLGELHAILRRQEDFYPFLKDNREKIEKILTFRIPYYVGPLARGNSRFAWMTRKSEETITPWNFEEVVDKGASAQSFIERMTNFDKNLPNEKVLPKHSLLYEYFTVYNELTKVKYVTEGMRKPAFLSGEQKKAIVDLLFKTNRKVTVKQLKEDYFKKIECFDSVEISGVEDRFNASLGTYHDLLKIIKDKDFLDNEENEDILEDIVLTLTLFEDREMIEERLKTYAHLFDDKVMKQLKRRRYTGWGRLSRKLINGIRDKQSGKTILDFLKSDGFANRNFMQLIHDDSLTFKEDIQKAQVSGQGDSLHEHIANLAGSPAIKKGILQTVKVVDELVKVMGRHKPENIVIEMARENQTTQKGQKNSRERMKRIEEGIKELGSQILKEHPVENTQLQNEKLYLYYLQNGRDMYVDQELDINRLSDYDVDHIVPQSFLKDDSIDNKVLTRSDKARGKSDNVPSEEVVKKMKNYWRQLLNAKLITQRKFDNLTKAERGGLSELDKAGFIKRQLVETRQITKHVAQILDSRMNTKYDENDKLIREVKVITLKSKLVSDFRKDFQFYKVREINNYHHAHDAYLNAVVGTALIKKYPKLESEFVYGDYKVYDVRKMIAKSEQEIGKATAKYFFYSNIMNFFKTEITLANGEIRKRPLIETNGETGEIVWDKGRDFATVRKVLSMPQVNIVKKTEVQTGGFSKESILPKRNSDKLIARKKDWDPKKYGGFDSPTVAYSVLVVAKVEKGKSKKLKSVKELLGITIMERSSFEKNPIDFLEAKGYKEVKKDLIIKLPKYSLFELENGRKRMLASAGELQKGNELALPSKYVNFLYLASHYEKLKGSPEDNEQKQLFVEQHKHYLDEIIEQISEFSKRVILADANLDKVLSAYNKHRDKPIREQAENIIHLFTLTNLGAPAAFKYFDTTIDRKRYTSTKEVLDATLIHQSITGLYETRIDLSQLGGDGGEAAAKGGGGGSGGTLNIEDEHRLHETSKEPDVSLGSTWLSDFPQAWAETGGMGLAVRQAPLIIPLKATSTPVSIKQYPMSQEARLGIKPHIQRLLDQGILVPCQSPWNTPLLPVKKPGTNDYRPVQDLREVNKRVEDIHPTVPNPYNLLSGLPPSHQWYTVLDLKDAFFCLRLHPTSQPLFAFEWRDPEMGISGQLTWTRLPQGFKNSPTLFNEALHRDLADFRIQHPDLILLQYVDDLLLAATSELDCQQGTRALLQTLGNLGYRASAKKAQICQKQVKYLGYLLKEGQRWLTEARKETVMGQPTPKTPRQLREFLGTAGFCRLWIPGFAEMAAPLYPLTKPGTLFNWGPDQQKAYQEIKQALLTAPALGLPDLTKPFELFVDEKQGYAKGVLTQKLGPWRRPVAYLSKKLDPVAAGWPPCLRMVAAIAVLTKDAGKLTMGQPLVILAPHAVEALVKQPPDRWLSNARMTHYQALLLDTDRVQFGPVVALNPATLLPLPEEGLQHNCLDILAEAHGTRPDLTDQPLPDADHTWYTDGSSLLQEGQRKAGAAVTTETEVIWAKALPAGTSAQRAELIALTQALKMAEGKKLNVYTDSRYAFATAHIHGEIYRRRGWLTSEGKEIKNKDEILALLKALFLPKRLSIIHCPGHQKGHSAEARGNRMADQAARKAAITETPDTSTLLAGKRTADGSEFEKRTADGSEFESPKKKAKVE

SEQ ID NO: 2746 - protein, 2093 aa, synthetic construct
MPAAKRVKLDGGDKKYSIGLDIGTNSVGWAVITDEYKVPSKKFKVLGNTDRHSIKKNLIGALLFDSGETAEATRLKRTARRRYTRRKNRICYLQEIFSNEMAKVDDSFFHRLEESFLVEEDKKHERHPIFGNIVDEVAYHEKYPTIYHLRKKLVDSTDKADLRLIYLALAHMIKFRGHFLIEGDLNPDNSDVDKLFIQLVQTYNQLFEENPINASGVDAKAILSARLSKSRRLENLIAQLPGEKKNGLFGNLIALSLGLTPNFKSNFDLAEDAKLQLSKDTYDDDLDNLLAQIGDQYADLFLAAKNLSDAILLSDILRVNTEITKAPLSASMIKRYDEHHQDLTLLKALVRQQLPEKYKEIFFDQSKNGYAGYIDGGASQEEFYKFIKPILEKMDGTEELLVKLNREDLLRKQRTFDNGSIPHQIHLGELHAILRRQEDFYPFLKDNREKIEKILTFRIPYYVGPLARGNSRFAWMTRKSEETITPWNFEEVVDKGASAQSFIERMTNFDKNLPNEKVLPKHSLLYEYFTVYNELTKVKYVTEGMRKPAFLSGEQKKAIVDLLFKTNRKVTVKQLKEDYFKKIECFDSVEISGVEDRFNASLGTYHDLLKIIKDKDFLDNEENEDILEDIVLTLTLFEDREMIEERLKTYAHLFDDKVMKQLKRRRYTGWGRLSRKLINGIRDKQSGKTILDFLKSDGFANRNFMQLIHDDSLTFKEDIQKAQVSGQGDSLHEHIANLAGSPAIKKGILQTVKVVDELVKVMGRHKPENIVIEMARENQTTQKGQKNSRERMKRIEEGIKELGSQILKEHPVENTQLQNEKLYLYYLQNGRDMYVDQELDINRLSDYDVDHIVPQSFLKDDSIDNKVLTRSDKARGKSDNVPSEEVVKKMKNYWRQLLNAKLITQRKFDNLTKAERGGLSELDKAGFIKRQLVETRQITKHVAQILDSRMNTKYDENDKLIREVKVITLKSKLVSDFRKDFQFYKVREINNYHHAHDAYLNAVVGTALIKKYPKLESEFVYGDYKVYDVRKMIAKSEQEIGKATAKYFFYSNIMNFFKTEITLANGEIRKRPLIETNGETGEIVWDKGRDFATVRKVLSMPQVNIVKKTEVQTGGFSKESILPKRNSDKLIARKKDWDPKKYGGFDSPTVAYSVLVVAKVEKGKSKKLKSVKELLGITIMERSSFEKNPIDFLEAKGYKEVKKDLIIKLPKYSLFELENGRKRMLASAGELQKGNELALPSKYVNFLYLASHYEKLKGSPEDNEQKQLFVEQHKHYLDEIIEQISEFSKRVILADANLDKVLSAYNKHRDKPIREQAENIIHLFTLTNLGAPAAFKYFDTTIDRKRYTSTKEVLDATLIHQSITGLYETRIDLSQLGGDGGGGGEAAAKGGTLNIEDEHRLHETSKEPDVSLGSTWLSDFPQAWAETGGMGLAVRQAPLIIPLKATSTPVSIKQYPMSQEARLGIKPHIQRLLDQGILVPCQSPWNTPLLPVKKPGTNDYRPVQDLREVNKRVEDIHPTVPNPYNLLSGLPPSHQWYTVLDLKDAFFCLRLHPTSQPLFAFEWRDPEMGISGQLTWTRLPQGFKNSPTLFNEALHRDLADFRIQHPDLILLQYVDDLLLAATSELDCQQGTRALLQTLGNLGYRASAKKAQICQKQVKYLGYLLKEGQRWLTEARKETVMGQPTPKTPRQLREFLGTAGFCRLWIPGFAEMAAPLYPLTKPGTLFNWGPDQQKAYQEIKQALLTAPALGLPDLTKPFELFVDEKQGYAKGVLTQKLGPWRRPVAYLSKKLDPVAAGWPPCLRMVAAIAVLTKDAGKLTMGQPLVILAPHAVEALVKQPPDRWLSNARMTHYQALLLDTDRVQFGPVVALNPATLLPLPEEGLQHNCLDILAEAHGTRPDLTDQPLPDADHTWYTDGSSLLQEGQRKAGAAVTTETEVIWAKALPAGTSAQRAELIALTQALKMAEGKKLNVYTDSRYAFATAHIHGEIYRRRGWLTSEGKEIKNKDEILALLKALFLPKRLSIIHCPGHQKGHSAEARGNRMADQAARKAAITETPDTSTLLAGKRTADGSEFEKRTADGSEFESPKKKAKVE

SEQ ID NO: 2747 - protein, 2096 aa, synthetic construct
MPAAKRVKLDGGDKKYSIGLDIGTNSVGWAVITDEYKVPSKKFKVLGNTDRHSIKKNLIGALLFDSGETAEATRLKRTARRRYTRRKNRICYLQEIFSNEMAKVDDSFFHRLEESFLVEEDKKHERHPIFGNIVDEVAYHEKYPTIYHLRKKLVDSTDKADLRLIYLALAHMIKFRGHFLIEGDLNPDNSDVDKLFIQLVQTYNQLFEENPINASGVDAKAILSARLSKSRRLENLIAQLPGEKKNGLFGNLIALSLGLTPNFKSNFDLAEDAKLQLSKDTYDDDLDNLLAQIGDQYADLFLAAKNLSDAILLSDILRVNTEITKAPLSASMIKRYDEHHQDLTLLKALVRQQLPEKYKEIFFDQSKNGYAGYIDGGASQEEFYKFIKPILEKMDGTEELLVKLNREDLLRKQRTFDNGSIPHQIHLGELHAILRRQEDFYPFLKDNREKIEKILTFRIPYYVGPLARGNSRFAWMTRKSEETITPWNFEEVVDKGASAQSFIERMTNFDKNLPNEKVLPKHSLLYEYFTVYNELTKVKYVTEGMRKPAFLSGEQKKAIVDLLFKTNRKVTVKQLKEDYFKKIECFDSVEISGVEDRFNASLGTYHDLLKIIKDKDFLDNEENEDILEDIVLTLTLFEDREMIEERLKTYAHLFDDKVMKQLKRRRYTGWGRLSRKLINGIRDKQSGKTILDFLKSDGFANRNFMQLIHDDSLTFKEDIQKAQVSGQGDSLHEHIANLAGSPAIKKGILQTVKVVDELVKVMGRHKPENIVIEMARENQTTQKGQKNSRERMKRIEEGIKELGSQILKEHPVENTQLQNEKLYLYYLQNGRDMYVDQELDINRLSDYDVDHIVPQSFLKDDSIDNKVLTRSDKARGKSDNVPSEEVVKKMKNYWRQLLNAKLITQRKFDNLTKAERGGLSELDKAGFIKRQLVETRQITKHVAQILDSRMNTKYDENDKLIREVKVITLKSKLVSDFRKDFQFYKVREINNYHHAHDAYLNAVVGTALIKKYPKLESEFVYGDYKVYDVRKMIAKSEQEIGKATAKYFFYSNIMNFFKTEITLANGEIRKRPLIETNGETGEIVWDKGRDFATVRKVLSMPQVNIVKKTEVQTGGFSKESILPKRNSDKLIARKKDWDPKKYGGFDSPTVAYSVLVVAKVEKGKSKKLKSVKELLGITIMERSSFEKNPIDFLEAKGYKEVKKDLIIKLPKYSLFELENGRKRMLASAGELQKGNELALPSKYVNFLYLASHYEKLKGSPEDNEQKQLFVEQHKHYLDEIIEQISEFSKRVILADANLDKVLSAYNKHRDKPIREQAENIIHLFTLTNLGAPAAFKYFDTTIDRKRYTSTKEVLDATLIHQSITGLYETRIDLSQLGGDGGGGSGSSEAAAKGGTLNIEDEHRLHETSKEPDVSLGSTWLSDFPQAWAETGGMGLAVRQAPLIIPLKATSTPVSIKQYPMSQEARLGIKPHIQRLLDQGILVPCQSPWNTPLLPVKKPGTNDYRPVQDLREVNKRVEDIHPTVPNPYNLLSGLPPSHQWYTVLDLKDAFFCLRLHPTSQPLFAFEWRDPEMGISGQLTWTRLPQGFKNSPTLFNEALHRDLADFRIQHPDLILLQYVDDLLLAATSELDCQQGTRALLQTLGNLGYRASAKKAQICQKQVKYLGYLLKEGQRWLTEARKETVMGQPTPKTPRQLREFLGTAGFCRLWIPGFAEMAAPLYPLTKPGTLFNWGPDQQKAYQEIKQALLTAPALGLPDLTKPFELFVDEKQGYAKGVLTQKLGPWRRPVAYLSKKLDPVAAGWPPCLRMVAAIAVLTKDAGKLTMGQPLVILAPHAVEALVKQPPDRWLSNARMTHYQALLLDTDRVQFGPVVALNPATLLPLPEEGLQHNCLDILAEAHGTRPDLTDQPLPDADHTWYTDGSSLLQEGQRKAGAAVTTETEVIWAKALPAGTSAQRAELIALTQALKMAEGKKLNVYTDSRYAFATAHIHGEIYRRRGWLTSEGKEIKNKDEILALLKALFLPKRLSIIHCPGHQKGHSAEARGNRMADQAARKAAITETPDTSTLLAGKRTADGSEFEKRTADGSEFESPKKKAKVE

SEQ ID NO: 2748 - protein, 2096 aa, synthetic construct
MPAAKRVKLDGGDKKYSIGLDIGTNSVGWAVITDEYKVPSKKFKVLGNTDRHSIKKNLIGALLFDSGETAEATRLKRTARRRYTRRKNRICYLQEIFSNEMAKVDDSFFHRLEESFLVEEDKKHERHPIFGNIVDEVAYHEKYPTIYHLRKKLVDSTDKADLRLIYLALAHMIKFRGHFLIEGDLNPDNSDVDKLFIQLVQTYNQLFEENPINASGVDAKAILSARLSKSRRLENLIAQLPGEKKNGLFGNLIALSLGLTPNFKSNFDLAEDAKLQLSKDTYDDDLDNLLAQIGDQYADLFLAAKNLSDAILLSDILRVNTEITKAPLSASMIKRYDEHHQDLTLLKALVRQQLPEKYKEIFFDQSKNGYAGYIDGGASQEEFYKFIKPILEKMDGTEELLVKLNREDLLRKQRTFDNGSIPHQIHLGELHAILRRQEDFYPFLKDNREKIEKILTFRIPYYVGPLARGNSRFAWMTRKSEETITPWNFEEVVDKGASAQSFIERMTNFDKNLPNEKVLPKHSLLYEYFTVYNELTKVKYVTEGMRKPAFLSGEQKKAIVDLLFKTNRKVTVKQLKEDYFKKIECFDSVEISGVEDRFNASLGTYHDLLKIIKDKDFLDNEENEDILEDIVLTLTLFEDREMIEERLKTYAHLFDDKVMKQLKRRRYTGWGRLSRKLINGIRDKQSGKTILDFLKSDGFANRNFMQLIHDDSLTFKEDIQKAQVSGQGDSLHEHIANLAGSPAIKKGILQTVKVVDELVKVMGRHKPENIVIEMARENQTTQKGQKNSRERMKRIEEGIKELGSQILKEHPVENTQLQNEKLYLYYLQNGRDMYVDQELDINRLSDYDVDHIVPQSFLKDDSIDNKVLTRSDKARGKSDNVPSEEVVKKMKNYWRQLLNAKLITQRKFDNLTKAERGGLSELDKAGFIKRQLVETRQITKHVAQILDSRMNTKYDENDKLIREVKVITLKSKLVSDFRKDFQFYKVREINNYHHAHDAYLNAVVGTALIKKYPKLESEFVYGDYKVYDVRKMIAKSEQEIGKATAKYFFYSNIMNFFKTEITLANGEIRKRPLIETNGETGEIVWDKGRDFATVRKVLSMPQVNIVKKTEVQTGGFSKESILPKRNSDKLIARKKDWDPKKYGGFDSPTVAYSVLVVAKVEKGKSKKLKSVKELLGITIMERSSFEKNPIDFLEAKGYKEVKKDLIIKLPKYSLFELENGRKRMLASAGELQKGNELALPSKYVNFLYLASHYEKLKGSPEDNEQKQLFVEQHKHYLDEIIEQISEFSKRVILADANLDKVLSAYNKHRDKPIREQAENIIHLFTLTNLGAPAAFKYFDTTIDRKRYTSTKEVLDATLIHQSITGLYETRIDLSQLGGDGGPAPGSSEAAAKGGTLNIEDEHRLHETSKEPDVSLGSTWLSDFPQAWAETGGMGLAVRQAPLIIPLKATSTPVSIKQYPMSQEARLGIKPHIQRLLDQGILVPCQSPWNTPLLPVKKPGTNDYRPVQDLREVNKRVEDIHPTVPNPYNLLSGLPPSHQWYTVLDLKDAFFCLRLHPTSQPLFAFEWRDPEMGISGQLTWTRLPQGFKNSPTLFNEALHRDLADFRIQHPDLILLQYVDDLLLAATSELDCQQGTRALLQTLGNLGYRASAKKAQICQKQVKYLGYLLKEGQRWLTEARKETVMGQPTPKTPRQLREFLGTAGFCRLWIPGFAEMAAPLYPLTKPGTLFNWGPDQQKAYQEIKQALLTAPALGLPDLTKPFELFVDEKQGYAKGVLTQKLGPWRRPVAYLSKKLDPVAAGWPPCLRMVAAIAVLTKDAGKLTMGQPLVILAPHAVEALVKQPPDRWLSNARMTHYQALLLDTDRVQFGPVVALNPATLLPLPEEGLQHNCLDILAEAHGTRPDLTDQPLPDADHTWYTDGSSLLQEGQRKAGAAVTTETEVIWAKALPAGTSAQRAELIALTQALKMAEGKKLNVYTDSRYAFATAHIHGEIYRRRGWLTSEGKEIKNKDEILALLKALFLPKRLSIIHCPGHQKGHSAEARGNRMADQAARKAAITETPDTSTLLAGKRTADGSEFEKRTADGSEFESPKKKAKVE

SEQ ID NO: 2749 - protein, 2095 aa, synthetic construct
MPAAKRVKLDGGDKKYSIGLDIGTNSVGWAVITDEYKVPSKKFKVLGNTDRHSIKKNLIGALLFDSGETAEATRLKRTARRRYTRRKNRICYLQEIFSNEMAKVDDSFFHRLEESFLVEEDKKHERHPIFGNIVDEVAYHEKYPTIYHLRKKLVDSTDKADLRLIYLALAHMIKFRGHFLIEGDLNPDNSDVDKLFIQLVQTYNQLFEENPINASGVDAKAILSARLSKSRRLENLIAQLPGEKKNGLFGNLIALSLGLTPNFKSNFDLAEDAKLQLSKDTYDDDLDNLLAQIGDQYADLFLAAKNLSDAILLSDILRVNTEITKAPLSASMIKRYDEHHQDLTLLKALVRQQLPEKYKEIFFDQSKNGYAGYIDGGASQEEFYKFIKPILEKMDGTEELLVKLNREDLLRKQRTFDNGSIPHQIHLGELHAILRRQEDFYPFLKDNREKIEKILTFRIPYYVGPLARGNSRFAWMTRKSEETITPWNFEEVVDKGASAQSFIERMTNFDKNLPNEKVLPKHSLLYEYFTVYNELTKVKYVTEGMRKPAFLSGEQKKAIVDLLFKTNRKVTVKQLKEDYFKKIECFDSVEISGVEDRFNASLGTYHDLLKIIKDKDFLDNEENEDILEDIVLTLTLFEDREMIEERLKTYAHLFDDKVMKQLKRRRYTGWGRLSRKLINGIRDKQSGKTILDFLKSDGFANRNFMQLIHDDSLTFKEDIQKAQVSGQGDSLHEHIANLAGSPAIKKGILQTVKVVDELVKVMGRHKPENIVIEMARENQTTQKGQKNSRERMKRIEEGIKELGSQILKEHPVENTQLQNEKLYLYYLQNGRDMYVDQELDINRLSDYDVDHIVPQSFLKDDSIDNKVLTRSDKARGKSDNVPSEEVVKKMKNYWRQLLNAKLITQRKFDNLTKAERGGLSELDKAGFIKRQLVETRQITKHVAQILDSRMNTKYDENDKLIREVKVITLKSKLVSDFRKDFQFYKVREINNYHHAHDAYLNAVVGTALIKKYPKLESEFVYGDYKVYDVRKMIAKSEQEIGKATAKYFFYSNIMNFFKTEITLANGEIRKRPLIETNGETGEIVWDKGRDFATVRKVLSMPQVNIVKKTEVQTGGFSKESILPKRNSDKLIARKKDWDPKKYGGFDSPTVAYSVLVVAKVEKGKSKKLKSVKELLGITIMERSSFEKNPIDFLEAKGYKEVKKDLIIKLPKYSLFELENGRKRMLASAGELQKGNELALPSKYVNFLYLASHYEKLKGSPEDNEQKQLFVEQHKHYLDEIIEQISEFSKRVILADANLDKVLSAYNKHRDKPIREQAENIIHLFTLTNLGAPAAFKYFDTTIDRKRYTSTKEVLDATLIHQSITGLYETRIDLSQLGGDGGGGGGSGGGGSGGTLNIEDEHRLHETSKEPDVSLGSTWLSDFPQAWAETGGMGLAVRQAPLIIPLKATSTPVSIKQYPMSQEARLGIKPHIQRLLDQGILVPCQSPWNTPLLPVKKPGTNDYRPVQDLREVNKRVEDIHPTVPNPYNLLSGLPPSHQWYTVLDLKDAFFCLRLHPTSQPLFAFEWRDPEMGISGQLTWTRLPQGFKNSPTLFNEALHRDLADFRIQHPDLILLQYVDDLLLAATSELDCQQGTRALLQTLGNLGYRASAKKAQICQKQVKYLGYLLKEGQRWLTEARKETVMGQPTPKTPRQLREFLGTAGFCRLWIPGFAEMAAPLYPLTKPGTLFNWGPDQQKAYQEIKQALLTAPALGLPDLTKPFELFVDEKQGYAKGVLTQKLGPWRRPVAYLSKKLDPVAAGWPPCLRMVAAIAVLTKDAGKLTMGQPLVILAPHAVEALVKQPPDRWLSNARMTHYQALLLDTDRVQFGPVVALNPATLLPLPEEGLQHNCLDILAEAHGTRPDLTDQPLPDADHTWYTDGSSLLQEGQRKAGAAVTTETEVIWAKALPAGTSAQRAELIALTQALKMAEGKKLNVYTDSRYAFATAHIHGEIYRRRGWLTSEGKEIKNKDEILALLKALFLPKRLSIIHCPGHQKGHSAEARGNRMADQAARKAAITETPDTSTLLAGKRTADGSEFEKRTADGSEFESPKKKAKVE

SEQ ID NO: 2750 - protein, 2091 aa, synthetic construct
MPAAKRVKLDGGDKKYSIGLDIGTNSVGWAVITDEYKVPSKKFKVLGNTDRHSIKKNLIGALLFDSGETAEATRLKRTARRRYTRRKNRICYLQEIFSNEMAKVDDSFFHRLEESFLVEEDKKHERHPIFGNIVDEVAYHEKYPTIYHLRKKLVDSTDKADLRLIYLALAHMIKFRGHFLIEGDLNPDNSDVDKLFIQLVQTYNQLFEENPINASGVDAKAILSARLSKSRRLENLIAQLPGEKKNGLFGNLIALSLGLTPNFKSNFDLAEDAKLQLSKDTYDDDLDNLLAQIGDQYADLFLAAKNLSDAILLSDILRVNTEITKAPLSASMIKRYDEHHQDLTLLKALVRQQLPEKYKEIFFDQSKNGYAGYIDGGASQEEFYKFIKPILEKMDGTEELLVKLNREDLLRKQRTFDNGSIPHQIHLGELHAILRRQEDFYPFLKDNREKIEKILTFRIPYYVGPLARGNSRFAWMTRKSEETITPWNFEEVVDKGASAQSFIERMTNFDKNLPNEKVLPKHSLLYEYFTVYNELTKVKYVTEGMRKPAFLSGEQKKAIVDLLFKTNRKVTVKQLKEDYFKKIECFDSVEISGVEDRFNASLGTYHDLLKIIKDKDFLDNEENEDILEDIVLTLTLFEDREMIEERLKTYAHLFDDKVMKQLKRRRYTGWGRLSRKLINGIRDKQSGKTILDFLKSDGFANRNFMQLIHDDSLTFKEDIQKAQVSGQGDSLHEHIANLAGSPAIKKGILQTVKVVDELVKVMGRHKPENIVIEMARENQTTQKGQKNSRERMKRIEEGIKELGSQILKEHPVENTQLQNEKLYLYYLQNGRDMYVDQELDINRLSDYDVDHIVPQSFLKDDSIDNKVLTRSDKARGKSDNVPSEEVVKKMKNYWRQLLNAKLITQRKFDNLTKAERGGLSELDKAGFIKRQLVETRQITKHVAQILDSRMNTKYDENDKLIREVKVITLKSKLVSDFRKDFQFYKVREINNYHHAHDAYLNAVVGTALIKKYPKLESEFVYGDYKVYDVRKMIAKSEQEIGKATAKYFFYSNIMNFFKTEITLANGEIRKRPLIETNGETGEIVWDKGRDFATVRKVLSMPQVNIVKKTEVQTGGFSKESILPKRNSDKLIARKKDWDPKKYGGFDSPTVAYSVLVVAKVEKGKSKKLKSVKELLGITIMERSSFEKNPIDFLEAKGYKEVKKDLIIKLPKYSLFELENGRKRMLASAGELQKGNELALPSKYVNFLYLASHYEKLKGSPEDNEQKQLFVEQHKHYLDEIIEQISEFSKRVILADANLDKVLSAYNKHRDKPIREQAENIIHLFTLTNLGAPAAFKYFDTTIDRKRYTSTKEVLDATLIHQSITGLYETRIDLSQLGGDGGGSSPAPGGTLNIEDEHRLHETSKEPDVSLGSTWLSDFPQAWAETGGMGLAVRQAPLIIPLKATSTPVSIKQYPMSQEARLGIKPHIQRLLDQGILVPCQSPWNTPLLPVKKPGTNDYRPVQDLREVNKRVEDIHPTVPNPYNLLSGLPPSHQWYTVLDLKDAFFCLRLHPTSQPLFAFEWRDPEMGISGQLTWTRLPQGFKNSPTLFNEALHRDLADFRIQHPDLILLQYVDDLLLAATSELDCQQGTRALLQTLGNLGYRASAKKAQICQKQVKYLGYLLKEGQRWLTEARKETVMGQPTPKTPRQLREFLGTAGFCRLWIPGFAEMAAPLYPLTKPGTLFNWGPDQQKAYQEIKQALLTAPALGLPDLTKPFELFVDEKQGYAKGVLTQKLGPWRRPVAYLSKKLDPVAAGWPPCLRMVAAIAVLTKDAGKLTMGQPLVILAPHAVEALVKQPPDRWLSNARMTHYQALLLDTDRVQFGPVVALNPATLLPLPEEGLQHNCLDILAEAHGTRPDLTDQPLPDADHTWYTDGSSLLQEGQRKAGAAVTTETEVIWAKALPAGTSAQRAELIALTQALKMAEGKKLNVYTDSRYAFATAHIHGEIYRRRGWLTSEGKEIKNKDEILALLKALFLPKRLSIIHCPGHQKGHSAEARGNRMADQAARKAAITETPDTSTLLAGKRTADGSEFEKRTADGSEFESPKKKAKVE

SEQ ID NO: 2751 - protein, 2096 aa, synthetic construct
MPAAKRVKLDGGDKKYSIGLDIGTNSVGWAVITDEYKVPSKKFKVLGNTDRHSIKKNLIGALLFDSGETAEATRLKRTARRRYTRRKNRICYLQEIFSNEMAKVDDSFFHRLEESFLVEEDKKHERHPIFGNIVDEVAYHEKYPTIYHLRKKLVDSTDKADLRLIYLALAHMIKFRGHFLIEGDLNPDNSDVDKLFIQLVQTYNQLFEENPINASGVDAKAILSARLSKSRRLENLIAQLPGEKKNGLFGNLIALSLGLTPNFKSNFDLAEDAKLQLSKDTYDDDLDNLLAQIGDQYADLFLAAKNLSDAILLSDILRVNTEITKAPLSASMIKRYDEHHQDLTLLKALVRQQLPEKYKEIFFDQSKNGYAGYIDGGASQEEFYKFIKPILEKMDGTEELLVKLNREDLLRKQRTFDNGSIPHQIHLGELHAILRRQEDFYPFLKDNREKIEKILTFRIPYYVGPLARGNSRFAWMTRKSEETITPWNFEEVVDKGASAQSFIERMTNFDKNLPNEKVLPKHSLLYEYFTVYNELTKVKYVTEGMRKPAFLSGEQKKAIVDLLFKTNRKVTVKQLKEDYFKKIECFDSVEISGVEDRFNASLGTYHDLLKIIKDKDFLDNEENEDILEDIVLTLTLFEDREMIEERLKTYAHLFDDKVMKQLKRRRYTGWGRLSRKLINGIRDKQSGKTILDFLKSDGFANRNFMQLIHDDSLTFKEDIQKAQVSGQGDSLHEHIANLAGSPAIKKGILQTVKVVDELVKVMGRHKPENIVIEMARENQTTQKGQKNSRERMKRIEEGIKELGSQILKEHPVENTQLQNEKLYLYYLQNGRDMYVDQELDINRLSDYDVDHIVPQSFLKDDSIDNKVLTRSDKARGKSDNVPSEEVVKKMKNYWRQLLNAKLITQRKFDNLTKAERGGLSELDKAGFIKRQLVETRQITKHVAQILDSRMNTKYDENDKLIREVKVITLKSKLVSDFRKDFQFYKVREINNYHHAHDAYLNAVVGTALIKKYPKLESEFVYGDYKVYDVRKMIAKSEQEIGKATAKYFFYSNIMNFFKTEITLANGEIRKRPLIETNGETGEIVWDKGRDFATVRKVLSMPQVNIVKKTEVQTGGFSKESILPKRNSDKLIARKKDWDPKKYGGFDSPTVAYSVLVVAKVEKGKSKKLKSVKELLGITIMERSSFEKNPIDFLEAKGYKEVKKDLIIKLPKYSLFELENGRKRMLASAGELQKGNELALPSKYVNFLYLASHYEKLKGSPEDNEQKQLFVEQHKHYLDEIIEQISEFSKRVILADANLDKVLSAYNKHRDKPIREQAENIIHLFTLTNLGAPAAFKYFDTTIDRKRYTSTKEVLDATLIHQSITGLYETRIDLSQLGGDGGGGSGGGEAAAKGGTLNIEDEHRLHETSKEPDVSLGSTWLSDFPQAWAETGGMGLAVRQAPLIIPLKATSTPVSIKQYPMSQEARLGIKPHIQRLLDQGILVPCQSPWNTPLLPVKKPGTNDYRPVQDLREVNKRVEDIHPTVPNPYNLLSGLPPSHQWYTVLDLKDAFFCLRLHPTSQPLFAFEWRDPEMGISGQLTWTRLPQGFKNSPTLFNEALHRDLADFRIQHPDLILLQYVDDLLLAATSELDCQQGTRALLQTLGNLGYRASAKKAQICQKQVKYLGYLLKEGQRWLTEARKETVMGQPTPKTPRQLREFLGTAGFCRLWIPGFAEMAAPLYPLTKPGTLFNWGPDQQKAYQEIKQALLTAPALGLPDLTKPFELFVDEKQGYAKGVLTQKLGPWRRPVAYLSKKLDPVAAGWPPCLRMVAAIAVLTKDAGKLTMGQPLVILAPHAVEALVKQPPDRWLSNARMTHYQALLLDTDRVQFGPVVALNPATLLPLPEEGLQHNCLDILAEAHGTRPDLTDQPLPDADHTWYTDGSSLLQEGQRKAGAAVTTETEVIWAKALPAGTSAQRAELIALTQALKMAEGKKLNVYTDSRYAFATAHIHGEIYRRRGWLTSEGKEIKNKDEILALLKALFLPKRLSIIHCPGHQKGHSAEARGNRMADQAARKAAITETPDTSTLLAGKRTADGSEFEKRTADGSEFESPKKKAKVE

SEQ ID NO: 2752 - protein, 2094 aa, synthetic construct
MPAAKRVKLDGGDKKYSIGLDIGTNSVGWAVITDEYKVPSKKFKVLGNTDRHSIKKNLIGALLFDSGETAEATRLKRTARRRYTRRKNRICYLQEIFSNEMAKVDDSFFHRLEESFLVEEDKKHERHPIFGNIVDEVAYHEKYPTIYHLRKKLVDSTDKADLRLIYLALAHMIKFRGHFLIEGDLNPDNSDVDKLFIQLVQTYNQLFEENPINASGVDAKAILSARLSKSRRLENLIAQLPGEKKNGLFGNLIALSLGLTPNFKSNFDLAEDAKLQLSKDTYDDDLDNLLAQIGDQYADLFLAAKNLSDAILLSDILRVNTEITKAPLSASMIKRYDEHHQDLTLLKALVRQQLPEKYKEIFFDQSKNGYAGYIDGGASQEEFYKFIKPILEKMDGTEELLVKLNREDLLRKQRTFDNGSIPHQIHLGELHAILRRQEDFYPFLKDNREKIEKILTFRIPYYVGPLARGNSRFAWMTRKSEETITPWNFEEVVDKGASAQSFIERMTNFDKNLPNEKVLPKHSLLYEYFTVYNELTKVKYVTEGMRKPAFLSGEQKKAIVDLLFKTNRKVTVKQLKEDYFKKIECFDSVEISGVEDRFNASLGTYHDLLKIIKDKDFLDNEENEDILEDIVLTLTLFEDREMIEERLKTYAHLFDDKVMKQLKRRRYTGWGRLSRKLINGIRDKQSGKTILDFLKSDGFANRNFMQLIHDDSLTFKEDIQKAQVSGQGDSLHEHIANLAGSPAIKKGILQTVKVVDELVKVMGRHKPENIVIEMARENQTTQKGQKNSRERMKRIEEGIKELGSQILKEHPVENTQLQNEKLYLYYLQNGRDMYVDQELDINRLSDYDVDHIVPQSFLKDDSIDNKVLTRSDKARGKSDNVPSEEVVKKMKNYWRQLLNAKLITQRKFDNLTKAERGGLSELDKAGFIKRQLVETRQITKHVAQILDSRMNTKYDENDKLIREVKVITLKSKLVSDFRKDFQFYKVREINNYHHAHDAYLNAVVGTALIKKYPKLESEFVYGDYKVYDVRKMIAKSEQEIGKATAKYFFYSNIMNFFKTEITLANGEIRKRPLIETNGETGEIVWDKGRDFATVRKVLSMPQVNIVKKTEVQTGGFSKESILPKRNSDKLIARKKDWDPKKYGGFDSPTVAYSVLVVAKVEKGKSKKLKSVKELLGITIMERSSFEKNPIDFLEAKGYKEVKKDLIIKLPKYSLFELENGRKRMLASAGELQKGNELALPSKYVNFLYLASHYEKLKGSPEDNEQKQLFVEQHKHYLDEIIEQISEFSKRVILADANLDKVLSAYNKHRDKPIREQAENIIHLFTLTNLGAPAAFKYFDTTIDRKRYTSTKEVLDATLIHQSITGLYETRIDLSQLGGDGGGGSPAPGSSGGTLNIEDEHRLHETSKEPDVSLGSTWLSDFPQAWAETGGMGLAVRQAPLIIPLKATSTPVSIKQYPMSQEARLGIKPHIQRLLDQGILVPCQSPWNTPLLPVKKPGTNDYRPVQDLREVNKRVEDIHPTVPNPYNLLSGLPPSHQWYTVLDLKDAFFCLRLHPTSQPLFAFEWRDPEMGISGQLTWTRLPQGFKNSPTLFNEALHRDLADFRIQHPDLILLQYVDDLLLAATSELDCQQGTRALLQTLGNLGYRASAKKAQICQKQVKYLGYLLKEGQRWLTEARKETVMGQPTPKTPRQLREFLGTAGFCRLWIPGFAEMAAPLYPLTKPGTLFNWGPDQQKAYQEIKQALLTAPALGLPDLTKPFELFVDEKQGYAKGVLTQKLGPWRRPVAYLSKKLDPVAAGWPPCLRMVAAIAVLTKDAGKLTMGQPLVILAPHAVEALVKQPPDRWLSNARMTHYQALLLDTDRVQFGPVVALNPATLLPLPEEGLQHNCLDILAEAHGTRPDLTDQPLPDADHTWYTDGSSLLQEGQRKAGAAVTTETEVIWAKALPAGTSAQRAELIALTQALKMAEGKKLNVYTDSRYAFATAHIHGEIYRRRGWLTSEGKEIKNKDEILALLKALFLPKRLSIIHCPGHQKGHSAEARGNRMADQAARKAAITETPDTSTLLAGKRTADGSEFEKRTADGSEFESPKKKAKVE

SEQ ID NO: 2753 - protein, 2096 aa, synthetic construct
MPAAKRVKLDGGDKKYSIGLDIGTNSVGWAVITDEYKVPSKKFKVLGNTDRHSIKKNLIGALLFDSGETAEATRLKRTARRRYTRRKNRICYLQEIFSNEMAKVDDSFFHRLEESFLVEEDKKHERHPIFGNIVDEVAYHEKYPTIYHLRKKLVDSTDKADLRLIYLALAHMIKFRGHFLIEGDLNPDNSDVDKLFIQLVQTYNQLFEENPINASGVDAKAILSARLSKSRRLENLIAQLPGEKKNGLFGNLIALSLGLTPNFKSNFDLAEDAKLQLSKDTYDDDLDNLLAQIGDQYADLFLAAKNLSDAILLSDILRVNTEITKAPLSASMIKRYDEHHQDLTLLKALVRQQLPEKYKEIFFDQSKNGYAGYIDGGASQEEFYKFIKPILEKMDGTEELLVKLNREDLLRKQRTFDNGSIPHQIHLGELHAILRRQEDFYPFLKDNREKIEKILTFRIPYYVGPLARGNSRFAWMTRKSEETITPWNFEEVVDKGASAQSFIERMTNFDKNLPNEKVLPKHSLLYEYFTVYNELTKVKYVTEGMRKPAFLSGEQKKAIVDLLFKTNRKVTVKQLKEDYFKKIECFDSVEISGVEDRFNASLGTYHDLLKIIKDKDFLDNEENEDILEDIVLTLTLFEDREMIEERLKTYAHLFDDKVMKQLKRRRYTGWGRLSRKLINGIRDKQSGKTILDFLKSDGFANRNFMQLIHDDSLTFKEDIQKAQVSGQGDSLHEHIANLAGSPAIKKGILQTVKVVDELVKVMGRHKPENIVIEMARENQTTQKGQKNSRERMKRIEEGIKELGSQILKEHPVENTQLQNEKLYLYYLQNGRDMYVDQELDINRLSDYDVDHIVPQSFLKDDSIDNKVLTRSDKARGKSDNVPSEEVVKKMKNYWRQLLNAKLITQRKFDNLTKAERGGLSELDKAGFIKRQLVETRQITKHVAQILDSRMNTKYDENDKLIREVKVITLKSKLVSDFRKDFQFYKVREINNYHHAHDAYLNAVVGTALIKKYPKLESEFVYGDYKVYDVRKMIAKSEQEIGKATAKYFFYSNIMNFFKTEITLANGEIRKRPLIETNGETGEIVWDKGRDFATVRKVLSMPQVNIVKKTEVQTGGFSKESILPKRNSDKLIARKKDWDPKKYGGFDSPTVAYSVLVVAKVEKGKSKKLKSVKELLGITIMERSSFEKNPIDFLEAKGYKEVKKDLIIKLPKYSLFELENGRKRMLASAGELQKGNELALPSKYVNFLYLASHYEKLKGSPEDNEQKQLFVEQHKHYLDEIIEQISEFSKRVILADANLDKVLSAYNKHRDKPIREQAENIIHLFTLTNLGAPAAFKYFDTTIDRKRYTSTKEVLDATLIHQSITGLYETRIDLSQLGGDGGPAPGGSEAAAKGGTLNIEDEHRLHETSKEPDVSLGSTWLSDFPQAWAETGGMGLAVRQAPLIIPLKATSTPVSIKQYPMSQEARLGIKPHIQRLLDQGILVPCQSPWNTPLLPVKKPGTNDYRPVQDLREVNKRVEDIHPTVPNPYNLLSGLPPSHQWYTVLDLKDAFFCLRLHPTSQPLFAFEWRDPEMGISGQLTWTRLPQGFKNSPTLFNEALHRDLADFRIQHPDLILLQYVDDLLLAATSELDCQQGTRALLQTLGNLGYRASAKKAQICQKQVKYLGYLLKEGQRWLTEARKETVMGQPTPKTPRQLREFLGTAGFCRLWIPGFAEMAAPLYPLTKPGTLFNWGPDQQKAYQEIKQALLTAPALGLPDLTKPFELFVDEKQGYAKGVLTQKLGPWRRPVAYLSKKLDPVAAGWPPCLRMVAAIAVLTKDAGKLTMGQPLVILAPHAVEALVKQPPDRWLSNARMTHYQALLLDTDRVQFGPVVALNPATLLPLPEEGLQHNCLDILAEAHGTRPDLTDQPLPDADHTWYTDGSSLLQEGQRKAGAAVTTETEVIWAKALPAGTSAQRAELIALTQALKMAEGKKLNVYTDSRYAFATAHIHGEIYRRRGWLTSEGKEIKNKDEILALLKALFLPKRLSIIHCPGHQKGHSAEARGNRMADQAARKAAITETPDTSTLLAGKRTADGSEFEKRTADGSEFESPKKKAKVE

SEQ ID NO: 2754 - protein, 2090 aa, synthetic construct
MPAAKRVKLDGGDKKYSIGLDIGTNSVGWAVITDEYKVPSKKFKVLGNTDRHSIKKNLIGALLFDSGETAEATRLKRTARRRYTRRKNRICYLQEIFSNEMAKVDDSFFHRLEESFLVEEDKKHERHPIFGNIVDEVAYHEKYPTIYHLRKKLVDSTDKADLRLIYLALAHMIKFRGHFLIEGDLNPDNSDVDKLFIQLVQTYNQLFEENPINASGVDAKAILSARLSKSRRLENLIAQLPGEKKNGLFGNLIALSLGLTPNFKSNFDLAEDAKLQLSKDTYDDDLDNLLAQIGDQYADLFLAAKNLSDAILLSDILRVNTEITKAPLSASMIKRYDEHHQDLTLLKALVRQQLPEKYKEIFFDQSKNGYAGYIDGGASQEEFYKFIKPILEKMDGTEELLVKLNREDLLRKQRTFDNGSIPHQIHLGELHAILRRQEDFYPFLKDNREKIEKILTFRIPYYVGPLARGNSRFAWMTRKSEETITPWNFEEVVDKGASAQSFIERMTNFDKNLPNEKVLPKHSLLYEYFTVYNELTKVKYVTEGMRKPAFLSGEQKKAIVDLLFKTNRKVTVKQLKEDYFKKIECFDSVEISGVEDRFNASLGTYHDLLKIIKDKDFLDNEENEDILEDIVLTLTLFEDREMIEERLKTYAHLFDDKVMKQLKRRRYTGWGRLSRKLINGIRDKQSGKTILDFLKSDGFANRNFMQLIHDDSLTFKEDIQKAQVSGQGDSLHEHIANLAGSPAIKKGILQTVKVVDELVKVMGRHKPENIVIEMARENQTTQKGQKNSRERMKRIEEGIKELGSQILKEHPVENTQLQNEKLYLYYLQNGRDMYVDQELDINRLSDYDVDHIVPQSFLKDDSIDNKVLTRSDKARGKSDNVPSEEVVKKMKNYWRQLLNAKLITQRKFDNLTKAERGGLSELDKAGFIKRQLVETRQITKHVAQILDSRMNTKYDENDKLIREVKVITLKSKLVSDFRKDFQFYKVREINNYHHAHDAYLNAVVGTALIKKYPKLESEFVYGDYKVYDVRKMIAKSEQEIGKATAKYFFYSNIMNFFKTEITLANGEIRKRPLIETNGETGEIVWDKGRDFATVRKVLSMPQVNIVKKTEVQTGGFSKESILPKRNSDKLIARKKDWDPKKYGGFDSPTVAYSVLVVAKVEKGKSKKLKSVKELLGITIMERSSFEKNPIDFLEAKGYKEVKKDLIIKLPKYSLFELENGRKRMLASAGELQKGNELALPSKYVNFLYLASHYEKLKGSPEDNEQKQLFVEQHKHYLDEIIEQISEFSKRVILADANLDKVLSAYNKHRDKPIREQAENIIHLFTLTNLGAPAAFKYFDTTIDRKRYTSTKEVLDATLIHQSITGLYETRIDLSQLGGDGGGGGGSGGTLNIEDEHRLHETSKEPDVSLGSTWLSDFPQAWAETGGMGLAVRQAPLIIPLKATSTPVSIKQYPMSQEARLGIKPHIQRLLDQGILVPCQSPWNTPLLPVKKPGTNDYRPVQDLREVNKRVEDIHPTVPNPYNLLSGLPPSHQWYTVLDLKDAFFCLRLHPTSQPLFAFEWRDPEMGISGQLTWTRLPQGFKNSPTLFNEALHRDLADFRIQHPDLILLQYVDDLLLAATSELDCQQGTRALLQTLGNLGYRASAKKAQICQKQVKYLGYLLKEGQRWLTEARKETVMGQPTPKTPRQLREFLGTAGFCRLWIPGFAEMAAPLYPLTKPGTLFNWGPDQQKAYQEIKQALLTAPALGLPDLTKPFELFVDEKQGYAKGVLTQKLGPWRRPVAYLSKKLDPVAAGWPPCLRMVAAIAVLTKDAGKLTMGQPLVILAPHAVEALVKQPPDRWLSNARMTHYQALLLDTDRVQFGPVVALNPATLLPLPEEGLQHNCLDILAEAHGTRPDLTDQPLPDADHTWYTDGSSLLQEGQRKAGAAVTTETEVIWAKALPAGTSAQRAELIALTQALKMAEGKKLNVYTDSRYAFATAHIHGEIYRRRGWLTSEGKEIKNKDEILALLKALFLPKRLSIIHCPGHQKGHSAEARGNRMADQAARKAAITETPDTSTLLAGKRTADGSEFEKRTADGSEFESPKKKAKVE

SEQ ID NO: 2755 - protein, 2096 aa, synthetic construct
MPAAKRVKLDGGDKKYSIGLDIGTNSVGWAVITDEYKVPSKKFKVLGNTDRHSIKKNLIGALLFDSGETAEATRLKRTARRRYTRRKNRICYLQEIFSNEMAKVDDSFFHRLEESFLVEEDKKHERHPIFGNIVDEVAYHEKYPTIYHLRKKLVDSTDKADLRLIYLALAHMIKFRGHFLIEGDLNPDNSDVDKLFIQLVQTYNQLFEENPINASGVDAKAILSARLSKSRRLENLIAQLPGEKKNGLFGNLIALSLGLTPNFKSNFDLAEDAKLQLSKDTYDDDLDNLLAQIGDQYADLFLAAKNLSDAILLSDILRVNTEITKAPLSASMIKRYDEHHQDLTLLKALVRQQLPEKYKEIFFDQSKNGYAGYIDGGASQEEFYKFIKPILEKMDGTEELLVKLNREDLLRKQRTFDNGSIPHQIHLGELHAILRRQEDFYPFLKDNREKIEKILTFRIPYYVGPLARGNSRFAWMTRKSEETITPWNFEEVVDKGASAQSFIERMTNFDKNLPNEKVLPKHSLLYEYFTVYNELTKVKYVTEGMRKPAFLSGEQKKAIVDLLFKTNRKVTVKQLKEDYFKKIECFDSVEISGVEDRFNASLGTYHDLLKIIKDKDFLDNEENEDILEDIVLTLTLFEDREMIEERLKTYAHLFDDKVMKQLKRRRYTGWGRLSRKLINGIRDKQSGKTILDFLKSDGFANRNFMQLIHDDSLTFKEDIQKAQVSGQGDSLHEHIANLAGSPAIKKGILQTVKVVDELVKVMGRHKPENIVIEMARENQTTQKGQKNSRERMKRIEEGIKELGSQILKEHPVENTQLQNEKLYLYYLQNGRDMYVDQELDINRLSDYDVDHIVPQSFLKDDSIDNKVLTRSDKARGKSDNVPSEEVVKKMKNYWRQLLNAKLITQRKFDNLTKAERGGLSELDKAGFIKRQLVETRQITKHVAQILDSRMNTKYDENDKLIREVKVITLKSKLVSDFRKDFQFYKVREINNYHHAHDAYLNAVVGTALIKKYPKLESEFVYGDYKVYDVRKMIAKSEQEIGKATAKYFFYSNIMNFFKTEITLANGEIRKRPLIETNGETGEIVWDKGRDFATVRKVLSMPQVNIVKKTEVQTGGFSKESILPKRNSDKLIARKKDWDPKKYGGFDSPTVAYSVLVVAKVEKGKSKKLKSVKELLGITIMERSSFEKNPIDFLEAKGYKEVKKDLIIKLPKYSLFELENGRKRMLASAGELQKGNELALPSKYVNFLYLASHYEKLKGSPEDNEQKQLFVEQHKHYLDEIIEQISEFSKRVILADANLDKVLSAYNKHRDKPIREQAENIIHLFTLTNLGAPAAFKYFDTTIDRKRYTSTKEVLDATLIHQSITGLYETRIDLSQLGGDGGEAAAKGGSPAPGGTLNIEDEHRLHETSKEPDVSLGSTWLSDFPQAWAETGGMGLAVRQAPLIIPLKATSTPVSIKQYPMSQEARLGIKPHIQRLLDQGILVPCQSPWNTPLLPVKKPGTNDYRPVQDLREVNKRVEDIHPTVPNPYNLLSGLPPSHQWYTVLDLKDAFFCLRLHPTSQPLFAFEWRDPEMGISGQLTWTRLPQGFKNSPTLFNEALHRDLADFRIQHPDLILLQYVDDLLLAATSELDCQQGTRALLQTLGNLGYRASAKKAQICQKQVKYLGYLLKEGQRWLTEARKETVMGQPTPKTPRQLREFLGTAGFCRLWIPGFAEMAAPLYPLTKPGTLFNWGPDQQKAYQEIKQALLTAPALGLPDLTKPFELFVDEKQGYAKGVLTQKLGPWRRPVAYLSKKLDPVAAGWPPCLRMVAAIAVLTKDAGKLTMGQPLVILAPHAVEALVKQPPDRWLSNARMTHYQALLLDTDRVQFGPVVALNPATLLPLPEEGLQHNCLDILAEAHGTRPDLTDQPLPDADHTWYTDGSSLLQEGQRKAGAAVTTETEVIWAKALPAGTSAQRAELIALTQALKMAEGKKLNVYTDSRYAFATAHIHGEIYRRRGWLTSEGKEIKNKDEILALLKALFLPKRLSIIHCPGHQKGHSAEARGNRMADQAARKAAITETPDTSTLLAGKRTADGSEFEKRTADGSEFESPKKKAKVE

SEQ ID NO: 2756 - protein, 2096 aa, synthetic construct
MPAAKRVKLDGGDKKYSIGLDIGTNSVGWAVITDEYKVPSKKFKVLGNTDRHSIKKNLIGALLFDSGETAEATRLKRTARRRYTRRKNRICYLQEIFSNEMAKVDDSFFHRLEESFLVEEDKKHERHPIFGNIVDEVAYHEKYPTIYHLRKKLVDSTDKADLRLIYLALAHMIKFRGHFLIEGDLNPDNSDVDKLFIQLVQTYNQLFEENPINASGVDAKAILSARLSKSRRLENLIAQLPGEKKNGLFGNLIALSLGLTPNFKSNFDLAEDAKLQLSKDTYDDDLDNLLAQIGDQYADLFLAAKNLSDAILLSDILRVNTEITKAPLSASMIKRYDEHHQDLTLLKALVRQQLPEKYKEIFFDQSKNGYAGYIDGGASQEEFYKFIKPILEKMDGTEELLVKLNREDLLRKQRTFDNGSIPHQIHLGELHAILRRQEDFYPFLKDNREKIEKILTFRIPYYVGPLARGNSRFAWMTRKSEETITPWNFEEVVDKGASAQSFIERMTNFDKNLPNEKVLPKHSLLYEYFTVYNELTKVKYVTEGMRKPAFLSGEQKKAIVDLLFKTNRKVTVKQLKEDYFKKIECFDSVEISGVEDRFNASLGTYHDLLKIIKDKDFLDNEENEDILEDIVLTLTLFEDREMIEERLKTYAHLFDDKVMKQLKRRRYTGWGRLSRKLINGIRDKQSGKTILDFLKSDGFANRNFMQLIHDDSLTFKEDIQKAQVSGQGDSLHEHIANLAGSPAIKKGILQTVKVVDELVKVMGRHKPENIVIEMARENQTTQKGQKNSRERMKRIEEGIKELGSQILKEHPVENTQLQNEKLYLYYLQNGRDMYVDQELDINRLSDYDVDHIVPQSFLKDDSIDNKVLTRSDKARGKSDNVPSEEVVKKMKNYWRQLLNAKLITQRKFDNLTKAERGGLSELDKAGFIKRQLVETRQITKHVAQILDSRMNTKYDENDKLIREVKVITLKSKLVSDFRKDFQFYKVREINNYHHAHDAYLNAVVGTALIKKYPKLESEFVYGDYKVYDVRKMIAKSEQEIGKATAKYFFYSNIMNFFKTEITLANGEIRKRPLIETNGETGEIVWDKGRDFATVRKVLSMPQVNIVKKTEVQTGGFSKESILPKRNSDKLIARKKDWDPKKYGGFDSPTVAYSVLVVAKVEKGKSKKLKSVKELLGITIMERSSFEKNPIDFLEAKGYKEVKKDLIIKLPKYSLFELENGRKRMLASAGELQKGNELALPSKYVNFLYLASHYEKLKGSPEDNEQKQLFVEQHKHYLDEIIEQISEFSKRVILADANLDKVLSAYNKHRDKPIREQAENIIHLFTLTNLGAPAAFKYFDTTIDRKRYTSTKEVLDATLIHQSITGLYETRIDLSQLGGDGGPAPEAAAKGGSGGTLNIEDEHRLHETSKEPDVSLGSTWLSDFPQAWAETGGMGLAVRQAPLIIPLKATSTPVSIKQYPMSQEARLGIKPHIQRLLDQGILVPCQSPWNTPLLPVKKPGTNDYRPVQDLREVNKRVEDIHPTVPNPYNLLSGLPPSHQWYTVLDLKDAFFCLRLHPTSQPLFAFEWRDPEMGISGQLTWTRLPQGFKNSPTLFNEALHRDLADFRIQHPDLILLQYVDDLLLAATSELDCQQGTRALLQTLGNLGYRASAKKAQICQKQVKYLGYLLKEGQRWLTEARKETVMGQPTPKTPRQLREFLGTAGFCRLWIPGFAEMAAPLYPLTKPGTLFNWGPDQQKAYQEIKQALLTAPALGLPDLTKPFELFVDEKQGYAKGVLTQKLGPWRRPVAYLSKKLDPVAAGWPPCLRMVAAIAVLTKDAGKLTMGQPLVILAPHAVEALVKQPPDRWLSNARMTHYQALLLDTDRVQFGPVVALNPATLLPLPEEGLQHNCLDILAEAHGTRPDLTDQPLPDADHTWYTDGSSLLQEGQRKAGAAVTTETEVIWAKALPAGTSAQRAELIALTQALKMAEGKKLNVYTDSRYAFATAHIHGEIYRRRGWLTSEGKEIKNKDEILALLKALFLPKRLSIIHCPGHQKGHSAEARGNRMADQAARKAAITETPDTSTLLAGKRTADGSEFEKRTADGSEFESPKKKAKVE

SEQ ID NO: 2757 - protein, 2094 aa, synthetic construct
MPAAKRVKLDGGDKKYSIGLDIGTNSVGWAVITDEYKVPSKKFKVLGNTDRHSIKKNLIGALLFDSGETAEATRLKRTARRRYTRRKNRICYLQEIFSNEMAKVDDSFFHRLEESFLVEEDKKHERHPIFGNIVDEVAYHEKYPTIYHLRKKLVDSTDKADLRLIYLALAHMIKFRGHFLIEGDLNPDNSDVDKLFIQLVQTYNQLFEENPINASGVDAKAILSARLSKSRRLENLIAQLPGEKKNGLFGNLIALSLGLTPNFKSNFDLAEDAKLQLSKDTYDDDLDNLLAQIGDQYADLFLAAKNLSDAILLSDILRVNTEITKAPLSASMIKRYDEHHQDLTLLKALVRQQLPEKYKEIFFDQSKNGYAGYIDGGASQEEFYKFIKPILEKMDGTEELLVKLNREDLLRKQRTFDNGSIPHQIHLGELHAILRRQEDFYPFLKDNREKIEKILTFRIPYYVGPLARGNSRFAWMTRKSEETITPWNFEEVVDKGASAQSFIERMTNFDKNLPNEKVLPKHSLLYEYFTVYNELTKVKYVTEGMRKPAFLSGEQKKAIVDLLFKTNRKVTVKQLKEDYFKKIECFDSVEISGVEDRFNASLGTYHDLLKIIKDKDFLDNEENEDILEDIVLTLTLFEDREMIEERLKTYAHLFDDKVMKQLKRRRYTGWGRLSRKLINGIRDKQSGKTILDFLKSDGFANRNFMQLIHDDSLTFKEDIQKAQVSGQGDSLHEHIANLAGSPAIKKGILQTVKVVDELVKVMGRHKPENIVIEMARENQTTQKGQKNSRERMKRIEEGIKELGSQILKEHPVENTQLQNEKLYLYYLQNGRDMYVDQELDINRLSDYDVDHIVPQSFLKDDSIDNKVLTRSDKARGKSDNVPSEEVVKKMKNYWRQLLNAKLITQRKFDNLTKAERGGLSELDKAGFIKRQLVETRQITKHVAQILDSRMNTKYDENDKLIREVKVITLKSKLVSDFRKDFQFYKVREINNYHHAHDAYLNAVVGTALIKKYPKLESEFVYGDYKVYDVRKMIAKSEQEIGKATAKYFFYSNIMNFFKTEITLANGEIRKRPLIETNGETGEIVWDKGRDFATVRKVLSMPQVNIVKKTEVQTGGFSKESILPKRNSDKLIARKKDWDPKKYGGFDSPTVAYSVLVVAKVEKGKSKKLKSVKELLGITIMERSSFEKNPIDFLEAKGYKEVKKDLIIKLPKYSLFELENGRKRMLASAGELQKGNELALPSKYVNFLYLASHYEKLKGSPEDNEQKQLFVEQHKHYLDEIIEQISEFSKRVILADANLDKVLSAYNKHRDKPIREQAENIIHLFTLTNLGAPAAFKYFDTTIDRKRYTSTKEVLDATLIHQSITGLYETRIDLSQLGGDGGPAPGSSGGSGGTLNIEDEHRLHETSKEPDVSLGSTWLSDFPQAWAETGGMGLAVRQAPLIIPLKATSTPVSIKQYPMSQEARLGIKPHIQRLLDQGILVPCQSPWNTPLLPVKKPGTNDYRPVQDLREVNKRVEDIHPTVPNPYNLLSGLPPSHQWYTVLDLKDAFFCLRLHPTSQPLFAFEWRDPEMGISGQLTWTRLPQGFKNSPTLFNEALHRDLADFRIQHPDLILLQYVDDLLLAATSELDCQQGTRALLQTLGNLGYRASAKKAQICQKQVKYLGYLLKEGQRWLTEARKETVMGQPTPKTPRQLREFLGTAGFCRLWIPGFAEMAAPLYPLTKPGTLFNWGPDQQKAYQEIKQALLTAPALGLPDLTKPFELFVDEKQGYAKGVLTQKLGPWRRPVAYLSKKLDPVAAGWPPCLRMVAAIAVLTKDAGKLTMGQPLVILAPHAVEALVKQPPDRWLSNARMTHYQALLLDTDRVQFGPVVALNPATLLPLPEEGLQHNCLDILAEAHGTRPDLTDQPLPDADHTWYTDGSSLLQEGQRKAGAAVTTETEVIWAKALPAGTSAQRAELIALTQALKMAEGKKLNVYTDSRYAFATAHIHGEIYRRRGWLTSEGKEIKNKDEILALLKALFLPKRLSIIHCPGHQKGHSAEARGNRMADQAARKAAITETPDTSTLLAGKRTADGSEFEKRTADGSEFESPKKKAKVE

SEQ ID NO: 2758 - protein, 2096 aa, synthetic construct
MPAAKRVKLDGGDKKYSIGLDIGTNSVGWAVITDEYKVPSKKFKVLGNTDRHSIKKNLIGALLFDSGETAEATRLKRTARRRYTRRKNRICYLQEIFSNEMAKVDDSFFHRLEESFLVEEDKKHERHPIFGNIVDEVAYHEKYPTIYHLRKKLVDSTDKADLRLIYLALAHMIKFRGHFLIEGDLNPDNSDVDKLFIQLVQTYNQLFEENPINASGVDAKAILSARLSKSRRLENLIAQLPGEKKNGLFGNLIALSLGLTPNFKSNFDLAEDAKLQLSKDTYDDDLDNLLAQIGDQYADLFLAAKNLSDAILLSDILRVNTEITKAPLSASMIKRYDEHHQDLTLLKALVRQQLPEKYKEIFFDQSKNGYAGYIDGGASQEEFYKFIKPILEKMDGTEELLVKLNREDLLRKQRTFDNGSIPHQIHLGELHAILRRQEDFYPFLKDNREKIEKILTFRIPYYVGPLARGNSRFAWMTRKSEETITPWNFEEVVDKGASAQSFIERMTNFDKNLPNEKVLPKHSLLYEYFTVYNELTKVKYVTEGMRKPAFLSGEQKKAIVDLLFKTNRKVTVKQLKEDYFKKIECFDSVEISGVEDRFNASLGTYHDLLKIIKDKDFLDNEENEDILEDIVLTLTLFEDREMIEERLKTYAHLFDDKVMKQLKRRRYTGWGRLSRKLINGIRDKQSGKTILDFLKSDGFANRNFMQLIHDDSLTFKEDIQKAQVSGQGDSLHEHIANLAGSPAIKKGILQTVKVVDELVKVMGRHKPENIVIEMARENQTTQKGQKNSRERMKRIEEGIKELGSQILKEHPVENTQLQNEKLYLYYLQNGRDMYVDQELDINRLSDYDVDHIVPQSFLKDDSIDNKVLTRSDKARGKSDNVPSEEVVKKMKNYWRQLLNAKLITQRKFDNLTKAERGGLSELDKAGFIKRQLVETRQITKHVAQILDSRMNTKYDENDKLIREVKVITLKSKLVSDFRKDFQFYKVREINNYHHAHDAYLNAVVGTALIKKYPKLESEFVYGDYKVYDVRKMIAKSEQEIGKATAKYFFYSNIMNFFKTEITLANGEIRKRPLIETNGETGEIVWDKGRDFATVRKVLSMPQVNIVKKTEVQTGGFSKESILPKRNSDKLIARKKDWDPKKYGGFDSPTVAYSVLVVAKVEKGKSKKLKSVKELLGITIMERSSFEKNPIDFLEAKGYKEVKKDLIIKLPKYSLFELENGRKRMLASAGELQKGNELALPSKYVNFLYLASHYEKLKGSPEDNEQKQLFVEQHKHYLDEIIEQISEFSKRVILADANLDKVLSAYNKHRDKPIREQAENIIHLFTLTNLGAPAAFKYFDTTIDRKRYTSTKEVLDATLIHQSITGLYETRIDLSQLGGDGGGSSPAPEAAAKGGTLNIEDEHRLHETSKEPDVSLGSTWLSDFPQAWAETGGMGLAVRQAPLIIPLKATSTPVSIKQYPMSQEARLGIKPHIQRLLDQGILVPCQSPWNTPLLPVKKPGTNDYRPVQDLREVNKRVEDIHPTVPNPYNLLSGLPPSHQWYTVLDLKDAFFCLRLHPTSQPLFAFEWRDPEMGISGQLTWTRLPQGFKNSPTLFNEALHRDLADFRIQHPDLILLQYVDDLLLAATSELDCQQGTRALLQTLGNLGYRASAKKAQICQKQVKYLGYLLKEGQRWLTEARKETVMGQPTPKTPRQLREFLGTAGFCRLWIPGFAEMAAPLYPLTKPGTLFNWGPDQQKAYQEIKQALLTAPALGLPDLTKPFELFVDEKQGYAKGVLTQKLGPWRRPVAYLSKKLDPVAAGWPPCLRMVAAIAVLTKDAGKLTMGQPLVILAPHAVEALVKQPPDRWLSNARMTHYQALLLDTDRVQFGPVVALNPATLLPLPEEGLQHNCLDILAEAHGTRPDLTDQPLPDADHTWYTDGSSLLQEGQRKAGAAVTTETEVIWAKALPAGTSAQRAELIALTQALKMAEGKKLNVYTDSRYAFATAHIHGEIYRRRGWLTSEGKEIKNKDEILALLKALFLPKRLSIIHCPGHQKGHSAEARGNRMADQAARKAAITETPDTSTLLAGKRTADGSEFEKRTADGSEFESPKKKAKVE

SEQ ID NO: 2759 - protein, 2096 aa, synthetic construct
MPAAKRVKLDGGDKKYSIGLDIGTNSVGWAVITDEYKVPSKKFKVLGNTDRHSIKKNLIGALLFDSGETAEATRLKRTARRRYTRRKNRICYLQEIFSNEMAKVDDSFFHRLEESFLVEEDKKHERHPIFGNIVDEVAYHEKYPTIYHLRKKLVDSTDKADLRLIYLALAHMIKFRGHFLIEGDLNPDNSDVDKLFIQLVQTYNQLFEENPINASGVDAKAILSARLSKSRRLENLIAQLPGEKKNGLFGNLIALSLGLTPNFKSNFDLAEDAKLQLSKDTYDDDLDNLLAQIGDQYADLFLAAKNLSDAILLSDILRVNTEITKAPLSASMIKRYDEHHQDLTLLKALVRQQLPEKYKEIFFDQSKNGYAGYIDGGASQEEFYKFIKPILEKMDGTEELLVKLNREDLLRKQRTFDNGSIPHQIHLGELHAILRRQEDFYPFLKDNREKIEKILTFRIPYYVGPLARGNSRFAWMTRKSEETITPWNFEEVVDKGASAQSFIERMTNFDKNLPNEKVLPKHSLLYEYFTVYNELTKVKYVTEGMRKPAFLSGEQKKAIVDLLFKTNRKVTVKQLKEDYFKKIECFDSVEISGVEDRFNASLGTYHDLLKIIKDKDFLDNEENEDILEDIVLTLTLFEDREMIEERLKTYAHLFDDKVMKQLKRRRYTGWGRLSRKLINGIRDKQSGKTILDFLKSDGFANRNFMQLIHDDSLTFKEDIQKAQVSGQGDSLHEHIANLAGSPAIKKGILQTVKVVDELVKVMGRHKPENIVIEMARENQTTQKGQKNSRERMKRIEEGIKELGSQILKEHPVENTQLQNEKLYLYYLQNGRDMYVDQELDINRLSDYDVDHIVPQSFLKDDSIDNKVLTRSDKARGKSDNVPSEEVVKKMKNYWRQLLNAKLITQRKFDNLTKAERGGLSELDKAGFIKRQLVETRQITKHVAQILDSRMNTKYDENDKLIREVKVITLKSKLVSDFRKDFQFYKVREINNYHHAHDAYLNAVVGTALIKKYPKLESEFVYGDYKVYDVRKMIAKSEQEIGKATAKYFFYSNIMNFFKTEITLANGEIRKRPLIETNGETGEIVWDKGRDFATVRKVLSMPQVNIVKKTEVQTGGFSKESILPKRNSDKLIARKKDWDPKKYGGFDSPTVAYSVLVVAKVEKGKSKKLKSVKELLGITIMERSSFEKNPIDFLEAKGYKEVKKDLIIKLPKYSLFELENGRKRMLASAGELQKGNELALPSKYVNFLYLASHYEKLKGSPEDNEQKQLFVEQHKHYLDEIIEQISEFSKRVILADANLDKVLSAYNKHRDKPIREQAENIIHLFTLTNLGAPAAFKYFDTTIDRKRYTSTKEVLDATLIHQSITGLYETRIDLSQLGGDGGPAPEAAAKGSSGGTLNIEDEHRLHETSKEPDVSLGSTWLSDFPQAWAETGGMGLAVRQAPLIIPLKATSTPVSIKQYPMSQEARLGIKPHIQRLLDQGILVPCQSPWNTPLLPVKKPGTNDYRPVQDLREVNKRVEDIHPTVPNPYNLLSGLPPSHQWYTVLDLKDAFFCLRLHPTSQPLFAFEWRDPEMGISGQLTWTRLPQGFKNSPTLFNEALHRDLADFRIQHPDLILLQYVDDLLLAATSELDCQQGTRALLQTLGNLGYRASAKKAQICQKQVKYLGYLLKEGQRWLTEARKETVMGQPTPKTPRQLREFLGTAGFCRLWIPGFAEMAAPLYPLTKPGTLFNWGPDQQKAYQEIKQALLTAPALGLPDLTKPFELFVDEKQGYAKGVLTQKLGPWRRPVAYLSKKLDPVAAGWPPCLRMVAAIAVLTKDAGKLTMGQPLVILAPHAVEALVKQPPDRWLSNARMTHYQALLLDTDRVQFGPVVALNPATLLPLPEEGLQHNCLDILAEAHGTRPDLTDQPLPDADHTWYTDGSSLLQEGQRKAGAAVTTETEVIWAKALPAGTSAQRAELIALTQALKMAEGKKLNVYTDSRYAFATAHIHGEIYRRRGWLTSEGKEIKNKDEILALLKALFLPKRLSIIHCPGHQKGHSAEARGNRMADQAARKAAITETPDTSTLLAGKRTADGSEFEKRTADGSEFESPKKKAKVE

SEQ ID NO: 2760 - protein, 2096 aa, synthetic construct
MPAAKRVKLDGGDKKYSIGLDIGTNSVGWAVITDEYKVPSKKFKVLGNTDRHSIKKNLIGALLFDSGETAEATRLKRTARRRYTRRKNRICYLQEIFSNEMAKVDDSFFHRLEESFLVEEDKKHERHPIFGNIVDEVAYHEKYPTIYHLRKKLVDSTDKADLRLIYLALAHMIKFRGHFLIEGDLNPDNSDVDKLFIQLVQTYNQLFEENPINASGVDAKAILSARLSKSRRLENLIAQLPGEKKNGLFGNLIALSLGLTPNFKSNFDLAEDAKLQLSKDTYDDDLDNLLAQIGDQYADLFLAAKNLSDAILLSDILRVNTEITKAPLSASMIKRYDEHHQDLTLLKALVRQQLPEKYKEIFFDQSKNGYAGYIDGGASQEEFYKFIKPILEKMDGTEELLVKLNREDLLRKQRTFDNGSIPHQIHLGELHAILRRQEDFYPFLKDNREKIEKILTFRIPYYVGPLARGNSRFAWMTRKSEETITPWNFEEVVDKGASAQSFIERMTNFDKNLPNEKVLPKHSLLYEYFTVYNELTKVKYVTEGMRKPAFLSGEQKKAIVDLLFKTNRKVTVKQLKEDYFKKIECFDSVEISGVEDRFNASLGTYHDLLKIIKDKDFLDNEENEDILEDIVLTLTLFEDREMIEERLKTYAHLFDDKVMKQLKRRRYTGWGRLSRKLINGIRDKQSGKTILDFLKSDGFANRNFMQLIHDDSLTFKEDIQKAQVSGQGDSLHEHIANLAGSPAIKKGILQTVKVVDELVKVMGRHKPENIVIEMARENQTTQKGQKNSRERMKRIEEGIKELGSQILKEHPVENTQLQNEKLYLYYLQNGRDMYVDQELDINRLSDYDVDHIVPQSFLKDDSIDNKVLTRSDKARGKSDNVPSEEVVKKMKNYWRQLLNAKLITQRKFDNLTKAERGGLSELDKAGFIKRQLVETRQITKHVAQILDSRMNTKYDENDKLIREVKVITLKSKLVSDFRKDFQFYKVREINNYHHAHDAYLNAVVGTALIKKYPKLESEFVYGDYKVYDVRKMIAKSEQEIGKATAKYFFYSNIMNFFKTEITLANGEIRKRPLIETNGETGEIVWDKGRDFATVRKVLSMPQVNIVKKTEVQTGGFSKESILPKRNSDKLIARKKDWDPKKYGGFDSPTVAYSVLVVAKVEKGKSKKLKSVKELLGITIMERSSFEKNPIDFLEAKGYKEVKKDLIIKLPKYSLFELENGRKRMLASAGELQKGNELALPSKYVNFLYLASHYEKLKGSPEDNEQKQLFVEQHKHYLDEIIEQISEFSKRVILADANLDKVLSAYNKHRDKPIREQAENIIHLFTLTNLGAPAAFKYFDTTIDRKRYTSTKEVLDATLIHQSITGLYETRIDLSQLGGDGGGSSGGSEAAAKGGTLNIEDEHRLHETSKEPDVSLGSTWLSDFPQAWAETGGMGLAVRQAPLIIPLKATSTPVSIKQYPMSQEARLGIKPHIQRLLDQGILVPCQSPWNTPLLPVKKPGTNDYRPVQDLREVNKRVEDIHPTVPNPYNLLSGLPPSHQWYTVLDLKDAFFCLRLHPTSQPLFAFEWRDPEMGISGQLTWTRLPQGFKNSPTLFNEALHRDLADFRIQHPDLILLQYVDDLLLAATSELDCQQGTRALLQTLGNLGYRASAKKAQICQKQVKYLGYLLKEGQRWLTEARKETVMGQPTPKTPRQLREFLGTAGFCRLWIPGFAEMAAPLYPLTKPGTLFNWGPDQQKAYQEIKQALLTAPALGLPDLTKPFELFVDEKQGYAKGVLTQKLGPWRRPVAYLSKKLDPVAAGWPPCLRMVAAIAVLTKDAGKLTMGQPLVILAPHAVEALVKQPPDRWLSNARMTHYQALLLDTDRVQFGPVVALNPATLLPLPEEGLQHNCLDILAEAHGTRPDLTDQPLPDADHTWYTDGSSLLQEGQRKAGAAVTTETEVIWAKALPAGTSAQRAELIALTQALKMAEGKKLNVYTDSRYAFATAHIHGEIYRRRGWLTSEGKEIKNKDEILALLKALFLPKRLSIIHCPGHQKGHSAEARGNRMADQAARKAAITETPDTSTLLAGKRTADGSEFEKRTADGSEFESPKKKAKVE

SEQ ID NO: 2761 - protein, 2096 aa, synthetic construct
MPAAKRVKLDGGDKKYSIGLDIGTNSVGWAVITDEYKVPSKKFKVLGNTDRHSIKKNLIGALLFDSGETAEATRLKRTARRRYTRRKNRICYLQEIFSNEMAKVDDSFFHRLEESFLVEEDKKHERHPIFGNIVDEVAYHEKYPTIYHLRKKLVDSTDKADLRLIYLALAHMIKFRGHFLIEGDLNPDNSDVDKLFIQLVQTYNQLFEENPINASGVDAKAILSARLSKSRRLENLIAQLPGEKKNGLFGNLIALSLGLTPNFKSNFDLAEDAKLQLSKDTYDDDLDNLLAQIGDQYADLFLAAKNLSDAILLSDILRVNTEITKAPLSASMIKRYDEHHQDLTLLKALVRQQLPEKYKEIFFDQSKNGYAGYIDGGASQEEFYKFIKPILEKMDGTEELLVKLNREDLLRKQRTFDNGSIPHQIHLGELHAILRRQEDFYPFLKDNREKIEKILTFRIPYYVGPLARGNSRFAWMTRKSEETITPWNFEEVVDKGASAQSFIERMTNFDKNLPNEKVLPKHSLLYEYFTVYNELTKVKYVTEGMRKPAFLSGEQKKAIVDLLFKTNRKVTVKQLKEDYFKKIECFDSVEISGVEDRFNASLGTYHDLLKIIKDKDFLDNEENEDILEDIVLTLTLFEDREMIEERLKTYAHLFDDKVMKQLKRRRYTGWGRLSRKLINGIRDKQSGKTILDFLKSDGFANRNFMQLIHDDSLTFKEDIQKAQVSGQGDSLHEHIANLAGSPAIKKGILQTVKVVDELVKVMGRHKPENIVIEMARENQTTQKGQKNSRERMKRIEEGIKELGSQILKEHPVENTQLQNEKLYLYYLQNGRDMYVDQELDINRLSDYDVDHIVPQSFLKDDSIDNKVLTRSDKARGKSDNVPSEEVVKKMKNYWRQLLNAKLITQRKFDNLTKAERGGLSELDKAGFIKRQLVETRQITKHVAQILDSRMNTKYDENDKLIREVKVITLKSKLVSDFRKDFQFYKVREINNYHHAHDAYLNAVVGTALIKKYPKLESEFVYGDYKVYDVRKMIAKSEQEIGKATAKYFFYSNIMNFFKTEITLANGEIRKRPLIETNGETGEIVWDKGRDFATVRKVLSMPQVNIVKKTEVQTGGFSKESILPKRNSDKLIARKKDWDPKKYGGFDSPTVAYSVLVVAKVEKGKSKKLKSVKELLGITIMERSSFEKNPIDFLEAKGYKEVKKDLIIKLPKYSLFELENGRKRMLASAGELQKGNELALPSKYVNFLYLASHYEKLKGSPEDNEQKQLFVEQHKHYLDEIIEQISEFSKRVILADANLDKVLSAYNKHRDKPIREQAENIIHLFTLTNLGAPAAFKYFDTTIDRKRYTSTKEVLDATLIHQSITGLYETRIDLSQLGGDGGGGSEAAAKGSSGGTLNIEDEHRLHETSKEPDVSLGSTWLSDFPQAWAETGGMGLAVRQAPLIIPLKATSTPVSIKQYPMSQEARLGIKPHIQRLLDQGILVPCQSPWNTPLLPVKKPGTNDYRPVQDLREVNKRVEDIHPTVPNPYNLLSGLPPSHQWYTVLDLKDAFFCLRLHPTSQPLFAFEWRDPEMGISGQLTWTRLPQGFKNSPTLFNEALHRDLADFRIQHPDLILLQYVDDLLLAATSELDCQQGTRALLQTLGNLGYRASAKKAQICQKQVKYLGYLLKEGQRWLTEARKETVMGQPTPKTPRQLREFLGTAGFCRLWIPGFAEMAAPLYPLTKPGTLFNWGPDQQKAYQEIKQALLTAPALGLPDLTKPFELFVDEKQGYAKGVLTQKLGPWRRPVAYLSKKLDPVAAGWPPCLRMVAAIAVLTKDAGKLTMGQPLVILAPHAVEALVKQPPDRWLSNARMTHYQALLLDTDRVQFGPVVALNPATLLPLPEEGLQHNCLDILAEAHGTRPDLTDQPLPDADHTWYTDGSSLLQEGQRKAGAAVTTETEVIWAKALPAGTSAQRAELIALTQALKMAEGKKLNVYTDSRYAFATAHIHGEIYRRRGWLTSEGKEIKNKDEILALLKALFLPKRLSIIHCPGHQKGHSAEARGNRMADQAARKAAITETPDTSTLLAGKRTADGSEFEKRTADGSEFESPKKKAKVE

SEQ ID NO: 2762 - protein, 2094 aa, synthetic construct
MPAAKRVKLDGGDKKYSIGLDIGTNSVGWAVITDEYKVPSKKFKVLGNTDRHSIKKNLIGALLFDSGETAEATRLKRTARRRYTRRKNRICYLQEIFSNEMAKVDDSFFHRLEESFLVEEDKKHERHPIFGNIVDEVAYHEKYPTIYHLRKKLVDSTDKADLRLIYLALAHMIKFRGHFLIEGDLNPDNSDVDKLFIQLVQTYNQLFEENPINASGVDAKAILSARLSKSRRLENLIAQLPGEKKNGLFGNLIALSLGLTPNFKSNFDLAEDAKLQLSKDTYDDDLDNLLAQIGDQYADLFLAAKNLSDAILLSDILRVNTEITKAPLSASMIKRYDEHHQDLTLLKALVRQQLPEKYKEIFFDQSKNGYAGYIDGGASQEEFYKFIKPILEKMDGTEELLVKLNREDLLRKQRTFDNGSIPHQIHLGELHAILRRQEDFYPFLKDNREKIEKILTFRIPYYVGPLARGNSRFAWMTRKSEETITPWNFEEVVDKGASAQSFIERMTNFDKNLPNEKVLPKHSLLYEYFTVYNELTKVKYVTEGMRKPAFLSGEQKKAIVDLLFKTNRKVTVKQLKEDYFKKIECFDSVEISGVEDRFNASLGTYHDLLKIIKDKDFLDNEENEDILEDIVLTLTLFEDREMIEERLKTYAHLFDDKVMKQLKRRRYTGWGRLSRKLINGIRDKQSGKTILDFLKSDGFANRNFMQLIHDDSLTFKEDIQKAQVSGQGDSLHEHIANLAGSPAIKKGILQTVKVVDELVKVMGRHKPENIVIEMARENQTTQKGQKNSRERMKRIEEGIKELGSQILKEHPVENTQLQNEKLYLYYLQNGRDMYVDQELDINRLSDYDVDHIVPQSFLKDDSIDNKVLTRSDKARGKSDNVPSEEVVKKMKNYWRQLLNAKLITQRKFDNLTKAERGGLSELDKAGFIKRQLVETRQITKHVAQILDSRMNTKYDENDKLIREVKVITLKSKLVSDFRKDFQFYKVREINNYHHAHDAYLNAVVGTALIKKYPKLESEFVYGDYKVYDVRKMIAKSEQEIGKATAKYFFYSNIMNFFKTEITLANGEIRKRPLIETNGETGEIVWDKGRDFATVRKVLSMPQVNIVKKTEVQTGGFSKESILPKRNSDKLIARKKDWDPKKYGGFDSPTVAYSVLVVAKVEKGKSKKLKSVKELLGITIMERSSFEKNPIDFLEAKGYKEVKKDLIIKLPKYSLFELENGRKRMLASAGELQKGNELALPSKYVNFLYLASHYEKLKGSPEDNEQKQLFVEQHKHYLDEIIEQISEFSKRVILADANLDKVLSAYNKHRDKPIREQAENIIHLFTLTNLGAPAAFKYFDTTIDRKRYTSTKEVLDATLIHQSITGLYETRIDLSQLGGDGGGGSPAPGGGGGTLNIEDEHRLHETSKEPDVSLGSTWLSDFPQAWAETGGMGLAVRQAPLIIPLKATSTPVSIKQYPMSQEARLGIKPHIQRLLDQGILVPCQSPWNTPLLPVKKPGTNDYRPVQDLREVNKRVEDIHPTVPNPYNLLSGLPPSHQWYTVLDLKDAFFCLRLHPTSQPLFAFEWRDPEMGISGQLTWTRLPQGFKNSPTLFNEALHRDLADFRIQHPDLILLQYVDDLLLAATSELDCQQGTRALLQTLGNLGYRASAKKAQICQKQVKYLGYLLKEGQRWLTEARKETVMGQPTPKTPRQLREFLGTAGFCRLWIPGFAEMAAPLYPLTKPGTLFNWGPDQQKAYQEIKQALLTAPALGLPDLTKPFELFVDEKQGYAKGVLTQKLGPWRRPVAYLSKKLDPVAAGWPPCLRMVAAIAVLTKDAGKLTMGQPLVILAPHAVEALVKQPPDRWLSNARMTHYQALLLDTDRVQFGPVVALNPATLLPLPEEGLQHNCLDILAEAHGTRPDLTDQPLPDADHTWYTDGSSLLQEGQRKAGAAVTTETEVIWAKALPAGTSAQRAELIALTQALKMAEGKKLNVYTDSRYAFATAHIHGEIYRRRGWLTSEGKEIKNKDEILALLKALFLPKRLSIIHCPGHQKGHSAEARGNRMADQAARKAAITETPDTSTLLAGKRTADGSEFEKRTADGSEFESPKKKAKVE

SEQ ID NO: 2763 - protein, 2097 aa, synthetic construct
MPAAKRVKLDGGDKKYSIGLDIGTNSVGWAVITDEYKVPSKKFKVLGNTDRHSIKKNLIGALLFDSGETAEATRLKRTARRRYTRRKNRICYLQEIFSNEMAKVDDSFFHRLEESFLVEEDKKHERHPIFGNIVDEVAYHEKYPTIYHLRKKLVDSTDKADLRLIYLALAHMIKFRGHFLIEGDLNPDNSDVDKLFIQLVQTYNQLFEENPINASGVDAKAILSARLSKSRRLENLIAQLPGEKKNGLFGNLIALSLGLTPNFKSNFDLAEDAKLQLSKDTYDDDLDNLLAQIGDQYADLFLAAKNLSDAILLSDILRVNTEITKAPLSASMIKRYDEHHQDLTLLKALVRQQLPEKYKEIFFDQSKNGYAGYIDGGASQEEFYKFIKPILEKMDGTEELLVKLNREDLLRKQRTFDNGSIPHQIHLGELHAILRRQEDFYPFLKDNREKIEKILTFRIPYYVGPLARGNSRFAWMTRKSEETITPWNFEEVVDKGASAQSFIERMTNFDKNLPNEKVLPKHSLLYEYFTVYNELTKVKYVTEGMRKPAFLSGEQKKAIVDLLFKTNRKVTVKQLKEDYFKKIECFDSVEISGVEDRFNASLGTYHDLLKIIKDKDFLDNEENEDILEDIVLTLTLFEDREMIEERLKTYAHLFDDKVMKQLKRRRYTGWGRLSRKLINGIRDKQSGKTILDFLKSDGFANRNFMQLIHDDSLTFKEDIQKAQVSGQGDSLHEHIANLAGSPAIKKGILQTVKVVDELVKVMGRHKPENIVIEMARENQTTQKGQKNSRERMKRIEEGIKELGSQILKEHPVENTQLQNEKLYLYYLQNGRDMYVDQELDINRLSDYDVDHIVPQSFLKDDSIDNKVLTRSDKARGKSDNVPSEEVVKKMKNYWRQLLNAKLITQRKFDNLTKAERGGLSELDKAGFIKRQLVETRQITKHVAQILDSRMNTKYDENDKLIREVKVITLKSKLVSDFRKDFQFYKVREINNYHHAHDAYLNAVVGTALIKKYPKLESEFVYGDYKVYDVRKMIAKSEQEIGKATAKYFFYSNIMNFFKTEITLANGEIRKRPLIETNGETGEIVWDKGRDFATVRKVLSMPQVNIVKKTEVQTGGFSKESILPKRNSDKLIARKKDWDPKKYGGFDSPTVAYSVLVVAKVEKGKSKKLKSVKELLGITIMERSSFEKNPIDFLEAKGYKEVKKDLIIKLPKYSLFELENGRKRMLASAGELQKGNELALPSKYVNFLYLASHYEKLKGSPEDNEQKQLFVEQHKHYLDEIIEQISEFSKRVILADANLDKVLSAYNKHRDKPIREQAENIIHLFTLTNLGAPAAFKYFDTTIDRKRYTSTKEVLDATLIHQSITGLYETRIDLSQLGGDGGGGSGGSGGSGGSGGTLNIEDEHRLHETSKEPDVSLGSTWLSDFPQAWAETGGMGLAVRQAPLIIPLKATSTPVSIKQYPMSQEARLGIKPHIQRLLDQGILVPCQSPWNTPLLPVKKPGTNDYRPVQDLREVNKRVEDIHPTVPNPYNLLSGLPPSHQWYTVLDLKDAFFCLRLHPTSQPLFAFEWRDPEMGISGQLTWTRLPQGFKNSPTLFNEALHRDLADFRIQHPDLILLQYVDDLLLAATSELDCQQGTRALLQTLGNLGYRASAKKAQICQKQVKYLGYLLKEGQRWLTEARKETVMGQPTPKTPRQLREFLGTAGFCRLWIPGFAEMAAPLYPLTKPGTLFNWGPDQQKAYQEIKQALLTAPALGLPDLTKPFELFVDEKQGYAKGVLTQKLGPWRRPVAYLSKKLDPVAAGWPPCLRMVAAIAVLTKDAGKLTMGQPLVILAPHAVEALVKQPPDRWLSNARMTHYQALLLDTDRVQFGPVVALNPATLLPLPEEGLQHNCLDILAEAHGTRPDLTDQPLPDADHTWYTDGSSLLQEGQRKAGAAVTTETEVIWAKALPAGTSAQRAELIALTQALKMAEGKKLNVYTDSRYAFATAHIHGEIYRRRGWLTSEGKEIKNKDEILALLKALFLPKRLSIIHCPGHQKGHSAEARGNRMADQAARKAAITETPDTSTLLAGKRTADGSEFEKRTADGSEFESPKKKAKVE

SEQ ID NO: 2764 - protein, 2096 aa, synthetic construct
MPAAKRVKLDGGDKKYSIGLDIGTNSVGWAVITDEYKVPSKKFKVLGNTDRHSIKKNLIGALLFDSGETAEATRLKRTARRRYTRRKNRICYLQEIFSNEMAKVDDSFFHRLEESFLVEEDKKHERHPIFGNIVDEVAYHEKYPTIYHLRKKLVDSTDKADLRLIYLALAHMIKFRGHFLIEGDLNPDNSDVDKLFIQLVQTYNQLFEENPINASGVDAKAILSARLSKSRRLENLIAQLPGEKKNGLFGNLIALSLGLTPNFKSNFDLAEDAKLQLSKDTYDDDLDNLLAQIGDQYADLFLAAKNLSDAILLSDILRVNTEITKAPLSASMIKRYDEHHQDLTLLKALVRQQLPEKYKEIFFDQSKNGYAGYIDGGASQEEFYKFIKPILEKMDGTEELLVKLNREDLLRKQRTFDNGSIPHQIHLGELHAILRRQEDFYPFLKDNREKIEKILTFRIPYYVGPLARGNSRFAWMTRKSEETITPWNFEEVVDKGASAQSFIERMTNFDKNLPNEKVLPKHSLLYEYFTVYNELTKVKYVTEGMRKPAFLSGEQKKAIVDLLFKTNRKVTVKQLKEDYFKKIECFDSVEISGVEDRFNASLGTYHDLLKIIKDKDFLDNEENEDILEDIVLTLTLFEDREMIEERLKTYAHLFDDKVMKQLKRRRYTGWGRLSRKLINGIRDKQSGKTILDFLKSDGFANRNFMQLIHDDSLTFKEDIQKAQVSGQGDSLHEHIANLAGSPAIKKGILQTVKVVDELVKVMGRHKPENIVIEMARENQTTQKGQKNSRERMKRIEEGIKELGSQILKEHPVENTQLQNEKLYLYYLQNGRDMYVDQELDINRLSDYDVDHIVPQSFLKDDSIDNKVLTRSDKARGKSDNVPSEEVVKKMKNYWRQLLNAKLITQRKFDNLTKAERGGLSELDKAGFIKRQLVETRQITKHVAQILDSRMNTKYDENDKLIREVKVITLKSKLVSDFRKDFQFYKVREINNYHHAHDAYLNAVVGTALIKKYPKLESEFVYGDYKVYDVRKMIAKSEQEIGKATAKYFFYSNIMNFFKTEITLANGEIRKRPLIETNGETGEIVWDKGRDFATVRKVLSMPQVNIVKKTEVQTGGFSKESILPKRNSDKLIARKKDWDPKKYGGFDSPTVAYSVLVVAKVEKGKSKKLKSVKELLGITIMERSSFEKNPIDFLEAKGYKEVKKDLIIKLPKYSLFELENGRKRMLASAGELQKGNELALPSKYVNFLYLASHYEKLKGSPEDNEQKQLFVEQHKHYLDEIIEQISEFSKRVILADANLDKVLSAYNKHRDKPIREQAENIIHLFTLTNLGAPAAFKYFDTTIDRKRYTSTKEVLDATLIHQSITGLYETRIDLSQLGGDGGGGGGSSEAAAKGGTLNIEDEHRLHETSKEPDVSLGSTWLSDFPQAWAETGGMGLAVRQAPLIIPLKATSTPVSIKQYPMSQEARLGIKPHIQRLLDQGILVPCQSPWNTPLLPVKKPGTNDYRPVQDLREVNKRVEDIHPTVPNPYNLLSGLPPSHQWYTVLDLKDAFFCLRLHPTSQPLFAFEWRDPEMGISGQLTWTRLPQGFKNSPTLFNEALHRDLADFRIQHPDLILLQYVDDLLLAATSELDCQQGTRALLQTLGNLGYRASAKKAQICQKQVKYLGYLLKEGQRWLTEARKETVMGQPTPKTPRQLREFLGTAGFCRLWIPGFAEMAAPLYPLTKPGTLFNWGPDQQKAYQEIKQALLTAPALGLPDLTKPFELFVDEKQGYAKGVLTQKLGPWRRPVAYLSKKLDPVAAGWPPCLRMVAAIAVLTKDAGKLTMGQPLVILAPHAVEALVKQPPDRWLSNARMTHYQALLLDTDRVQFGPVVALNPATLLPLPEEGLQHNCLDILAEAHGTRPDLTDQPLPDADHTWYTDGSSLLQEGQRKAGAAVTTETEVIWAKALPAGTSAQRAELIALTQALKMAEGKKLNVYTDSRYAFATAHIHGEIYRRRGWLTSEGKEIKNKDEILALLKALFLPKRLSIIHCPGHQKGHSAEARGNRMADQAARKAAITETPDTSTLLAGKRTADGSEFEKRTADGSEFESPKKKAKVE

SEQ ID NO: 2765 - protein, 2096 aa, synthetic construct
MPAAKRVKLDGGDKKYSIGLDIGTNSVGWAVITDEYKVPSKKFKVLGNTDRHSIKKNLIGALLFDSGETAEATRLKRTARRRYTRRKNRICYLQEIFSNEMAKVDDSFFHRLEESFLVEEDKKHERHPIFGNIVDEVAYHEKYPTIYHLRKKLVDSTDKADLRLIYLALAHMIKFRGHFLIEGDLNPDNSDVDKLFIQLVQTYNQLFEENPINASGVDAKAILSARLSKSRRLENLIAQLPGEKKNGLFGNLIALSLGLTPNFKSNFDLAEDAKLQLSKDTYDDDLDNLLAQIGDQYADLFLAAKNLSDAILLSDILRVNTEITKAPLSASMIKRYDEHHQDLTLLKALVRQQLPEKYKEIFFDQSKNGYAGYIDGGASQEEFYKFIKPILEKMDGTEELLVKLNREDLLRKQRTFDNGSIPHQIHLGELHAILRRQEDFYPFLKDNREKIEKILTFRIPYYVGPLARGNSRFAWMTRKSEETITPWNFEEVVDKGASAQSFIERMTNFDKNLPNEKVLPKHSLLYEYFTVYNELTKVKYVTEGMRKPAFLSGEQKKAIVDLLFKTNRKVTVKQLKEDYFKKIECFDSVEISGVEDRFNASLGTYHDLLKIIKDKDFLDNEENEDILEDIVLTLTLFEDREMIEERLKTYAHLFDDKVMKQLKRRRYTGWGRLSRKLINGIRDKQSGKTILDFLKSDGFANRNFMQLIHDDSLTFKEDIQKAQVSGQGDSLHEHIANLAGSPAIKKGILQTVKVVDELVKVMGRHKPENIVIEMARENQTTQKGQKNSRERMKRIEEGIKELGSQILKEHPVENTQLQNEKLYLYYLQNGRDMYVDQELDINRLSDYDVDHIVPQSFLKDDSIDNKVLTRSDKARGKSDNVPSEEVVKKMKNYWRQLLNAKLITQRKFDNLTKAERGGLSELDKAGFIKRQLVETRQITKHVAQILDSRMNTKYDENDKLIREVKVITLKSKLVSDFRKDFQFYKVREINNYHHAHDAYLNAVVGTALIKKYPKLESEFVYGDYKVYDVRKMIAKSEQEIGKATAKYFFYSNIMNFFKTEITLANGEIRKRPLIETNGETGEIVWDKGRDFATVRKVLSMPQVNIVKKTEVQTGGFSKESILPKRNSDKLIARKKDWDPKKYGGFDSPTVAYSVLVVAKVEKGKSKKLKSVKELLGITIMERSSFEKNPIDFLEAKGYKEVKKDLIIKLPKYSLFELENGRKRMLASAGELQKGNELALPSKYVNFLYLASHYEKLKGSPEDNEQKQLFVEQHKHYLDEIIEQISEFSKRVILADANLDKVLSAYNKHRDKPIREQAENIIHLFTLTNLGAPAAFKYFDTTIDRKRYTSTKEVLDATLIHQSITGLYETRIDLSQLGGDGGEAAAKPAPGGGGGTLNIEDEHRLHETSKEPDVSLGSTWLSDFPQAWAETGGMGLAVRQAPLIIPLKATSTPVSIKQYPMSQEARLGIKPHIQRLLDQGILVPCQSPWNTPLLPVKKPGTNDYRPVQDLREVNKRVEDIHPTVPNPYNLLSGLPPSHQWYTVLDLKDAFFCLRLHPTSQPLFAFEWRDPEMGISGQLTWTRLPQGFKNSPTLFNEALHRDLADFRIQHPDLILLQYVDDLLLAATSELDCQQGTRALLQTLGNLGYRASAKKAQICQKQVKYLGYLLKEGQRWLTEARKETVMGQPTPKTPRQLREFLGTAGFCRLWIPGFAEMAAPLYPLTKPGTLFNWGPDQQKAYQEIKQALLTAPALGLPDLTKPFELFVDEKQGYAKGVLTQKLGPWRRPVAYLSKKLDPVAAGWPPCLRMVAAIAVLTKDAGKLTMGQPLVILAPHAVEALVKQPPDRWLSNARMTHYQALLLDTDRVQFGPVVALNPATLLPLPEEGLQHNCLDILAEAHGTRPDLTDQPLPDADHTWYTDGSSLLQEGQRKAGAAVTTETEVIWAKALPAGTSAQRAELIALTQALKMAEGKKLNVYTDSRYAFATAHIHGEIYRRRGWLTSEGKEIKNKDEILALLKALFLPKRLSIIHCPGHQKGHSAEARGNRMADQAARKAAITETPDTSTLLAGKRTADGSEFEKRTADGSEFESPKKKAKVE

SEQ ID NO: 2766 - protein, 2094 aa, synthetic construct
MPAAKRVKLDGGDKKYSIGLDIGTNSVGWAVITDEYKVPSKKFKVLGNTDRHSIKKNLIGALLFDSGETAEATRLKRTARRRYTRRKNRICYLQEIFSNEMAKVDDSFFHRLEESFLVEEDKKHERHPIFGNIVDEVAYHEKYPTIYHLRKKLVDSTDKADLRLIYLALAHMIKFRGHFLIEGDLNPDNSDVDKLFIQLVQTYNQLFEENPINASGVDAKAILSARLSKSRRLENLIAQLPGEKKNGLFGNLIALSLGLTPNFKSNFDLAEDAKLQLSKDTYDDDLDNLLAQIGDQYADLFLAAKNLSDAILLSDILRVNTEITKAPLSASMIKRYDEHHQDLTLLKALVRQQLPEKYKEIFFDQSKNGYAGYIDGGASQEEFYKFIKPILEKMDGTEELLVKLNREDLLRKQRTFDNGSIPHQIHLGELHAILRRQEDFYPFLKDNREKIEKILTFRIPYYVGPLARGNSRFAWMTRKSEETITPWNFEEVVDKGASAQSFIERMTNFDKNLPNEKVLPKHSLLYEYFTVYNELTKVKYVTEGMRKPAFLSGEQKKAIVDLLFKTNRKVTVKQLKEDYFKKIECFDSVEISGVEDRFNASLGTYHDLLKIIKDKDFLDNEENEDILEDIVLTLTLFEDREMIEERLKTYAHLFDDKVMKQLKRRRYTGWGRLSRKLINGIRDKQSGKTILDFLKSDGFANRNFMQLIHDDSLTFKEDIQKAQVSGQGDSLHEHIANLAGSPAIKKGILQTVKVVDELVKVMGRHKPENIVIEMARENQTTQKGQKNSRERMKRIEEGIKELGSQILKEHPVENTQLQNEKLYLYYLQNGRDMYVDQELDINRLSDYDVDHIVPQSFLKDDSIDNKVLTRSDKARGKSDNVPSEEVVKKMKNYWRQLLNAKLITQRKFDNLTKAERGGLSELDKAGFIKRQLVETRQITKHVAQILDSRMNTKYDENDKLIREVKVITLKSKLVSDFRKDFQFYKVREINNYHHAHDAYLNAVVGTALIKKYPKLESEFVYGDYKVYDVRKMIAKSEQEIGKATAKYFFYSNIMNFFKTEITLANGEIRKRPLIETNGETGEIVWDKGRDFATVRKVLSMPQVNIVKKTEVQTGGFSKESILPKRNSDKLIARKKDWDPKKYGGFDSPTVAYSVLVVAKVEKGKSKKLKSVKELLGITIMERSSFEKNPIDFLEAKGYKEVKKDLIIKLPKYSLFELENGRKRMLASAGELQKGNELALPSKYVNFLYLASHYEKLKGSPEDNEQKQLFVEQHKHYLDEIIEQISEFSKRVILADANLDKVLSAYNKHRDKPIREQAENIIHLFTLTNLGAPAAFKYFDTTIDRKRYTSTKEVLDATLIHQSITGLYETRIDLSQLGGDGGGGSGGGPAPGGTLNIEDEHRLHETSKEPDVSLGSTWLSDFPQAWAETGGMGLAVRQAPLIIPLKATSTPVSIKQYPMSQEARLGIKPHIQRLLDQGILVPCQSPWNTPLLPVKKPGTNDYRPVQDLREVNKRVEDIHPTVPNPYNLLSGLPPSHQWYTVLDLKDAFFCLRLHPTSQPLFAFEWRDPEMGISGQLTWTRLPQGFKNSPTLFNEALHRDLADFRIQHPDLILLQYVDDLLLAATSELDCQQGTRALLQTLGNLGYRASAKKAQICQKQVKYLGYLLKEGQRWLTEARKETVMGQPTPKTPRQLREFLGTAGFCRLWIPGFAEMAAPLYPLTKPGTLFNWGPDQQKAYQEIKQALLTAPALGLPDLTKPFELFVDEKQGYAKGVLTQKLGPWRRPVAYLSKKLDPVAAGWPPCLRMVAAIAVLTKDAGKLTMGQPLVILAPHAVEALVKQPPDRWLSNARMTHYQALLLDTDRVQFGPVVALNPATLLPLPEEGLQHNCLDILAEAHGTRPDLTDQPLPDADHTWYTDGSSLLQEGQRKAGAAVTTETEVIWAKALPAGTSAQRAELIALTQALKMAEGKKLNVYTDSRYAFATAHIHGEIYRRRGWLTSEGKEIKNKDEILALLKALFLPKRLSIIHCPGHQKGHSAEARGNRMADQAARKAAITETPDTSTLLAGKRTADGSEFEKRTADGSEFESPKKKAKVE

SEQ ID NO: 2767 - protein, 2096 aa, synthetic construct
MPAAKRVKLDGGDKKYSIGLDIGTNSVGWAVITDEYKVPSKKFKVLGNTDRHSIKKNLIGALLFDSGETAEATRLKRTARRRYTRRKNRICYLQEIFSNEMAKVDDSFFHRLEESFLVEEDKKHERHPIFGNIVDEVAYHEKYPTIYHLRKKLVDSTDKADLRLIYLALAHMIKFRGHFLIEGDLNPDNSDVDKLFIQLVQTYNQLFEENPINASGVDAKAILSARLSKSRRLENLIAQLPGEKKNGLFGNLIALSLGLTPNFKSNFDLAEDAKLQLSKDTYDDDLDNLLAQIGDQYADLFLAAKNLSDAILLSDILRVNTEITKAPLSASMIKRYDEHHQDLTLLKALVRQQLPEKYKEIFFDQSKNGYAGYIDGGASQEEFYKFIKPILEKMDGTEELLVKLNREDLLRKQRTFDNGSIPHQIHLGELHAILRRQEDFYPFLKDNREKIEKILTFRIPYYVGPLARGNSRFAWMTRKSEETITPWNFEEVVDKGASAQSFIERMTNFDKNLPNEKVLPKHSLLYEYFTVYNELTKVKYVTEGMRKPAFLSGEQKKAIVDLLFKTNRKVTVKQLKEDYFKKIECFDSVEISGVEDRFNASLGTYHDLLKIIKDKDFLDNEENEDILEDIVLTLTLFEDREMIEERLKTYAHLFDDKVMKQLKRRRYTGWGRLSRKLINGIRDKQSGKTILDFLKSDGFANRNFMQLIHDDSLTFKEDIQKAQVSGQGDSLHEHIANLAGSPAIKKGILQTVKVVDELVKVMGRHKPENIVIEMARENQTTQKGQKNSRERMKRIEEGIKELGSQILKEHPVENTQLQNEKLYLYYLQNGRDMYVDQELDINRLSDYDVDHIVPQSFLKDDSIDNKVLTRSDKARGKSDNVPSEEVVKKMKNYWRQLLNAKLITQRKFDNLTKAERGGLSELDKAGFIKRQLVETRQITKHVAQILDSRMNTKYDENDKLIREVKVITLKSKLVSDFRKDFQFYKVREINNYHHAHDAYLNAVVGTALIKKYPKLESEFVYGDYKVYDVRKMIAKSEQEIGKATAKYFFYSNIMNFFKTEITLANGEIRKRPLIETNGETGEIVWDKGRDFATVRKVLSMPQVNIVKKTEVQTGGFSKESILPKRNSDKLIARKKDWDPKKYGGFDSPTVAYSVLVVAKVEKGKSKKLKSVKELLGITIMERSSFEKNPIDFLEAKGYKEVKKDLIIKLPKYSLFELENGRKRMLASAGELQKGNELALPSKYVNFLYLASHYEKLKGSPEDNEQKQLFVEQHKHYLDEIIEQISEFSKRVILADANLDKVLSAYNKHRDKPIREQAENIIHLFTLTNLGAPAAFKYFDTTIDRKRYTSTKEVLDATLIHQSITGLYETRIDLSQLGGDGGEAAAKGGSGGGGGTLNIEDEHRLHETSKEPDVSLGSTWLSDFPQAWAETGGMGLAVRQAPLIIPLKATSTPVSIKQYPMSQEARLGIKPHIQRLLDQGILVPCQSPWNTPLLPVKKPGTNDYRPVQDLREVNKRVEDIHPTVPNPYNLLSGLPPSHQWYTVLDLKDAFFCLRLHPTSQPLFAFEWRDPEMGISGQLTWTRLPQGFKNSPTLFNEALHRDLADFRIQHPDLILLQYVDDLLLAATSELDCQQGTRALLQTLGNLGYRASAKKAQICQKQVKYLGYLLKEGQRWLTEARKETVMGQPTPKTPRQLREFLGTAGFCRLWIPGFAEMAAPLYPLTKPGTLFNWGPDQQKAYQEIKQALLTAPALGLPDLTKPFELFVDEKQGYAKGVLTQKLGPWRRPVAYLSKKLDPVAAGWPPCLRMVAAIAVLTKDAGKLTMGQPLVILAPHAVEALVKQPPDRWLSNARMTHYQALLLDTDRVQFGPVVALNPATLLPLPEEGLQHNCLDILAEAHGTRPDLTDQPLPDADHTWYTDGSSLLQEGQRKAGAAVTTETEVIWAKALPAGTSAQRAELIALTQALKMAEGKKLNVYTDSRYAFATAHIHGEIYRRRGWLTSEGKEIKNKDEILALLKALFLPKRLSIIHCPGHQKGHSAEARGNRMADQAARKAAITETPDTSTLLAGKRTADGSEFEKRTADGSEFESPKKKAKVE

SEQ ID NO: 2768 - protein, 2094 aa, synthetic construct
MPAAKRVKLDGGDKKYSIGLDIGTNSVGWAVITDEYKVPSKKFKVLGNTDRHSIKKNLIGALLFDSGETAEATRLKRTARRRYTRRKNRICYLQEIFSNEMAKVDDSFFHRLEESFLVEEDKKHERHPIFGNIVDEVAYHEKYPTIYHLRKKLVDSTDKADLRLIYLALAHMIKFRGHFLIEGDLNPDNSDVDKLFIQLVQTYNQLFEENPINASGVDAKAILSARLSKSRRLENLIAQLPGEKKNGLFGNLIALSLGLTPNFKSNFDLAEDAKLQLSKDTYDDDLDNLLAQIGDQYADLFLAAKNLSDAILLSDILRVNTEITKAPLSASMIKRYDEHHQDLTLLKALVRQQLPEKYKEIFFDQSKNGYAGYIDGGASQEEFYKFIKPILEKMDGTEELLVKLNREDLLRKQRTFDNGSIPHQIHLGELHAILRRQEDFYPFLKDNREKIEKILTFRIPYYVGPLARGNSRFAWMTRKSEETITPWNFEEVVDKGASAQSFIERMTNFDKNLPNEKVLPKHSLLYEYFTVYNELTKVKYVTEGMRKPAFLSGEQKKAIVDLLFKTNRKVTVKQLKEDYFKKIECFDSVEISGVEDRFNASLGTYHDLLKIIKDKDFLDNEENEDILEDIVLTLTLFEDREMIEERLKTYAHLFDDKVMKQLKRRRYTGWGRLSRKLINGIRDKQSGKTILDFLKSDGFANRNFMQLIHDDSLTFKEDIQKAQVSGQGDSLHEHIANLAGSPAIKKGILQTVKVVDELVKVMGRHKPENIVIEMARENQTTQKGQKNSRERMKRIEEGIKELGSQILKEHPVENTQLQNEKLYLYYLQNGRDMYVDQELDINRLSDYDVDHIVPQSFLKDDSIDNKVLTRSDKARGKSDNVPSEEVVKKMKNYWRQLLNAKLITQRKFDNLTKAERGGLSELDKAGFIKRQLVETRQITKHVAQILDSRMNTKYDENDKLIREVKVITLKSKLVSDFRKDFQFYKVREINNYHHAHDAYLNAVVGTALIKKYPKLESEFVYGDYKVYDVRKMIAKSEQEIGKATAKYFFYSNIMNFFKTEITLANGEIRKRPLIETNGETGEIVWDKGRDFATVRKVLSMPQVNIVKKTEVQTGGFSKESILPKRNSDKLIARKKDWDPKKYGGFDSPTVAYSVLVVAKVEKGKSKKLKSVKELLGITIMERSSFEKNPIDFLEAKGYKEVKKDLIIKLPKYSLFELENGRKRMLASAGELQKGNELALPSKYVNFLYLASHYEKLKGSPEDNEQKQLFVEQHKHYLDEIIEQISEFSKRVILADANLDKVLSAYNKHRDKPIREQAENIIHLFTLTNLGAPAAFKYFDTTIDRKRYTSTKEVLDATLIHQSITGLYETRIDLSQLGGDGGGSSGGSPAPGGTLNIEDEHRLHETSKEPDVSLGSTWLSDFPQAWAETGGMGLAVRQAPLIIPLKATSTPVSIKQYPMSQEARLGIKPHIQRLLDQGILVPCQSPWNTPLLPVKKPGTNDYRPVQDLREVNKRVEDIHPTVPNPYNLLSGLPPSHQWYTVLDLKDAFFCLRLHPTSQPLFAFEWRDPEMGISGQLTWTRLPQGFKNSPTLFNEALHRDLADFRIQHPDLILLQYVDDLLLAATSELDCQQGTRALLQTLGNLGYRASAKKAQICQKQVKYLGYLLKEGQRWLTEARKETVMGQPTPKTPRQLREFLGTAGFCRLWIPGFAEMAAPLYPLTKPGTLFNWGPDQQKAYQEIKQALLTAPALGLPDLTKPFELFVDEKQGYAKGVLTQKLGPWRRPVAYLSKKLDPVAAGWPPCLRMVAAIAVLTKDAGKLTMGQPLVILAPHAVEALVKQPPDRWLSNARMTHYQALLLDTDRVQFGPVVALNPATLLPLPEEGLQHNCLDILAEAHGTRPDLTDQPLPDADHTWYTDGSSLLQEGQRKAGAAVTTETEVIWAKALPAGTSAQRAELIALTQALKMAEGKKLNVYTDSRYAFATAHIHGEIYRRRGWLTSEGKEIKNKDEILALLKALFLPKRLSIIHCPGHQKGHSAEARGNRMADQAARKAAITETPDTSTLLAGKRTADGSEFEKRTADGSEFESPKKKAKVE

SEQ ID NO: 2769 - protein, 2094 aa, synthetic construct
MPAAKRVKLDGGDKKYSIGLDIGTNSVGWAVITDEYKVPSKKFKVLGNTDRHSIKKNLIGALLFDSGETAEATRLKRTARRRYTRRKNRICYLQEIFSNEMAKVDDSFFHRLEESFLVEEDKKHERHPIFGNIVDEVAYHEKYPTIYHLRKKLVDSTDKADLRLIYLALAHMIKFRGHFLIEGDLNPDNSDVDKLFIQLVQTYNQLFEENPINASGVDAKAILSARLSKSRRLENLIAQLPGEKKNGLFGNLIALSLGLTPNFKSNFDLAEDAKLQLSKDTYDDDLDNLLAQIGDQYADLFLAAKNLSDAILLSDILRVNTEITKAPLSASMIKRYDEHHQDLTLLKALVRQQLPEKYKEIFFDQSKNGYAGYIDGGASQEEFYKFIKPILEKMDGTEELLVKLNREDLLRKQRTFDNGSIPHQIHLGELHAILRRQEDFYPFLKDNREKIEKILTFRIPYYVGPLARGNSRFAWMTRKSEETITPWNFEEVVDKGASAQSFIERMTNFDKNLPNEKVLPKHSLLYEYFTVYNELTKVKYVTEGMRKPAFLSGEQKKAIVDLLFKTNRKVTVKQLKEDYFKKIECFDSVEISGVEDRFNASLGTYHDLLKIIKDKDFLDNEENEDILEDIVLTLTLFEDREMIEERLKTYAHLFDDKVMKQLKRRRYTGWGRLSRKLINGIRDKQSGKTILDFLKSDGFANRNFMQLIHDDSLTFKEDIQKAQVSGQGDSLHEHIANLAGSPAIKKGILQTVKVVDELVKVMGRHKPENIVIEMARENQTTQKGQKNSRERMKRIEEGIKELGSQILKEHPVENTQLQNEKLYLYYLQNGRDMYVDQELDINRLSDYDVDHIVPQSFLKDDSIDNKVLTRSDKARGKSDNVPSEEVVKKMKNYWRQLLNAKLITQRKFDNLTKAERGGLSELDKAGFIKRQLVETRQITKHVAQILDSRMNTKYDENDKLIREVKVITLKSKLVSDFRKDFQFYKVREINNYHHAHDAYLNAVVGTALIKKYPKLESEFVYGDYKVYDVRKMIAKSEQEIGKATAKYFFYSNIMNFFKTEITLANGEIRKRPLIETNGETGEIVWDKGRDFATVRKVLSMPQVNIVKKTEVQTGGFSKESILPKRNSDKLIARKKDWDPKKYGGFDSPTVAYSVLVVAKVEKGKSKKLKSVKELLGITIMERSSFEKNPIDFLEAKGYKEVKKDLIIKLPKYSLFELENGRKRMLASAGELQKGNELALPSKYVNFLYLASHYEKLKGSPEDNEQKQLFVEQHKHYLDEIIEQISEFSKRVILADANLDKVLSAYNKHRDKPIREQAENIIHLFTLTNLGAPAAFKYFDTTIDRKRYTSTKEVLDATLIHQSITGLYETRIDLSQLGGDGGGGGGGSPAPGGTLNIEDEHRLHETSKEPDVSLGSTWLSDFPQAWAETGGMGLAVRQAPLIIPLKATSTPVSIKQYPMSQEARLGIKPHIQRLLDQGILVPCQSPWNTPLLPVKKPGTNDYRPVQDLREVNKRVEDIHPTVPNPYNLLSGLPPSHQWYTVLDLKDAFFCLRLHPTSQPLFAFEWRDPEMGISGQLTWTRLPQGFKNSPTLFNEALHRDLADFRIQHPDLILLQYVDDLLLAATSELDCQQGTRALLQTLGNLGYRASAKKAQICQKQVKYLGYLLKEGQRWLTEARKETVMGQPTPKTPRQLREFLGTAGFCRLWIPGFAEMAAPLYPLTKPGTLFNWGPDQQKAYQEIKQALLTAPALGLPDLTKPFELFVDEKQGYAKGVLTQKLGPWRRPVAYLSKKLDPVAAGWPPCLRMVAAIAVLTKDAGKLTMGQPLVILAPHAVEALVKQPPDRWLSNARMTHYQALLLDTDRVQFGPVVALNPATLLPLPEEGLQHNCLDILAEAHGTRPDLTDQPLPDADHTWYTDGSSLLQEGQRKAGAAVTTETEVIWAKALPAGTSAQRAELIALTQALKMAEGKKLNVYTDSRYAFATAHIHGEIYRRRGWLTSEGKEIKNKDEILALLKALFLPKRLSIIHCPGHQKGHSAEARGNRMADQAARKAAITETPDTSTLLAGKRTADGSEFEKRTADGSEFESPKKKAKVE

SEQ ID NO: 2770 - protein, 2094 aa, synthetic construct
MPAAKRVKLDGGDKKYSIGLDIGTNSVGWAVITDEYKVPSKKFKVLGNTDRHSIKKNLIGALLFDSGETAEATRLKRTARRRYTRRKNRICYLQEIFSNEMAKVDDSFFHRLEESFLVEEDKKHERHPIFGNIVDEVAYHEKYPTIYHLRKKLVDSTDKADLRLIYLALAHMIKFRGHFLIEGDLNPDNSDVDKLFIQLVQTYNQLFEENPINASGVDAKAILSARLSKSRRLENLIAQLPGEKKNGLFGNLIALSLGLTPNFKSNFDLAEDAKLQLSKDTYDDDLDNLLAQIGDQYADLFLAAKNLSDAILLSDILRVNTEITKAPLSASMIKRYDEHHQDLTLLKALVRQQLPEKYKEIFFDQSKNGYAGYIDGGASQEEFYKFIKPILEKMDGTEELLVKLNREDLLRKQRTFDNGSIPHQIHLGELHAILRRQEDFYPFLKDNREKIEKILTFRIPYYVGPLARGNSRFAWMTRKSEETITPWNFEEVVDKGASAQSFIERMTNFDKNLPNEKVLPKHSLLYEYFTVYNELTKVKYVTEGMRKPAFLSGEQKKAIVDLLFKTNRKVTVKQLKEDYFKKIECFDSVEISGVEDRFNASLGTYHDLLKIIKDKDFLDNEENEDILEDIVLTLTLFEDREMIEERLKTYAHLFDDKVMKQLKRRRYTGWGRLSRKLINGIRDKQSGKTILDFLKSDGFANRNFMQLIHDDSLTFKEDIQKAQVSGQGDSLHEHIANLAGSPAIKKGILQTVKVVDELVKVMGRHKPENIVIEMARENQTTQKGQKNSRERMKRIEEGIKELGSQILKEHPVENTQLQNEKLYLYYLQNGRDMYVDQELDINRLSDYDVDHIVPQSFLKDDSIDNKVLTRSDKARGKSDNVPSEEVVKKMKNYWRQLLNAKLITQRKFDNLTKAERGGLSELDKAGFIKRQLVETRQITKHVAQILDSRMNTKYDENDKLIREVKVITLKSKLVSDFRKDFQFYKVREINNYHHAHDAYLNAVVGTALIKKYPKLESEFVYGDYKVYDVRKMIAKSEQEIGKATAKYFFYSNIMNFFKTEITLANGEIRKRPLIETNGETGEIVWDKGRDFATVRKVLSMPQVNIVKKTEVQTGGFSKESILPKRNSDKLIARKKDWDPKKYGGFDSPTVAYSVLVVAKVEKGKSKKLKSVKELLGITIMERSSFEKNPIDFLEAKGYKEVKKDLIIKLPKYSLFELENGRKRMLASAGELQKGNELALPSKYVNFLYLASHYEKLKGSPEDNEQKQLFVEQHKHYLDEIIEQISEFSKRVILADANLDKVLSAYNKHRDKPIREQAENIIHLFTLTNLGAPAAFKYFDTTIDRKRYTSTKEVLDATLIHQSITGLYETRIDLSQLGGDGGGGGGSSPAPGGTLNIEDEHRLHETSKEPDVSLGSTWLSDFPQAWAETGGMGLAVRQAPLIIPLKATSTPVSIKQYPMSQEARLGIKPHIQRLLDQGILVPCQSPWNTPLLPVKKPGTNDYRPVQDLREVNKRVEDIHPTVPNPYNLLSGLPPSHQWYTVLDLKDAFFCLRLHPTSQPLFAFEWRDPEMGISGQLTWTRLPQGFKNSPTLFNEALHRDLADFRIQHPDLILLQYVDDLLLAATSELDCQQGTRALLQTLGNLGYRASAKKAQICQKQVKYLGYLLKEGQRWLTEARKETVMGQPTPKTPRQLREFLGTAGFCRLWIPGFAEMAAPLYPLTKPGTLFNWGPDQQKAYQEIKQALLTAPALGLPDLTKPFELFVDEKQGYAKGVLTQKLGPWRRPVAYLSKKLDPVAAGWPPCLRMVAAIAVLTKDAGKLTMGQPLVILAPHAVEALVKQPPDRWLSNARMTHYQALLLDTDRVQFGPVVALNPATLLPLPEEGLQHNCLDILAEAHGTRPDLTDQPLPDADHTWYTDGSSLLQEGQRKAGAAVTTETEVIWAKALPAGTSAQRAELIALTQALKMAEGKKLNVYTDSRYAFATAHIHGEIYRRRGWLTSEGKEIKNKDEILALLKALFLPKRLSIIHCPGHQKGHSAEARGNRMADQAARKAAITETPDTSTLLAGKRTADGSEFEKRTADGSEFESPKKKAKVE

SEQ ID NO: 2771 - protein, 2105 aa, synthetic construct
MPAAKRVKLDGGDKKYSIGLDIGTNSVGWAVITDEYKVPSKKFKVLGNTDRHSIKKNLIGALLFDSGETAEATRLKRTARRRYTRRKNRICYLQEIFSNEMAKVDDSFFHRLEESFLVEEDKKHERHPIFGNIVDEVAYHEKYPTIYHLRKKLVDSTDKADLRLIYLALAHMIKFRGHFLIEGDLNPDNSDVDKLFIQLVQTYNQLFEENPINASGVDAKAILSARLSKSRRLENLIAQLPGEKKNGLFGNLIALSLGLTPNFKSNFDLAEDAKLQLSKDTYDDDLDNLLAQIGDQYADLFLAAKNLSDAILLSDILRVNTEITKAPLSASMIKRYDEHHQDLTLLKALVRQQLPEKYKEIFFDQSKNGYAGYIDGGASQEEFYKFIKPILEKMDGTEELLVKLNREDLLRKQRTFDNGSIPHQIHLGELHAILRRQEDFYPFLKDNREKIEKILTFRIPYYVGPLARGNSRFAWMTRKSEETITPWNFEEVVDKGASAQSFIERMTNFDKNLPNEKVLPKHSLLYEYFTVYNELTKVKYVTEGMRKPAFLSGEQKKAIVDLLFKTNRKVTVKQLKEDYFKKIECFDSVEISGVEDRFNASLGTYHDLLKIIKDKDFLDNEENEDILEDIVLTLTLFEDREMIEERLKTYAHLFDDKVMKQLKRRRYTGWGRLSRKLINGIRDKQSGKTILDFLKSDGFANRNFMQLIHDDSLTFKEDIQKAQVSGQGDSLHEHIANLAGSPAIKKGILQTVKVVDELVKVMGRHKPENIVIEMARENQTTQKGQKNSRERMKRIEEGIKELGSQILKEHPVENTQLQNEKLYLYYLQNGRDMYVDQELDINRLSDYDVDHIVPQSFLKDDSIDNKVLTRSDKARGKSDNVPSEEVVKKMKNYWRQLLNAKLITQRKFDNLTKAERGGLSELDKAGFIKRQLVETRQITKHVAQILDSRMNTKYDENDKLIREVKVITLKSKLVSDFRKDFQFYKVREINNYHHAHDAYLNAVVGTALIKKYPKLESEFVYGDYKVYDVRKMIAKSEQEIGKATAKYFFYSNIMNFFKTEITLANGEIRKRPLIETNGETGEIVWDKGRDFATVRKVLSMPQVNIVKKTEVQTGGFSKESILPKRNSDKLIARKKDWDPKKYGGFDSPTVAYSVLVVAKVEKGKSKKLKSVKELLGITIMERSSFEKNPIDFLEAKGYKEVKKDLIIKLPKYSLFELENGRKRMLASAGELQKGNELALPSKYVNFLYLASHYEKLKGSPEDNEQKQLFVEQHKHYLDEIIEQISEFSKRVILADANLDKVLSAYNKHRDKPIREQAENIIHLFTLTNLGAPAAFKYFDTTIDRKRYTSTKEVLDATLIHQSITGLYETRIDLSQLGGDGGGGGGSGGGGSGGGGSGGGGSGGTLNIEDEHRLHETSKEPDVSLGSTWLSDFPQAWAETGGMGLAVRQAPLIIPLKATSTPVSIKQYPMSQEARLGIKPHIQRLLDQGILVPCQSPWNTPLLPVKKPGTNDYRPVQDLREVNKRVEDIHPTVPNPYNLLSGLPPSHQWYTVLDLKDAFFCLRLHPTSQPLFAFEWRDPEMGISGQLTWTRLPQGFKNSPTLFNEALHRDLADFRIQHPDLILLQYVDDLLLAATSELDCQQGTRALLQTLGNLGYRASAKKAQICQKQVKYLGYLLKEGQRWLTEARKETVMGQPTPKTPRQLREFLGTAGFCRLWIPGFAEMAAPLYPLTKPGTLFNWGPDQQKAYQEIKQALLTAPALGLPDLTKPFELFVDEKQGYAKGVLTQKLGPWRRPVAYLSKKLDPVAAGWPPCLRMVAAIAVLTKDAGKLTMGQPLVILAPHAVEALVKQPPDRWLSNARMTHYQALLLDTDRVQFGPVVALNPATLLPLPEEGLQHNCLDILAEAHGTRPDLTDQPLPDADHTWYTDGSSLLQEGQRKAGAAVTTETEVIWAKALPAGTSAQRAELIALTQALKMAEGKKLNVYTDSRYAFATAHIHGEIYRRRGWLTSEGKEIKNKDEILALLKALFLPKRLSIIHCPGHQKGHSAEARGNRMADQAARKAAITETPDTSTLLAGKRTADGSEFEKRTADGSEFESPKKKAKVE

SEQ ID NO: 2772 - protein, 2100 aa, synthetic construct
MPAAKRVKLDGGDKKYSIGLDIGTNSVGWAVITDEYKVPSKKFKVLGNTDRHSIKKNLIGALLFDSGETAEATRLKRTARRRYTRRKNRICYLQEIFSNEMAKVDDSFFHRLEESFLVEEDKKHERHPIFGNIVDEVAYHEKYPTIYHLRKKLVDSTDKADLRLIYLALAHMIKFRGHFLIEGDLNPDNSDVDKLFIQLVQTYNQLFEENPINASGVDAKAILSARLSKSRRLENLIAQLPGEKKNGLFGNLIALSLGLTPNFKSNFDLAEDAKLQLSKDTYDDDLDNLLAQIGDQYADLFLAAKNLSDAILLSDILRVNTEITKAPLSASMIKRYDEHHQDLTLLKALVRQQLPEKYKEIFFDQSKNGYAGYIDGGASQEEFYKFIKPILEKMDGTEELLVKLNREDLLRKQRTFDNGSIPHQIHLGELHAILRRQEDFYPFLKDNREKIEKILTFRIPYYVGPLARGNSRFAWMTRKSEETITPWNFEEVVDKGASAQSFIERMTNFDKNLPNEKVLPKHSLLYEYFTVYNELTKVKYVTEGMRKPAFLSGEQKKAIVDLLFKTNRKVTVKQLKEDYFKKIECFDSVEISGVEDRFNASLGTYHDLLKIIKDKDFLDNEENEDILEDIVLTLTLFEDREMIEERLKTYAHLFDDKVMKQLKRRRYTGWGRLSRKLINGIRDKQSGKTILDFLKSDGFANRNFMQLIHDDSLTFKEDIQKAQVSGQGDSLHEHIANLAGSPAIKKGILQTVKVVDELVKVMGRHKPENIVIEMARENQTTQKGQKNSRERMKRIEEGIKELGSQILKEHPVENTQLQNEKLYLYYLQNGRDMYVDQELDINRLSDYDVDHIVPQSFLKDDSIDNKVLTRSDKARGKSDNVPSEEVVKKMKNYWRQLLNAKLITQRKFDNLTKAERGGLSELDKAGFIKRQLVETRQITKHVAQILDSRMNTKYDENDKLIREVKVITLKSKLVSDFRKDFQFYKVREINNYHHAHDAYLNAVVGTALIKKYPKLESEFVYGDYKVYDVRKMIAKSEQEIGKATAKYFFYSNIMNFFKTEITLANGEIRKRPLIETNGETGEIVWDKGRDFATVRKVLSMPQVNIVKKTEVQTGGFSKESILPKRNSDKLIARKKDWDPKKYGGFDSPTVAYSVLVVAKVEKGKSKKLKSVKELLGITIMERSSFEKNPIDFLEAKGYKEVKKDLIIKLPKYSLFELENGRKRMLASAGELQKGNELALPSKYVNFLYLASHYEKLKGSPEDNEQKQLFVEQHKHYLDEIIEQISEFSKRVILADANLDKVLSAYNKHRDKPIREQAENIIHLFTLTNLGAPAAFKYFDTTIDRKRYTSTKEVLDATLIHQSITGLYETRIDLSQLGGDGGEAAAKEAAAKEAAAKGGTLNIEDEHRLHETSKEPDVSLGSTWLSDFPQAWAETGGMGLAVRQAPLIIPLKATSTPVSIKQYPMSQEARLGIKPHIQRLLDQGILVPCQSPWNTPLLPVKKPGTNDYRPVQDLREVNKRVEDIHPTVPNPYNLLSGLPPSHQWYTVLDLKDAFFCLRLHPTSQPLFAFEWRDPEMGISGQLTWTRLPQGFKNSPTLFNEALHRDLADFRIQHPDLILLQYVDDLLLAATSELDCQQGTRALLQTLGNLGYRASAKKAQICQKQVKYLGYLLKEGQRWLTEARKETVMGQPTPKTPRQLREFLGTAGFCRLWIPGFAEMAAPLYPLTKPGTLFNWGPDQQKAYQEIKQALLTAPALGLPDLTKPFELFVDEKQGYAKGVLTQKLGPWRRPVAYLSKKLDPVAAGWPPCLRMVAAIAVLTKDAGKLTMGQPLVILAPHAVEALVKQPPDRWLSNARMTHYQALLLDTDRVQFGPVVALNPATLLPLPEEGLQHNCLDILAEAHGTRPDLTDQPLPDADHTWYTDGSSLLQEGQRKAGAAVTTETEVIWAKALPAGTSAQRAELIALTQALKMAEGKKLNVYTDSRYAFATAHIHGEIYRRRGWLTSEGKEIKNKDEILALLKALFLPKRLSIIHCPGHQKGHSAEARGNRMADQAARKAAITETPDTSTLLAGKRTADGSEFEKRTADGSEFESPKKKAKVE

SEQ ID NO: 2773 - protein, 2094 aa, synthetic construct
MPAAKRVKLDGGDKKYSIGLDIGTNSVGWAVITDEYKVPSKKFKVLGNTDRHSIKKNLIGALLFDSGETAEATRLKRTARRRYTRRKNRICYLQEIFSNEMAKVDDSFFHRLEESFLVEEDKKHERHPIFGNIVDEVAYHEKYPTIYHLRKKLVDSTDKADLRLIYLALAHMIKFRGHFLIEGDLNPDNSDVDKLFIQLVQTYNQLFEENPINASGVDAKAILSARLSKSRRLENLIAQLPGEKKNGLFGNLIALSLGLTPNFKSNFDLAEDAKLQLSKDTYDDDLDNLLAQIGDQYADLFLAAKNLSDAILLSDILRVNTEITKAPLSASMIKRYDEHHQDLTLLKALVRQQLPEKYKEIFFDQSKNGYAGYIDGGASQEEFYKFIKPILEKMDGTEELLVKLNREDLLRKQRTFDNGSIPHQIHLGELHAILRRQEDFYPFLKDNREKIEKILTFRIPYYVGPLARGNSRFAWMTRKSEETITPWNFEEVVDKGASAQSFIERMTNFDKNLPNEKVLPKHSLLYEYFTVYNELTKVKYVTEGMRKPAFLSGEQKKAIVDLLFKTNRKVTVKQLKEDYFKKIECFDSVEISGVEDRFNASLGTYHDLLKIIKDKDFLDNEENEDILEDIVLTLTLFEDREMIEERLKTYAHLFDDKVMKQLKRRRYTGWGRLSRKLINGIRDKQSGKTILDFLKSDGFANRNFMQLIHDDSLTFKEDIQKAQVSGQGDSLHEHIANLAGSPAIKKGILQTVKVVDELVKVMGRHKPENIVIEMARENQTTQKGQKNSRERMKRIEEGIKELGSQILKEHPVENTQLQNEKLYLYYLQNGRDMYVDQELDINRLSDYDVDHIVPQSFLKDDSIDNKVLTRSDKARGKSDNVPSEEVVKKMKNYWRQLLNAKLITQRKFDNLTKAERGGLSELDKAGFIKRQLVETRQITKHVAQILDSRMNTKYDENDKLIREVKVITLKSKLVSDFRKDFQFYKVREINNYHHAHDAYLNAVVGTALIKKYPKLESEFVYGDYKVYDVRKMIAKSEQEIGKATAKYFFYSNIMNFFKTEITLANGEIRKRPLIETNGETGEIVWDKGRDFATVRKVLSMPQVNIVKKTEVQTGGFSKESILPKRNSDKLIARKKDWDPKKYGGFDSPTVAYSVLVVAKVEKGKSKKLKSVKELLGITIMERSSFEKNPIDFLEAKGYKEVKKDLIIKLPKYSLFELENGRKRMLASAGELQKGNELALPSKYVNFLYLASHYEKLKGSPEDNEQKQLFVEQHKHYLDEIIEQISEFSKRVILADANLDKVLSAYNKHRDKPIREQAENIIHLFTLTNLGAPAAFKYFDTTIDRKRYTSTKEVLDATLIHQSITGLYETRIDLSQLGGDGGGGGPAPGSSGGTLNIEDEHRLHETSKEPDVSLGSTWLSDFPQAWAETGGMGLAVRQAPLIIPLKATSTPVSIKQYPMSQEARLGIKPHIQRLLDQGILVPCQSPWNTPLLPVKKPGTNDYRPVQDLREVNKRVEDIHPTVPNPYNLLSGLPPSHQWYTVLDLKDAFFCLRLHPTSQPLFAFEWRDPEMGISGQLTWTRLPQGFKNSPTLFNEALHRDLADFRIQHPDLILLQYVDDLLLAATSELDCQQGTRALLQTLGNLGYRASAKKAQICQKQVKYLGYLLKEGQRWLTEARKETVMGQPTPKTPRQLREFLGTAGFCRLWIPGFAEMAAPLYPLTKPGTLFNWGPDQQKAYQEIKQALLTAPALGLPDLTKPFELFVDEKQGYAKGVLTQKLGPWRRPVAYLSKKLDPVAAGWPPCLRMVAAIAVLTKDAGKLTMGQPLVILAPHAVEALVKQPPDRWLSNARMTHYQALLLDTDRVQFGPVVALNPATLLPLPEEGLQHNCLDILAEAHGTRPDLTDQPLPDADHTWYTDGSSLLQEGQRKAGAAVTTETEVIWAKALPAGTSAQRAELIALTQALKMAEGKKLNVYTDSRYAFATAHIHGEIYRRRGWLTSEGKEIKNKDEILALLKALFLPKRLSIIHCPGHQKGHSAEARGNRMADQAARKAAITETPDTSTLLAGKRTADGSEFEKRTADGSEFESPKKKAKVE

SEQ ID NO: 2774 - protein, 2093 aa, synthetic construct
MPAAKRVKLDGGDKKYSIGLDIGTNSVGWAVITDEYKVPSKKFKVLGNTDRHSIKKNLIGALLFDSGETAEATRLKRTARRRYTRRKNRICYLQEIFSNEMAKVDDSFFHRLEESFLVEEDKKHERHPIFGNIVDEVAYHEKYPTIYHLRKKLVDSTDKADLRLIYLALAHMIKFRGHFLIEGDLNPDNSDVDKLFIQLVQTYNQLFEENPINASGVDAKAILSARLSKSRRLENLIAQLPGEKKNGLFGNLIALSLGLTPNFKSNFDLAEDAKLQLSKDTYDDDLDNLLAQIGDQYADLFLAAKNLSDAILLSDILRVNTEITKAPLSASMIKRYDEHHQDLTLLKALVRQQLPEKYKEIFFDQSKNGYAGYIDGGASQEEFYKFIKPILEKMDGTEELLVKLNREDLLRKQRTFDNGSIPHQIHLGELHAILRRQEDFYPFLKDNREKIEKILTFRIPYYVGPLARGNSRFAWMTRKSEETITPWNFEEVVDKGASAQSFIERMTNFDKNLPNEKVLPKHSLLYEYFTVYNELTKVKYVTEGMRKPAFLSGEQKKAIVDLLFKTNRKVTVKQLKEDYFKKIECFDSVEISGVEDRFNASLGTYHDLLKIIKDKDFLDNEENEDILEDIVLTLTLFEDREMIEERLKTYAHLFDDKVMKQLKRRRYTGWGRLSRKLINGIRDKQSGKTILDFLKSDGFANRNFMQLIHDDSLTFKEDIQKAQVSGQGDSLHEHIANLAGSPAIKKGILQTVKVVDELVKVMGRHKPENIVIEMARENQTTQKGQKNSRERMKRIEEGIKELGSQILKEHPVENTQLQNEKLYLYYLQNGRDMYVDQELDINRLSDYDVDHIVPQSFLKDDSIDNKVLTRSDKARGKSDNVPSEEVVKKMKNYWRQLLNAKLITQRKFDNLTKAERGGLSELDKAGFIKRQLVETRQITKHVAQILDSRMNTKYDENDKLIREVKVITLKSKLVSDFRKDFQFYKVREINNYHHAHDAYLNAVVGTALIKKYPKLESEFVYGDYKVYDVRKMIAKSEQEIGKATAKYFFYSNIMNFFKTEITLANGEIRKRPLIETNGETGEIVWDKGRDFATVRKVLSMPQVNIVKKTEVQTGGFSKESILPKRNSDKLIARKKDWDPKKYGGFDSPTVAYSVLVVAKVEKGKSKKLKSVKELLGITIMERSSFEKNPIDFLEAKGYKEVKKDLIIKLPKYSLFELENGRKRMLASAGELQKGNELALPSKYVNFLYLASHYEKLKGSPEDNEQKQLFVEQHKHYLDEIIEQISEFSKRVILADANLDKVLSAYNKHRDKPIREQAENIIHLFTLTNLGAPAAFKYFDTTIDRKRYTSTKEVLDATLIHQSITGLYETRIDLSQLGGDGGGGSEAAAKGGTLNIEDEHRLHETSKEPDVSLGSTWLSDFPQAWAETGGMGLAVRQAPLIIPLKATSTPVSIKQYPMSQEARLGIKPHIQRLLDQGILVPCQSPWNTPLLPVKKPGTNDYRPVQDLREVNKRVEDIHPTVPNPYNLLSGLPPSHQWYTVLDLKDAFFCLRLHPTSQPLFAFEWRDPEMGISGQLTWTRLPQGFKNSPTLFNEALHRDLADFRIQHPDLILLQYVDDLLLAATSELDCQQGTRALLQTLGNLGYRASAKKAQICQKQVKYLGYLLKEGQRWLTEARKETVMGQPTPKTPRQLREFLGTAGFCRLWIPGFAEMAAPLYPLTKPGTLFNWGPDQQKAYQEIKQALLTAPALGLPDLTKPFELFVDEKQGYAKGVLTQKLGPWRRPVAYLSKKLDPVAAGWPPCLRMVAAIAVLTKDAGKLTMGQPLVILAPHAVEALVKQPPDRWLSNARMTHYQALLLDTDRVQFGPVVALNPATLLPLPEEGLQHNCLDILAEAHGTRPDLTDQPLPDADHTWYTDGSSLLQEGQRKAGAAVTTETEVIWAKALPAGTSAQRAELIALTQALKMAEGKKLNVYTDSRYAFATAHIHGEIYRRRGWLTSEGKEIKNKDEILALLKALFLPKRLSIIHCPGHQKGHSAEARGNRMADQAARKAAITETPDTSTLLAGKRTADGSEFEKRTADGSEFESPKKKAKVE

SEQ ID NO: 2775 - protein, 2096 aa, synthetic construct
MPAAKRVKLDGGDKKYSIGLDIGTNSVGWAVITDEYKVPSKKFKVLGNTDRHSIKKNLIGALLFDSGETAEATRLKRTARRRYTRRKNRICYLQEIFSNEMAKVDDSFFHRLEESFLVEEDKKHERHPIFGNIVDEVAYHEKYPTIYHLRKKLVDSTDKADLRLIYLALAHMIKFRGHFLIEGDLNPDNSDVDKLFIQLVQTYNQLFEENPINASGVDAKAILSARLSKSRRLENLIAQLPGEKKNGLFGNLIALSLGLTPNFKSNFDLAEDAKLQLSKDTYDDDLDNLLAQIGDQYADLFLAAKNLSDAILLSDILRVNTEITKAPLSASMIKRYDEHHQDLTLLKALVRQQLPEKYKEIFFDQSKNGYAGYIDGGASQEEFYKFIKPILEKMDGTEELLVKLNREDLLRKQRTFDNGSIPHQIHLGELHAILRRQEDFYPFLKDNREKIEKILTFRIPYYVGPLARGNSRFAWMTRKSEETITPWNFEEVVDKGASAQSFIERMTNFDKNLPNEKVLPKHSLLYEYFTVYNELTKVKYVTEGMRKPAFLSGEQKKAIVDLLFKTNRKVTVKQLKEDYFKKIECFDSVEISGVEDRFNASLGTYHDLLKIIKDKDFLDNEENEDILEDIVLTLTLFEDREMIEERLKTYAHLFDDKVMKQLKRRRYTGWGRLSRKLINGIRDKQSGKTILDFLKSDGFANRNFMQLIHDDSLTFKEDIQKAQVSGQGDSLHEHIANLAGSPAIKKGILQTVKVVDELVKVMGRHKPENIVIEMARENQTTQKGQKNSRERMKRIEEGIKELGSQILKEHPVENTQLQNEKLYLYYLQNGRDMYVDQELDINRLSDYDVDHIVPQSFLKDDSIDNKVLTRSDKARGKSDNVPSEEVVKKMKNYWRQLLNAKLITQRKFDNLTKAERGGLSELDKAGFIKRQLVETRQITKHVAQILDSRMNTKYDENDKLIREVKVITLKSKLVSDFRKDFQFYKVREINNYHHAHDAYLNAVVGTALIKKYPKLESEFVYGDYKVYDVRKMIAKSEQEIGKATAKYFFYSNIMNFFKTEITLANGEIRKRPLIETNGETGEIVWDKGRDFATVRKVLSMPQVNIVKKTEVQTGGFSKESILPKRNSDKLIARKKDWDPKKYGGFDSPTVAYSVLVVAKVEKGKSKKLKSVKELLGITIMERSSFEKNPIDFLEAKGYKEVKKDLIIKLPKYSLFELENGRKRMLASAGELQKGNELALPSKYVNFLYLASHYEKLKGSPEDNEQKQLFVEQHKHYLDEIIEQISEFSKRVILADANLDKVLSAYNKHRDKPIREQAENIIHLFTLTNLGAPAAFKYFDTTIDRKRYTSTKEVLDATLIHQSITGLYETRIDLSQLGGDGGGSSEAAAKPAPGGTLNIEDEHRLHETSKEPDVSLGSTWLSDFPQAWAETGGMGLAVRQAPLIIPLKATSTPVSIKQYPMSQEARLGIKPHIQRLLDQGILVPCQSPWNTPLLPVKKPGTNDYRPVQDLREVNKRVEDIHPTVPNPYNLLSGLPPSHQWYTVLDLKDAFFCLRLHPTSQPLFAFEWRDPEMGISGQLTWTRLPQGFKNSPTLFNEALHRDLADFRIQHPDLILLQYVDDLLLAATSELDCQQGTRALLQTLGNLGYRASAKKAQICQKQVKYLGYLLKEGQRWLTEARKETVMGQPTPKTPRQLREFLGTAGFCRLWIPGFAEMAAPLYPLTKPGTLFNWGPDQQKAYQEIKQALLTAPALGLPDLTKPFELFVDEKQGYAKGVLTQKLGPWRRPVAYLSKKLDPVAAGWPPCLRMVAAIAVLTKDAGKLTMGQPLVILAPHAVEALVKQPPDRWLSNARMTHYQALLLDTDRVQFGPVVALNPATLLPLPEEGLQHNCLDILAEAHGTRPDLTDQPLPDADHTWYTDGSSLLQEGQRKAGAAVTTETEVIWAKALPAGTSAQRAELIALTQALKMAEGKKLNVYTDSRYAFATAHIHGEIYRRRGWLTSEGKEIKNKDEILALLKALFLPKRLSIIHCPGHQKGHSAEARGNRMADQAARKAAITETPDTSTLLAGKRTADGSEFEKRTADGSEFESPKKKAKVE

SEQ ID NO: 2776 - protein, 2096 aa, synthetic construct
MPAAKRVKLDGGDKKYSIGLDIGTNSVGWAVITDEYKVPSKKFKVLGNTDRHSIKKNLIGALLFDSGETAEATRLKRTARRRYTRRKNRICYLQEIFSNEMAKVDDSFFHRLEESFLVEEDKKHERHPIFGNIVDEVAYHEKYPTIYHLRKKLVDSTDKADLRLIYLALAHMIKFRGHFLIEGDLNPDNSDVDKLFIQLVQTYNQLFEENPINASGVDAKAILSARLSKSRRLENLIAQLPGEKKNGLFGNLIALSLGLTPNFKSNFDLAEDAKLQLSKDTYDDDLDNLLAQIGDQYADLFLAAKNLSDAILLSDILRVNTEITKAPLSASMIKRYDEHHQDLTLLKALVRQQLPEKYKEIFFDQSKNGYAGYIDGGASQEEFYKFIKPILEKMDGTEELLVKLNREDLLRKQRTFDNGSIPHQIHLGELHAILRRQEDFYPFLKDNREKIEKILTFRIPYYVGPLARGNSRFAWMTRKSEETITPWNFEEVVDKGASAQSFIERMTNFDKNLPNEKVLPKHSLLYEYFTVYNELTKVKYVTEGMRKPAFLSGEQKKAIVDLLFKTNRKVTVKQLKEDYFKKIECFDSVEISGVEDRFNASLGTYHDLLKIIKDKDFLDNEENEDILEDIVLTLTLFEDREMIEERLKTYAHLFDDKVMKQLKRRRYTGWGRLSRKLINGIRDKQSGKTILDFLKSDGFANRNFMQLIHDDSLTFKEDIQKAQVSGQGDSLHEHIANLAGSPAIKKGILQTVKVVDELVKVMGRHKPENIVIEMARENQTTQKGQKNSRERMKRIEEGIKELGSQILKEHPVENTQLQNEKLYLYYLQNGRDMYVDQELDINRLSDYDVDHIVPQSFLKDDSIDNKVLTRSDKARGKSDNVPSEEVVKKMKNYWRQLLNAKLITQRKFDNLTKAERGGLSELDKAGFIKRQLVETRQITKHVAQILDSRMNTKYDENDKLIREVKVITLKSKLVSDFRKDFQFYKVREINNYHHAHDAYLNAVVGTALIKKYPKLESEFVYGDYKVYDVRKMIAKSEQEIGKATAKYFFYSNIMNFFKTEITLANGEIRKRPLIETNGETGEIVWDKGRDFATVRKVLSMPQVNIVKKTEVQTGGFSKESILPKRNSDKLIARKKDWDPKKYGGFDSPTVAYSVLVVAKVEKGKSKKLKSVKELLGITIMERSSFEKNPIDFLEAKGYKEVKKDLIIKLPKYSLFELENGRKRMLASAGELQKGNELALPSKYVNFLYLASHYEKLKGSPEDNEQKQLFVEQHKHYLDEIIEQISEFSKRVILADANLDKVLSAYNKHRDKPIREQAENIIHLFTLTNLGAPAAFKYFDTTIDRKRYTSTKEVLDATLIHQSITGLYETRIDLSQLGGDGGGGSPAPEAAAKGGTLNIEDEHRLHETSKEPDVSLGSTWLSDFPQAWAETGGMGLAVRQAPLIIPLKATSTPVSIKQYPMSQEARLGIKPHIQRLLDQGILVPCQSPWNTPLLPVKKPGTNDYRPVQDLREVNKRVEDIHPTVPNPYNLLSGLPPSHQWYTVLDLKDAFFCLRLHPTSQPLFAFEWRDPEMGISGQLTWTRLPQGFKNSPTLFNEALHRDLADFRIQHPDLILLQYVDDLLLAATSELDCQQGTRALLQTLGNLGYRASAKKAQICQKQVKYLGYLLKEGQRWLTEARKETVMGQPTPKTPRQLREFLGTAGFCRLWIPGFAEMAAPLYPLTKPGTLFNWGPDQQKAYQEIKQALLTAPALGLPDLTKPFELFVDEKQGYAKGVLTQKLGPWRRPVAYLSKKLDPVAAGWPPCLRMVAAIAVLTKDAGKLTMGQPLVILAPHAVEALVKQPPDRWLSNARMTHYQALLLDTDRVQFGPVVALNPATLLPLPEEGLQHNCLDILAEAHGTRPDLTDQPLPDADHTWYTDGSSLLQEGQRKAGAAVTTETEVIWAKALPAGTSAQRAELIALTQALKMAEGKKLNVYTDSRYAFATAHIHGEIYRRRGWLTSEGKEIKNKDEILALLKALFLPKRLSIIHCPGHQKGHSAEARGNRMADQAARKAAITETPDTSTLLAGKRTADGSEFEKRTADGSEFESPKKKAKVE

SEQ ID NO: 2777 - protein, 2096 aa, synthetic construct
MPAAKRVKLDGGDKKYSIGLDIGTNSVGWAVITDEYKVPSKKFKVLGNTDRHSIKKNLIGALLFDSGETAEATRLKRTARRRYTRRKNRICYLQEIFSNEMAKVDDSFFHRLEESFLVEEDKKHERHPIFGNIVDEVAYHEKYPTIYHLRKKLVDSTDKADLRLIYLALAHMIKFRGHFLIEGDLNPDNSDVDKLFIQLVQTYNQLFEENPINASGVDAKAILSARLSKSRRLENLIAQLPGEKKNGLFGNLIALSLGLTPNFKSNFDLAEDAKLQLSKDTYDDDLDNLLAQIGDQYADLFLAAKNLSDAILLSDILRVNTEITKAPLSASMIKRYDEHHQDLTLLKALVRQQLPEKYKEIFFDQSKNGYAGYIDGGASQEEFYKFIKPILEKMDGTEELLVKLNREDLLRKQRTFDNGSIPHQIHLGELHAILRRQEDFYPFLKDNREKIEKILTFRIPYYVGPLARGNSRFAWMTRKSEETITPWNFEEVVDKGASAQSFIERMTNFDKNLPNEKVLPKHSLLYEYFTVYNELTKVKYVTEGMRKPAFLSGEQKKAIVDLLFKTNRKVTVKQLKEDYFKKIECFDSVEISGVEDRFNASLGTYHDLLKIIKDKDFLDNEENEDILEDIVLTLTLFEDREMIEERLKTYAHLFDDKVMKQLKRRRYTGWGRLSRKLINGIRDKQSGKTILDFLKSDGFANRNFMQLIHDDSLTFKEDIQKAQVSGQGDSLHEHIANLAGSPAIKKGILQTVKVVDELVKVMGRHKPENIVIEMARENQTTQKGQKNSRERMKRIEEGIKELGSQILKEHPVENTQLQNEKLYLYYLQNGRDMYVDQELDINRLSDYDVDHIVPQSFLKDDSIDNKVLTRSDKARGKSDNVPSEEVVKKMKNYWRQLLNAKLITQRKFDNLTKAERGGLSELDKAGFIKRQLVETRQITKHVAQILDSRMNTKYDENDKLIREVKVITLKSKLVSDFRKDFQFYKVREINNYHHAHDAYLNAVVGTALIKKYPKLESEFVYGDYKVYDVRKMIAKSEQEIGKATAKYFFYSNIMNFFKTEITLANGEIRKRPLIETNGETGEIVWDKGRDFATVRKVLSMPQVNIVKKTEVQTGGFSKESILPKRNSDKLIARKKDWDPKKYGGFDSPTVAYSVLVVAKVEKGKSKKLKSVKELLGITIMERSSFEKNPIDFLEAKGYKEVKKDLIIKLPKYSLFELENGRKRMLASAGELQKGNELALPSKYVNFLYLASHYEKLKGSPEDNEQKQLFVEQHKHYLDEIIEQISEFSKRVILADANLDKVLSAYNKHRDKPIREQAENIIHLFTLTNLGAPAAFKYFDTTIDRKRYTSTKEVLDATLIHQSITGLYETRIDLSQLGGDGGGSSGGGEAAAKGGTLNIEDEHRLHETSKEPDVSLGSTWLSDFPQAWAETGGMGLAVRQAPLIIPLKATSTPVSIKQYPMSQEARLGIKPHIQRLLDQGILVPCQSPWNTPLLPVKKPGTNDYRPVQDLREVNKRVEDIHPTVPNPYNLLSGLPPSHQWYTVLDLKDAFFCLRLHPTSQPLFAFEWRDPEMGISGQLTWTRLPQGFKNSPTLFNEALHRDLADFRIQHPDLILLQYVDDLLLAATSELDCQQGTRALLQTLGNLGYRASAKKAQICQKQVKYLGYLLKEGQRWLTEARKETVMGQPTPKTPRQLREFLGTAGFCRLWIPGFAEMAAPLYPLTKPGTLFNWGPDQQKAYQEIKQALLTAPALGLPDLTKPFELFVDEKQGYAKGVLTQKLGPWRRPVAYLSKKLDPVAAGWPPCLRMVAAIAVLTKDAGKLTMGQPLVILAPHAVEALVKQPPDRWLSNARMTHYQALLLDTDRVQFGPVVALNPATLLPLPEEGLQHNCLDILAEAHGTRPDLTDQPLPDADHTWYTDGSSLLQEGQRKAGAAVTTETEVIWAKALPAGTSAQRAELIALTQALKMAEGKKLNVYTDSRYAFATAHIHGEIYRRRGWLTSEGKEIKNKDEILALLKALFLPKRLSIIHCPGHQKGHSAEARGNRMADQAARKAAITETPDTSTLLAGKRTADGSEFEKRTADGSEFESPKKKAKVE

SEQ ID NO: 2778 - protein, 2091 aa, synthetic construct
MPAAKRVKLDGGDKKYSIGLDIGTNSVGWAVITDEYKVPSKKFKVLGNTDRHSIKKNLIGALLFDSGETAEATRLKRTARRRYTRRKNRICYLQEIFSNEMAKVDDSFFHRLEESFLVEEDKKHERHPIFGNIVDEVAYHEKYPTIYHLRKKLVDSTDKADLRLIYLALAHMIKFRGHFLIEGDLNPDNSDVDKLFIQLVQTYNQLFEENPINASGVDAKAILSARLSKSRRLENLIAQLPGEKKNGLFGNLIALSLGLTPNFKSNFDLAEDAKLQLSKDTYDDDLDNLLAQIGDQYADLFLAAKNLSDAILLSDILRVNTEITKAPLSASMIKRYDEHHQDLTLLKALVRQQLPEKYKEIFFDQSKNGYAGYIDGGASQEEFYKFIKPILEKMDGTEELLVKLNREDLLRKQRTFDNGSIPHQIHLGELHAILRRQEDFYPFLKDNREKIEKILTFRIPYYVGPLARGNSRFAWMTRKSEETITPWNFEEVVDKGASAQSFIERMTNFDKNLPNEKVLPKHSLLYEYFTVYNELTKVKYVTEGMRKPAFLSGEQKKAIVDLLFKTNRKVTVKQLKEDYFKKIECFDSVEISGVEDRFNASLGTYHDLLKIIKDKDFLDNEENEDILEDIVLTLTLFEDREMIEERLKTYAHLFDDKVMKQLKRRRYTGWGRLSRKLINGIRDKQSGKTILDFLKSDGFANRNFMQLIHDDSLTFKEDIQKAQVSGQGDSLHEHIANLAGSPAIKKGILQTVKVVDELVKVMGRHKPENIVIEMARENQTTQKGQKNSRERMKRIEEGIKELGSQILKEHPVENTQLQNEKLYLYYLQNGRDMYVDQELDINRLSDYDVDHIVPQSFLKDDSIDNKVLTRSDKARGKSDNVPSEEVVKKMKNYWRQLLNAKLITQRKFDNLTKAERGGLSELDKAGFIKRQLVETRQITKHVAQILDSRMNTKYDENDKLIREVKVITLKSKLVSDFRKDFQFYKVREINNYHHAHDAYLNAVVGTALIKKYPKLESEFVYGDYKVYDVRKMIAKSEQEIGKATAKYFFYSNIMNFFKTEITLANGEIRKRPLIETNGETGEIVWDKGRDFATVRKVLSMPQVNIVKKTEVQTGGFSKESILPKRNSDKLIARKKDWDPKKYGGFDSPTVAYSVLVVAKVEKGKSKKLKSVKELLGITIMERSSFEKNPIDFLEAKGYKEVKKDLIIKLPKYSLFELENGRKRMLASAGELQKGNELALPSKYVNFLYLASHYEKLKGSPEDNEQKQLFVEQHKHYLDEIIEQISEFSKRVILADANLDKVLSAYNKHRDKPIREQAENIIHLFTLTNLGAPAAFKYFDTTIDRKRYTSTKEVLDATLIHQSITGLYETRIDLSQLGGDGGGSSGGSGGTLNIEDEHRLHETSKEPDVSLGSTWLSDFPQAWAETGGMGLAVRQAPLIIPLKATSTPVSIKQYPMSQEARLGIKPHIQRLLDQGILVPCQSPWNTPLLPVKKPGTNDYRPVQDLREVNKRVEDIHPTVPNPYNLLSGLPPSHQWYTVLDLKDAFFCLRLHPTSQPLFAFEWRDPEMGISGQLTWTRLPQGFKNSPTLFNEALHRDLADFRIQHPDLILLQYVDDLLLAATSELDCQQGTRALLQTLGNLGYRASAKKAQICQKQVKYLGYLLKEGQRWLTEARKETVMGQPTPKTPRQLREFLGTAGFCRLWIPGFAEMAAPLYPLTKPGTLFNWGPDQQKAYQEIKQALLTAPALGLPDLTKPFELFVDEKQGYAKGVLTQKLGPWRRPVAYLSKKLDPVAAGWPPCLRMVAAIAVLTKDAGKLTMGQPLVILAPHAVEALVKQPPDRWLSNARMTHYQALLLDTDRVQFGPVVALNPATLLPLPEEGLQHNCLDILAEAHGTRPDLTDQPLPDADHTWYTDGSSLLQEGQRKAGAAVTTETEVIWAKALPAGTSAQRAELIALTQALKMAEGKKLNVYTDSRYAFATAHIHGEIYRRRGWLTSEGKEIKNKDEILALLKALFLPKRLSIIHCPGHQKGHSAEARGNRMADQAARKAAITETPDTSTLLAGKRTADGSEFEKRTADGSEFESPKKKAKVE

SEQ ID NO: 2779 - protein, 2091 aa, synthetic construct
MPAAKRVKLDGGDKKYSIGLDIGTNSVGWAVITDEYKVPSKKFKVLGNTDRHSIKKNLIGALLFDSGETAEATRLKRTARRRYTRRKNRICYLQEIFSNEMAKVDDSFFHRLEESFLVEEDKKHERHPIFGNIVDEVAYHEKYPTIYHLRKKLVDSTDKADLRLIYLALAHMIKFRGHFLIEGDLNPDNSDVDKLFIQLVQTYNQLFEENPINASGVDAKAILSARLSKSRRLENLIAQLPGEKKNGLFGNLIALSLGLTPNFKSNFDLAEDAKLQLSKDTYDDDLDNLLAQIGDQYADLFLAAKNLSDAILLSDILRVNTEITKAPLSASMIKRYDEHHQDLTLLKALVRQQLPEKYKEIFFDQSKNGYAGYIDGGASQEEFYKFIKPILEKMDGTEELLVKLNREDLLRKQRTFDNGSIPHQIHLGELHAILRRQEDFYPFLKDNREKIEKILTFRIPYYVGPLARGNSRFAWMTRKSEETITPWNFEEVVDKGASAQSFIERMTNFDKNLPNEKVLPKHSLLYEYFTVYNELTKVKYVTEGMRKPAFLSGEQKKAIVDLLFKTNRKVTVKQLKEDYFKKIECFDSVEISGVEDRFNASLGTYHDLLKIIKDKDFLDNEENEDILEDIVLTLTLFEDREMIEERLKTYAHLFDDKVMKQLKRRRYTGWGRLSRKLINGIRDKQSGKTILDFLKSDGFANRNFMQLIHDDSLTFKEDIQKAQVSGQGDSLHEHIANLAGSPAIKKGILQTVKVVDELVKVMGRHKPENIVIEMARENQTTQKGQKNSRERMKRIEEGIKELGSQILKEHPVENTQLQNEKLYLYYLQNGRDMYVDQELDINRLSDYDVDHIVPQSFLKDDSIDNKVLTRSDKARGKSDNVPSEEVVKKMKNYWRQLLNAKLITQRKFDNLTKAERGGLSELDKAGFIKRQLVETRQITKHVAQILDSRMNTKYDENDKLIREVKVITLKSKLVSDFRKDFQFYKVREINNYHHAHDAYLNAVVGTALIKKYPKLESEFVYGDYKVYDVRKMIAKSEQEIGKATAKYFFYSNIMNFFKTEITLANGEIRKRPLIETNGETGEIVWDKGRDFATVRKVLSMPQVNIVKKTEVQTGGFSKESILPKRNSDKLIARKKDWDPKKYGGFDSPTVAYSVLVVAKVEKGKSKKLKSVKELLGITIMERSSFEKNPIDFLEAKGYKEVKKDLIIKLPKYSLFELENGRKRMLASAGELQKGNELALPSKYVNFLYLASHYEKLKGSPEDNEQKQLFVEQHKHYLDEIIEQISEFSKRVILADANLDKVLSAYNKHRDKPIREQAENIIHLFTLTNLGAPAAFKYFDTTIDRKRYTSTKEVLDATLIHQSITGLYETRIDLSQLGGDGGGSSGSSGGTLNIEDEHRLHETSKEPDVSLGSTWLSDFPQAWAETGGMGLAVRQAPLIIPLKATSTPVSIKQYPMSQEARLGIKPHIQRLLDQGILVPCQSPWNTPLLPVKKPGTNDYRPVQDLREVNKRVEDIHPTVPNPYNLLSGLPPSHQWYTVLDLKDAFFCLRLHPTSQPLFAFEWRDPEMGISGQLTWTRLPQGFKNSPTLFNEALHRDLADFRIQHPDLILLQYVDDLLLAATSELDCQQGTRALLQTLGNLGYRASAKKAQICQKQVKYLGYLLKEGQRWLTEARKETVMGQPTPKTPRQLREFLGTAGFCRLWIPGFAEMAAPLYPLTKPGTLFNWGPDQQKAYQEIKQALLTAPALGLPDLTKPFELFVDEKQGYAKGVLTQKLGPWRRPVAYLSKKLDPVAAGWPPCLRMVAAIAVLTKDAGKLTMGQPLVILAPHAVEALVKQPPDRWLSNARMTHYQALLLDTDRVQFGPVVALNPATLLPLPEEGLQHNCLDILAEAHGTRPDLTDQPLPDADHTWYTDGSSLLQEGQRKAGAAVTTETEVIWAKALPAGTSAQRAELIALTQALKMAEGKKLNVYTDSRYAFATAHIHGEIYRRRGWLTSEGKEIKNKDEILALLKALFLPKRLSIIHCPGHQKGHSAEARGNRMADQAARKAAITETPDTSTLLAGKRTADGSEFEKRTADGSEFESPKKKAKVE

SEQ ID NO: 2780 - protein, 2091 aa, synthetic construct
MPAAKRVKLDGGDKKYSIGLDIGTNSVGWAVITDEYKVPSKKFKVLGNTDRHSIKKNLIGALLFDSGETAEATRLKRTARRRYTRRKNRICYLQEIFSNEMAKVDDSFFHRLEESFLVEEDKKHERHPIFGNIVDEVAYHEKYPTIYHLRKKLVDSTDKADLRLIYLALAHMIKFRGHFLIEGDLNPDNSDVDKLFIQLVQTYNQLFEENPINASGVDAKAILSARLSKSRRLENLIAQLPGEKKNGLFGNLIALSLGLTPNFKSNFDLAEDAKLQLSKDTYDDDLDNLLAQIGDQYADLFLAAKNLSDAILLSDILRVNTEITKAPLSASMIKRYDEHHQDLTLLKALVRQQLPEKYKEIFFDQSKNGYAGYIDGGASQEEFYKFIKPILEKMDGTEELLVKLNREDLLRKQRTFDNGSIPHQIHLGELHAILRRQEDFYPFLKDNREKIEKILTFRIPYYVGPLARGNSRFAWMTRKSEETITPWNFEEVVDKGASAQSFIERMTNFDKNLPNEKVLPKHSLLYEYFTVYNELTKVKYVTEGMRKPAFLSGEQKKAIVDLLFKTNRKVTVKQLKEDYFKKIECFDSVEISGVEDRFNASLGTYHDLLKIIKDKDFLDNEENEDILEDIVLTLTLFEDREMIEERLKTYAHLFDDKVMKQLKRRRYTGWGRLSRKLINGIRDKQSGKTILDFLKSDGFANRNFMQLIHDDSLTFKEDIQKAQVSGQGDSLHEHIANLAGSPAIKKGILQTVKVVDELVKVMGRHKPENIVIEMARENQTTQKGQKNSRERMKRIEEGIKELGSQILKEHPVENTQLQNEKLYLYYLQNGRDMYVDQELDINRLSDYDVDHIVPQSFLKDDSIDNKVLTRSDKARGKSDNVPSEEVVKKMKNYWRQLLNAKLITQRKFDNLTKAERGGLSELDKAGFIKRQLVETRQITKHVAQILDSRMNTKYDENDKLIREVKVITLKSKLVSDFRKDFQFYKVREINNYHHAHDAYLNAVVGTALIKKYPKLESEFVYGDYKVYDVRKMIAKSEQEIGKATAKYFFYSNIMNFFKTEITLANGEIRKRPLIETNGETGEIVWDKGRDFATVRKVLSMPQVNIVKKTEVQTGGFSKESILPKRNSDKLIARKKDWDPKKYGGFDSPTVAYSVLVVAKVEKGKSKKLKSVKELLGITIMERSSFEKNPIDFLEAKGYKEVKKDLIIKLPKYSLFELENGRKRMLASAGELQKGNELALPSKYVNFLYLASHYEKLKGSPEDNEQKQLFVEQHKHYLDEIIEQISEFSKRVILADANLDKVLSAYNKHRDKPIREQAENIIHLFTLTNLGAPAAFKYFDTTIDRKRYTSTKEVLDATLIHQSITGLYETRIDLSQLGGDGGGGGGGSGGTLNIEDEHRLHETSKEPDVSLGSTWLSDFPQAWAETGGMGLAVRQAPLIIPLKATSTPVSIKQYPMSQEARLGIKPHIQRLLDQGILVPCQSPWNTPLLPVKKPGTNDYRPVQDLREVNKRVEDIHPTVPNPYNLLSGLPPSHQWYTVLDLKDAFFCLRLHPTSQPLFAFEWRDPEMGISGQLTWTRLPQGFKNSPTLFNEALHRDLADFRIQHPDLILLQYVDDLLLAATSELDCQQGTRALLQTLGNLGYRASAKKAQICQKQVKYLGYLLKEGQRWLTEARKETVMGQPTPKTPRQLREFLGKAGFCRLFIPGFAEMAAPLYPLTKPGTLFNWGPDQQKAYQEIKQALLTAPALGLPDLTKPFELFVDEKQGYAKGVLTQKLGPWRRPVAYLSKKLDPVAAGWPPCLRMVAAIAVLTKDAGKLTMGQPLVILAPHAVEALVKQPPDRWLSNARMTHYQALLLDTDRVQFGPVVALNPATLLPLPEEGLQHNCLDILAEAHGTRPDLTDQPLPDADHTWYTDGSSLLQEGQRKAGAAVTTETEVIWAKALPAGTSAQRAELIALTQALKMAEGKKLNVYTDSRYAFATAHIHGEIYRRRGWLTSEGKEIKNKDEILALLKALFLPKRLSIIHCPGHQKGHSAEARGNRMADQAARKAAITETPDTSTLLAGKRTADGSEFEKRTADGSEFESPKKKAKVE

SEQ ID NO: 2781 - protein, 2096 aa, synthetic construct
MPAAKRVKLDGGDKKYSIGLDIGTNSVGWAVITDEYKVPSKKFKVLGNTDRHSIKKNLIGALLFDSGETAEATRLKRTARRRYTRRKNRICYLQEIFSNEMAKVDDSFFHRLEESFLVEEDKKHERHPIFGNIVDEVAYHEKYPTIYHLRKKLVDSTDKADLRLIYLALAHMIKFRGHFLIEGDLNPDNSDVDKLFIQLVQTYNQLFEENPINASGVDAKAILSARLSKSRRLENLIAQLPGEKKNGLFGNLIALSLGLTPNFKSNFDLAEDAKLQLSKDTYDDDLDNLLAQIGDQYADLFLAAKNLSDAILLSDILRVNTEITKAPLSASMIKRYDEHHQDLTLLKALVRQQLPEKYKEIFFDQSKNGYAGYIDGGASQEEFYKFIKPILEKMDGTEELLVKLNREDLLRKQRTFDNGSIPHQIHLGELHAILRRQEDFYPFLKDNREKIEKILTFRIPYYVGPLARGNSRFAWMTRKSEETITPWNFEEVVDKGASAQSFIERMTNFDKNLPNEKVLPKHSLLYEYFTVYNELTKVKYVTEGMRKPAFLSGEQKKAIVDLLFKTNRKVTVKQLKEDYFKKIECFDSVEISGVEDRFNASLGTYHDLLKIIKDKDFLDNEENEDILEDIVLTLTLFEDREMIEERLKTYAHLFDDKVMKQLKRRRYTGWGRLSRKLINGIRDKQSGKTILDFLKSDGFANRNFMQLIHDDSLTFKEDIQKAQVSGQGDSLHEHIANLAGSPAIKKGILQTVKVVDELVKVMGRHKPENIVIEMARENQTTQKGQKNSRERMKRIEEGIKELGSQILKEHPVENTQLQNEKLYLYYLQNGRDMYVDQELDINRLSDYDVDHIVPQSFLKDDSIDNKVLTRSDKARGKSDNVPSEEVVKKMKNYWRQLLNAKLITQRKFDNLTKAERGGLSELDKAGFIKRQLVETRQITKHVAQILDSRMNTKYDENDKLIREVKVITLKSKLVSDFRKDFQFYKVREINNYHHAHDAYLNAVVGTALIKKYPKLESEFVYGDYKVYDVRKMIAKSEQEIGKATAKYFFYSNIMNFFKTEITLANGEIRKRPLIETNGETGEIVWDKGRDFATVRKVLSMPQVNIVKKTEVQTGGFSKESILPKRNSDKLIARKKDWDPKKYGGFDSPTVAYSVLVVAKVEKGKSKKLKSVKELLGITIMERSSFEKNPIDFLEAKGYKEVKKDLIIKLPKYSLFELENGRKRMLASAGELQKGNELALPSKYVNFLYLASHYEKLKGSPEDNEQKQLFVEQHKHYLDEIIEQISEFSKRVILADANLDKVLSAYNKHRDKPIREQAENIIHLFTLTNLGAPAAFKYFDTTIDRKRYTSTKEVLDATLIHQSITGLYETRIDLSQLGGDGGEAAAKPAPGSSGGTLNIEDEHRLHETSKEPDVSLGSTWLSDFPQAWAETGGMGLAVRQAPLIIPLKATSTPVSIKQYPMSQEARLGIKPHIQRLLDQGILVPCQSPWNTPLLPVKKPGTNDYRPVQDLREVNKRVEDIHPTVPNPYNLLSGLPPSHQWYTVLDLKDAFFCLRLHPTSQPLFAFEWRDPEMGISGQLTWTRLPQGFKNSPTLFNEALHRDLADFRIQHPDLILLQYVDDLLLAATSELDCQQGTRALLQTLGNLGYRASAKKAQICQKQVKYLGYLLKEGQRWLTEARKETVMGQPTPKTPRQLREFLGKAGFCRLFIPGFAEMAAPLYPLTKPGTLFNWGPDQQKAYQEIKQALLTAPALGLPDLTKPFELFVDEKQGYAKGVLTQKLGPWRRPVAYLSKKLDPVAAGWPPCLRMVAAIAVLTKDAGKLTMGQPLVILAPHAVEALVKQPPDRWLSNARMTHYQALLLDTDRVQFGPVVALNPATLLPLPEEGLQHNCLDILAEAHGTRPDLTDQPLPDADHTWYTDGSSLLQEGQRKAGAAVTTETEVIWAKALPAGTSAQRAELIALTQALKMAEGKKLNVYTDSRYAFATAHIHGEIYRRRGWLTSEGKEIKNKDEILALLKALFLPKRLSIIHCPGHQKGHSAEARGNRMADQAARKAAITETPDTSTLLAGKRTADGSEFEKRTADGSEFESPKKKAKVE

SEQ ID NO: 2782 - protein, 2096 aa, synthetic construct
MPAAKRVKLDGGDKKYSIGLDIGTNSVGWAVITDEYKVPSKKFKVLGNTDRHSIKKNLIGALLFDSGETAEATRLKRTARRRYTRRKNRICYLQEIFSNEMAKVDDSFFHRLEESFLVEEDKKHERHPIFGNIVDEVAYHEKYPTIYHLRKKLVDSTDKADLRLIYLALAHMIKFRGHFLIEGDLNPDNSDVDKLFIQLVQTYNQLFEENPINASGVDAKAILSARLSKSRRLENLIAQLPGEKKNGLFGNLIALSLGLTPNFKSNFDLAEDAKLQLSKDTYDDDLDNLLAQIGDQYADLFLAAKNLSDAILLSDILRVNTEITKAPLSASMIKRYDEHHQDLTLLKALVRQQLPEKYKEIFFDQSKNGYAGYIDGGASQEEFYKFIKPILEKMDGTEELLVKLNREDLLRKQRTFDNGSIPHQIHLGELHAILRRQEDFYPFLKDNREKIEKILTFRIPYYVGPLARGNSRFAWMTRKSEETITPWNFEEVVDKGASAQSFIERMTNFDKNLPNEKVLPKHSLLYEYFTVYNELTKVKYVTEGMRKPAFLSGEQKKAIVDLLFKTNRKVTVKQLKEDYFKKIECFDSVEISGVEDRFNASLGTYHDLLKIIKDKDFLDNEENEDILEDIVLTLTLFEDREMIEERLKTYAHLFDDKVMKQLKRRRYTGWGRLSRKLINGIRDKQSGKTILDFLKSDGFANRNFMQLIHDDSLTFKEDIQKAQVSGQGDSLHEHIANLAGSPAIKKGILQTVKVVDELVKVMGRHKPENIVIEMARENQTTQKGQKNSRERMKRIEEGIKELGSQILKEHPVENTQLQNEKLYLYYLQNGRDMYVDQELDINRLSDYDVDHIVPQSFLKDDSIDNKVLTRSDKARGKSDNVPSEEVVKKMKNYWRQLLNAKLITQRKFDNLTKAERGGLSELDKAGFIKRQLVETRQITKHVAQILDSRMNTKYDENDKLIREVKVITLKSKLVSDFRKDFQFYKVREINNYHHAHDAYLNAVVGTALIKKYPKLESEFVYGDYKVYDVRKMIAKSEQEIGKATAKYFFYSNIMNFFKTEITLANGEIRKRPLIETNGETGEIVWDKGRDFATVRKVLSMPQVNIVKKTEVQTGGFSKESILPKRNSDKLIARKKDWDPKKYGGFDSPTVAYSVLVVAKVEKGKSKKLKSVKELLGITIMERSSFEKNPIDFLEAKGYKEVKKDLIIKLPKYSLFELENGRKRMLASAGELQKGNELALPSKYVNFLYLASHYEKLKGSPEDNEQKQLFVEQHKHYLDEIIEQISEFSKRVILADANLDKVLSAYNKHRDKPIREQAENIIHLFTLTNLGAPAAFKYFDTTIDRKRYTSTKEVLDATLIHQSITGLYETRIDLSQLGGDGGEAAAKGGSPAPGGTLNIEDEHRLHETSKEPDVSLGSTWLSDFPQAWAETGGMGLAVRQAPLIIPLKATSTPVSIKQYPMSQEARLGIKPHIQRLLDQGILVPCQSPWNTPLLPVKKPGTNDYRPVQDLREVNKRVEDIHPTVPNPYNLLSGLPPSHQWYTVLDLKDAFFCLRLHPTSQPLFAFEWRDPEMGISGQLTWTRLPQGFKNSPTLFNEALHRDLADFRIQHPDLILLQYVDDLLLAATSELDCQQGTRALLQTLGNLGYRASAKKAQICQKQVKYLGYLLKEGQRWLTEARKETVMGQPTPKTPRQLREFLGKAGFCRLFIPGFAEMAAPLYPLTKPGTLFNWGPDQQKAYQEIKQALLTAPALGLPDLTKPFELFVDEKQGYAKGVLTQKLGPWRRPVAYLSKKLDPVAAGWPPCLRMVAAIAVLTKDAGKLTMGQPLVILAPHAVEALVKQPPDRWLSNARMTHYQALLLDTDRVQFGPVVALNPATLLPLPEEGLQHNCLDILAEAHGTRPDLTDQPLPDADHTWYTDGSSLLQEGQRKAGAAVTTETEVIWAKALPAGTSAQRAELIALTQALKMAEGKKLNVYTDSRYAFATAHIHGEIYRRRGWLTSEGKEIKNKDEILALLKALFLPKRLSIIHCPGHQKGHSAEARGNRMADQAARKAAITETPDTSTLLAGKRTADGSEFEKRTADGSEFESPKKKAKVE

SEQ ID NO: 2783 - protein, 2093 aa, synthetic construct
MPAAKRVKLDGGDKKYSIGLDIGTNSVGWAVITDEYKVPSKKFKVLGNTDRHSIKKNLIGALLFDSGETAEATRLKRTARRRYTRRKNRICYLQEIFSNEMAKVDDSFFHRLEESFLVEEDKKHERHPIFGNIVDEVAYHEKYPTIYHLRKKLVDSTDKADLRLIYLALAHMIKFRGHFLIEGDLNPDNSDVDKLFIQLVQTYNQLFEENPINASGVDAKAILSARLSKSRRLENLIAQLPGEKKNGLFGNLIALSLGLTPNFKSNFDLAEDAKLQLSKDTYDDDLDNLLAQIGDQYADLFLAAKNLSDAILLSDILRVNTEITKAPLSASMIKRYDEHHQDLTLLKALVRQQLPEKYKEIFFDQSKNGYAGYIDGGASQEEFYKFIKPILEKMDGTEELLVKLNREDLLRKQRTFDNGSIPHQIHLGELHAILRRQEDFYPFLKDNREKIEKILTFRIPYYVGPLARGNSRFAWMTRKSEETITPWNFEEVVDKGASAQSFIERMTNFDKNLPNEKVLPKHSLLYEYFTVYNELTKVKYVTEGMRKPAFLSGEQKKAIVDLLFKTNRKVTVKQLKEDYFKKIECFDSVEISGVEDRFNASLGTYHDLLKIIKDKDFLDNEENEDILEDIVLTLTLFEDREMIEERLKTYAHLFDDKVMKQLKRRRYTGWGRLSRKLINGIRDKQSGKTILDFLKSDGFANRNFMQLIHDDSLTFKEDIQKAQVSGQGDSLHEHIANLAGSPAIKKGILQTVKVVDELVKVMGRHKPENIVIEMARENQTTQKGQKNSRERMKRIEEGIKELGSQILKEHPVENTQLQNEKLYLYYLQNGRDMYVDQELDINRLSDYDVDHIVPQSFLKDDSIDNKVLTRSDKARGKSDNVPSEEVVKKMKNYWRQLLNAKLITQRKFDNLTKAERGGLSELDKAGFIKRQLVETRQITKHVAQILDSRMNTKYDENDKLIREVKVITLKSKLVSDFRKDFQFYKVREINNYHHAHDAYLNAVVGTALIKKYPKLESEFVYGDYKVYDVRKMIAKSEQEIGKATAKYFFYSNIMNFFKTEITLANGEIRKRPLIETNGETGEIVWDKGRDFATVRKVLSMPQVNIVKKTEVQTGGFSKESILPKRNSDKLIARKKDWDPKKYGGFDSPTVAYSVLVVAKVEKGKSKKLKSVKELLGITIMERSSFEKNPIDFLEAKGYKEVKKDLIIKLPKYSLFELENGRKRMLASAGELQKGNELALPSKYVNFLYLASHYEKLKGSPEDNEQKQLFVEQHKHYLDEIIEQISEFSKRVILADANLDKVLSAYNKHRDKPIREQAENIIHLFTLTNLGAPAAFKYFDTTIDRKRYTSTKEVLDATLIHQSITGLYETRIDLSQLGGDGGEAAAKGGSGGTLNIEDEHRLHETSKEPDVSLGSTWLSDFPQAWAETGGMGLAVRQAPLIIPLKATSTPVSIKQYPMSQEARLGIKPHIQRLLDQGILVPCQSPWNTPLLPVKKPGTNDYRPVQDLREVNKRVEDIHPTVPNPYNLLSGLPPSHQWYTVLDLKDAFFCLRLHPTSQPLFAFEWRDPEMGISGQLTWTRLPQGFKNSPTLFNEALHRDLADFRIQHPDLILLQYVDDLLLAATSELDCQQGTRALLQTLGNLGYRASAKKAQICQKQVKYLGYLLKEGQRWLTEARKETVMGQPTPKTPRQLREFLGKAGFCRLFIPGFAEMAAPLYPLTKPGTLFNWGPDQQKAYQEIKQALLTAPALGLPDLTKPFELFVDEKQGYAKGVLTQKLGPWRRPVAYLSKKLDPVAAGWPPCLRMVAAIAVLTKDAGKLTMGQPLVILAPHAVEALVKQPPDRWLSNARMTHYQALLLDTDRVQFGPVVALNPATLLPLPEEGLQHNCLDILAEAHGTRPDLTDQPLPDADHTWYTDGSSLLQEGQRKAGAAVTTETEVIWAKALPAGTSAQRAELIALTQALKMAEGKKLNVYTDSRYAFATAHIHGEIYRRRGWLTSEGKEIKNKDEILALLKALFLPKRLSIIHCPGHQKGHSAEARGNRMADQAARKAAITETPDTSTLLAGKRTADGSEFEKRTADGSEFESPKKKAKVE

SEQ ID NO: 2784 - protein, 2131 aa, synthetic construct
MPAAKRVKLDGGDKKYSIGLDIGTNSVGWAVITDEYKVPSKKFKVLGNTDRHSIKKNLIGALLFDSGETAEATRLKRTARRRYTRRKNRICYLQEIFSNEMAKVDDSFFHRLEESFLVEEDKKHERHPIFGNIVDEVAYHEKYPTIYHLRKKLVDSTDKADLRLIYLALAHMIKFRGHFLIEGDLNPDNSDVDKLFIQLVQTYNQLFEENPINASGVDAKAILSARLSKSRRLENLIAQLPGEKKNGLFGNLIALSLGLTPNFKSNFDLAEDAKLQLSKDTYDDDLDNLLAQIGDQYADLFLAAKNLSDAILLSDILRVNTEITKAPLSASMIKRYDEHHQDLTLLKALVRQQLPEKYKEIFFDQSKNGYAGYIDGGASQEEFYKFIKPILEKMDGTEELLVKLNREDLLRKQRTFDNGSIPHQIHLGELHAILRRQEDFYPFLKDNREKIEKILTFRIPYYVGPLARGNSRFAWMTRKSEETITPWNFEEVVDKGASAQSFIERMTNFDKNLPNEKVLPKHSLLYEYFTVYNELTKVKYVTEGMRKPAFLSGEQKKAIVDLLFKTNRKVTVKQLKEDYFKKIECFDSVEISGVEDRFNASLGTYHDLLKIIKDKDFLDNEENEDILEDIVLTLTLFEDREMIEERLKTYAHLFDDKVMKQLKRRRYTGWGRLSRKLINGIRDKQSGKTILDFLKSDGFANRNFMQLIHDDSLTFKEDIQKAQVSGQGDSLHEHIANLAGSPAIKKGILQTVKVVDELVKVMGRHKPENIVIEMARENQTTQKGQKNSRERMKRIEEGIKELGSQILKEHPVENTQLQNEKLYLYYLQNGRDMYVDQELDINRLSDYDVDHIVPQSFLKDDSIDNKVLTRSDKARGKSDNVPSEEVVKKMKNYWRQLLNAKLITQRKFDNLTKAERGGLSELDKAGFIKRQLVETRQITKHVAQILDSRMNTKYDENDKLIREVKVITLKSKLVSDFRKDFQFYKVREINNYHHAHDAYLNAVVGTALIKKYPKLESEFVYGDYKVYDVRKMIAKSEQEIGKATAKYFFYSNIMNFFKTEITLANGEIRKRPLIETNGETGEIVWDKGRDFATVRKVLSMPQVNIVKKTEVQTGGFSKESILPKRNSDKLIARKKDWDPKKYGGFDSPTVAYSVLVVAKVEKGKSKKLKSVKELLGITIMERSSFEKNPIDFLEAKGYKEVKKDLIIKLPKYSLFELENGRKRMLASAGELQKGNELALPSKYVNFLYLASHYEKLKGSPEDNEQKQLFVEQHKHYLDEIIEQISEFSKRVILADANLDKVLSAYNKHRDKPIREQAENIIHLFTLTNLGAPAAFKYFDTTIDRKRYTSTKEVLDATLIHQSITGLYETRIDLSQLGGDGGAEAAAKEAAAKEAAAKEAAAKALEAEAAAKEAAAKEAAAKEAAAKAGGTLNIEDEHRLHETSKEPDVSLGSTWLSDFPQAWAETGGMGLAVRQAPLIIPLKATSTPVSIKQYPMSQEARLGIKPHIQRLLDQGILVPCQSPWNTPLLPVKKPGTNDYRPVQDLREVNKRVEDIHPTVPNPYNLLSGLPPSHQWYTVLDLKDAFFCLRLHPTSQPLFAFEWRDPEMGISGQLTWTRLPQGFKNSPTLFNEALHRDLADFRIQHPDLILLQYVDDLLLAATSELDCQQGTRALLQTLGNLGYRASAKKAQICQKQVKYLGYLLKEGQRWLTEARKETVMGQPTPKTPRQLREFLGKAGFCRLFIPGFAEMAAPLYPLTKPGTLFNWGPDQQKAYQEIKQALLTAPALGLPDLTKPFELFVDEKQGYAKGVLTQKLGPWRRPVAYLSKKLDPVAAGWPPCLRMVAAIAVLTKDAGKLTMGQPLVILAPHAVEALVKQPPDRWLSNARMTHYQALLLDTDRVQFGPVVALNPATLLPLPEEGLQHNCLDILAEAHGTRPDLTDQPLPDADHTWYTDGSSLLQEGQRKAGAAVTTETEVIWAKALPAGTSAQRAELIALTQALKMAEGKKLNVYTDSRYAFATAHIHGEIYRRRGWLTSEGKEIKNKDEILALLKALFLPKRLSIIHCPGHQKGHSAEARGNRMADQAARKAAITETPDTSTLLAGKRTADGSEFEKRTADGSEFESPKKKAKVE

SEQ ID NO: 2785 - protein, 2096 aa, synthetic construct
MPAAKRVKLDGGDKKYSIGLDIGTNSVGWAVITDEYKVPSKKFKVLGNTDRHSIKKNLIGALLFDSGETAEATRLKRTARRRYTRRKNRICYLQEIFSNEMAKVDDSFFHRLEESFLVEEDKKHERHPIFGNIVDEVAYHEKYPTIYHLRKKLVDSTDKADLRLIYLALAHMIKFRGHFLIEGDLNPDNSDVDKLFIQLVQTYNQLFEENPINASGVDAKAILSARLSKSRRLENLIAQLPGEKKNGLFGNLIALSLGLTPNFKSNFDLAEDAKLQLSKDTYDDDLDNLLAQIGDQYADLFLAAKNLSDAILLSDILRVNTEITKAPLSASMIKRYDEHHQDLTLLKALVRQQLPEKYKEIFFDQSKNGYAGYIDGGASQEEFYKFIKPILEKMDGTEELLVKLNREDLLRKQRTFDNGSIPHQIHLGELHAILRRQEDFYPFLKDNREKIEKILTFRIPYYVGPLARGNSRFAWMTRKSEETITPWNFEEVVDKGASAQSFIERMTNFDKNLPNEKVLPKHSLLYEYFTVYNELTKVKYVTEGMRKPAFLSGEQKKAIVDLLFKTNRKVTVKQLKEDYFKKIECFDSVEISGVEDRFNASLGTYHDLLKIIKDKDFLDNEENEDILEDIVLTLTLFEDREMIEERLKTYAHLFDDKVMKQLKRRRYTGWGRLSRKLINGIRDKQSGKTILDFLKSDGFANRNFMQLIHDDSLTFKEDIQKAQVSGQGDSLHEHIANLAGSPAIKKGILQTVKVVDELVKVMGRHKPENIVIEMARENQTTQKGQKNSRERMKRIEEGIKELGSQILKEHPVENTQLQNEKLYLYYLQNGRDMYVDQELDINRLSDYDVDHIVPQSFLKDDSIDNKVLTRSDKARGKSDNVPSEEVVKKMKNYWRQLLNAKLITQRKFDNLTKAERGGLSELDKAGFIKRQLVETRQITKHVAQILDSRMNTKYDENDKLIREVKVITLKSKLVSDFRKDFQFYKVREINNYHHAHDAYLNAVVGTALIKKYPKLESEFVYGDYKVYDVRKMIAKSEQEIGKATAKYFFYSNIMNFFKTEITLANGEIRKRPLIETNGETGEIVWDKGRDFATVRKVLSMPQVNIVKKTEVQTGGFSKESILPKRNSDKLIARKKDWDPKKYGGFDSPTVAYSVLVVAKVEKGKSKKLKSVKELLGITIMERSSFEKNPIDFLEAKGYKEVKKDLIIKLPKYSLFELENGRKRMLASAGELQKGNELALPSKYVNFLYLASHYEKLKGSPEDNEQKQLFVEQHKHYLDEIIEQISEFSKRVILADANLDKVLSAYNKHRDKPIREQAENIIHLFTLTNLGAPAAFKYFDTTIDRKRYTSTKEVLDATLIHQSITGLYETRIDLSQLGGDGGEAAAKGSSGGGGGTLNIEDEHRLHETSKEPDVSLGSTWLSDFPQAWAETGGMGLAVRQAPLIIPLKATSTPVSIKQYPMSQEARLGIKPHIQRLLDQGILVPCQSPWNTPLLPVKKPGTNDYRPVQDLREVNKRVEDIHPTVPNPYNLLSGLPPSHQWYTVLDLKDAFFCLRLHPTSQPLFAFEWRDPEMGISGQLTWTRLPQGFKNSPTLFNEALHRDLADFRIQHPDLILLQYVDDLLLAATSELDCQQGTRALLQTLGNLGYRASAKKAQICQKQVKYLGYLLKEGQRWLTEARKETVMGQPTPKTPRQLREFLGKAGFCRLFIPGFAEMAAPLYPLTKPGTLFNWGPDQQKAYQEIKQALLTAPALGLPDLTKPFELFVDEKQGYAKGVLTQKLGPWRRPVAYLSKKLDPVAAGWPPCLRMVAAIAVLTKDAGKLTMGQPLVILAPHAVEALVKQPPDRWLSNARMTHYQALLLDTDRVQFGPVVALNPATLLPLPEEGLQHNCLDILAEAHGTRPDLTDQPLPDADHTWYTDGSSLLQEGQRKAGAAVTTETEVIWAKALPAGTSAQRAELIALTQALKMAEGKKLNVYTDSRYAFATAHIHGEIYRRRGWLTSEGKEIKNKDEILALLKALFLPKRLSIIHCPGHQKGHSAEARGNRMADQAARKAAITETPDTSTLLAGKRTADGSEFEKRTADGSEFESPKKKAKVE

SEQ ID NO: 2786 - protein, 2096 aa, synthetic construct
MPAAKRVKLDGGDKKYSIGLDIGTNSVGWAVITDEYKVPSKKFKVLGNTDRHSIKKNLIGALLFDSGETAEATRLKRTARRRYTRRKNRICYLQEIFSNEMAKVDDSFFHRLEESFLVEEDKKHERHPIFGNIVDEVAYHEKYPTIYHLRKKLVDSTDKADLRLIYLALAHMIKFRGHFLIEGDLNPDNSDVDKLFIQLVQTYNQLFEENPINASGVDAKAILSARLSKSRRLENLIAQLPGEKKNGLFGNLIALSLGLTPNFKSNFDLAEDAKLQLSKDTYDDDLDNLLAQIGDQYADLFLAAKNLSDAILLSDILRVNTEITKAPLSASMIKRYDEHHQDLTLLKALVRQQLPEKYKEIFFDQSKNGYAGYIDGGASQEEFYKFIKPILEKMDGTEELLVKLNREDLLRKQRTFDNGSIPHQIHLGELHAILRRQEDFYPFLKDNREKIEKILTFRIPYYVGPLARGNSRFAWMTRKSEETITPWNFEEVVDKGASAQSFIERMTNFDKNLPNEKVLPKHSLLYEYFTVYNELTKVKYVTEGMRKPAFLSGEQKKAIVDLLFKTNRKVTVKQLKEDYFKKIECFDSVEISGVEDRFNASLGTYHDLLKIIKDKDFLDNEENEDILEDIVLTLTLFEDREMIEERLKTYAHLFDDKVMKQLKRRRYTGWGRLSRKLINGIRDKQSGKTILDFLKSDGFANRNFMQLIHDDSLTFKEDIQKAQVSGQGDSLHEHIANLAGSPAIKKGILQTVKVVDELVKVMGRHKPENIVIEMARENQTTQKGQKNSRERMKRIEEGIKELGSQILKEHPVENTQLQNEKLYLYYLQNGRDMYVDQELDINRLSDYDVDHIVPQSFLKDDSIDNKVLTRSDKARGKSDNVPSEEVVKKMKNYWRQLLNAKLITQRKFDNLTKAERGGLSELDKAGFIKRQLVETRQITKHVAQILDSRMNTKYDENDKLIREVKVITLKSKLVSDFRKDFQFYKVREINNYHHAHDAYLNAVVGTALIKKYPKLESEFVYGDYKVYDVRKMIAKSEQEIGKATAKYFFYSNIMNFFKTEITLANGEIRKRPLIETNGETGEIVWDKGRDFATVRKVLSMPQVNIVKKTEVQTGGFSKESILPKRNSDKLIARKKDWDPKKYGGFDSPTVAYSVLVVAKVEKGKSKKLKSVKELLGITIMERSSFEKNPIDFLEAKGYKEVKKDLIIKLPKYSLFELENGRKRMLASAGELQKGNELALPSKYVNFLYLASHYEKLKGSPEDNEQKQLFVEQHKHYLDEIIEQISEFSKRVILADANLDKVLSAYNKHRDKPIREQAENIIHLFTLTNLGAPAAFKYFDTTIDRKRYTSTKEVLDATLIHQSITGLYETRIDLSQLGGDGGPAPGGSEAAAKGGTLNIEDEHRLHETSKEPDVSLGSTWLSDFPQAWAETGGMGLAVRQAPLIIPLKATSTPVSIKQYPMSQEARLGIKPHIQRLLDQGILVPCQSPWNTPLLPVKKPGTNDYRPVQDLREVNKRVEDIHPTVPNPYNLLSGLPPSHQWYTVLDLKDAFFCLRLHPTSQPLFAFEWRDPEMGISGQLTWTRLPQGFKNSPTLFNEALHRDLADFRIQHPDLILLQYVDDLLLAATSELDCQQGTRALLQTLGNLGYRASAKKAQICQKQVKYLGYLLKEGQRWLTEARKETVMGQPTPKTPRQLREFLGKAGFCRLFIPGFAEMAAPLYPLTKPGTLFNWGPDQQKAYQEIKQALLTAPALGLPDLTKPFELFVDEKQGYAKGVLTQKLGPWRRPVAYLSKKLDPVAAGWPPCLRMVAAIAVLTKDAGKLTMGQPLVILAPHAVEALVKQPPDRWLSNARMTHYQALLLDTDRVQFGPVVALNPATLLPLPEEGLQHNCLDILAEAHGTRPDLTDQPLPDADHTWYTDGSSLLQEGQRKAGAAVTTETEVIWAKALPAGTSAQRAELIALTQALKMAEGKKLNVYTDSRYAFATAHIHGEIYRRRGWLTSEGKEIKNKDEILALLKALFLPKRLSIIHCPGHQKGHSAEARGNRMADQAARKAAITETPDTSTLLAGKRTADGSEFEKRTADGSEFESPKKKAKVE

SEQ ID NO: 2787 - protein, 2096 aa, synthetic construct
MPAAKRVKLDGGDKKYSIGLDIGTNSVGWAVITDEYKVPSKKFKVLGNTDRHSIKKNLIGALLFDSGETAEATRLKRTARRRYTRRKNRICYLQEIFSNEMAKVDDSFFHRLEESFLVEEDKKHERHPIFGNIVDEVAYHEKYPTIYHLRKKLVDSTDKADLRLIYLALAHMIKFRGHFLIEGDLNPDNSDVDKLFIQLVQTYNQLFEENPINASGVDAKAILSARLSKSRRLENLIAQLPGEKKNGLFGNLIALSLGLTPNFKSNFDLAEDAKLQLSKDTYDDDLDNLLAQIGDQYADLFLAAKNLSDAILLSDILRVNTEITKAPLSASMIKRYDEHHQDLTLLKALVRQQLPEKYKEIFFDQSKNGYAGYIDGGASQEEFYKFIKPILEKMDGTEELLVKLNREDLLRKQRTFDNGSIPHQIHLGELHAILRRQEDFYPFLKDNREKIEKILTFRIPYYVGPLARGNSRFAWMTRKSEETITPWNFEEVVDKGASAQSFIERMTNFDKNLPNEKVLPKHSLLYEYFTVYNELTKVKYVTEGMRKPAFLSGEQKKAIVDLLFKTNRKVTVKQLKEDYFKKIECFDSVEISGVEDRFNASLGTYHDLLKIIKDKDFLDNEENEDILEDIVLTLTLFEDREMIEERLKTYAHLFDDKVMKQLKRRRYTGWGRLSRKLINGIRDKQSGKTILDFLKSDGFANRNFMQLIHDDSLTFKEDIQKAQVSGQGDSLHEHIANLAGSPAIKKGILQTVKVVDELVKVMGRHKPENIVIEMARENQTTQKGQKNSRERMKRIEEGIKELGSQILKEHPVENTQLQNEKLYLYYLQNGRDMYVDQELDINRLSDYDVDHIVPQSFLKDDSIDNKVLTRSDKARGKSDNVPSEEVVKKMKNYWRQLLNAKLITQRKFDNLTKAERGGLSELDKAGFIKRQLVETRQITKHVAQILDSRMNTKYDENDKLIREVKVITLKSKLVSDFRKDFQFYKVREINNYHHAHDAYLNAVVGTALIKKYPKLESEFVYGDYKVYDVRKMIAKSEQEIGKATAKYFFYSNIMNFFKTEITLANGEIRKRPLIETNGETGEIVWDKGRDFATVRKVLSMPQVNIVKKTEVQTGGFSKESILPKRNSDKLIARKKDWDPKKYGGFDSPTVAYSVLVVAKVEKGKSKKLKSVKELLGITIMERSSFEKNPIDFLEAKGYKEVKKDLIIKLPKYSLFELENGRKRMLASAGELQKGNELALPSKYVNFLYLASHYEKLKGSPEDNEQKQLFVEQHKHYLDEIIEQISEFSKRVILADANLDKVLSAYNKHRDKPIREQAENIIHLFTLTNLGAPAAFKYFDTTIDRKRYTSTKEVLDATLIHQSITGLYETRIDLSQLGGDGGGGSEAAAKGGGGGTLNIEDEHRLHETSKEPDVSLGSTWLSDFPQAWAETGGMGLAVRQAPLIIPLKATSTPVSIKQYPMSQEARLGIKPHIQRLLDQGILVPCQSPWNTPLLPVKKPGTNDYRPVQDLREVNKRVEDIHPTVPNPYNLLSGLPPSHQWYTVLDLKDAFFCLRLHPTSQPLFAFEWRDPEMGISGQLTWTRLPQGFKNSPTLFNEALHRDLADFRIQHPDLILLQYVDDLLLAATSELDCQQGTRALLQTLGNLGYRASAKKAQICQKQVKYLGYLLKEGQRWLTEARKETVMGQPTPKTPRQLREFLGKAGFCRLFIPGFAEMAAPLYPLTKPGTLFNWGPDQQKAYQEIKQALLTAPALGLPDLTKPFELFVDEKQGYAKGVLTQKLGPWRRPVAYLSKKLDPVAAGWPPCLRMVAAIAVLTKDAGKLTMGQPLVILAPHAVEALVKQPPDRWLSNARMTHYQALLLDTDRVQFGPVVALNPATLLPLPEEGLQHNCLDILAEAHGTRPDLTDQPLPDADHTWYTDGSSLLQEGQRKAGAAVTTETEVIWAKALPAGTSAQRAELIALTQALKMAEGKKLNVYTDSRYAFATAHIHGEIYRRRGWLTSEGKEIKNKDEILALLKALFLPKRLSIIHCPGHQKGHSAEARGNRMADQAARKAAITETPDTSTLLAGKRTADGSEFEKRTADGSEFESPKKKAKVE

SEQ ID NO: 2788 - protein, 2100 aa, synthetic construct
MPAAKRVKLDGGDKKYSIGLDIGTNSVGWAVITDEYKVPSKKFKVLGNTDRHSIKKNLIGALLFDSGETAEATRLKRTARRRYTRRKNRICYLQEIFSNEMAKVDDSFFHRLEESFLVEEDKKHERHPIFGNIVDEVAYHEKYPTIYHLRKKLVDSTDKADLRLIYLALAHMIKFRGHFLIEGDLNPDNSDVDKLFIQLVQTYNQLFEENPINASGVDAKAILSARLSKSRRLENLIAQLPGEKKNGLFGNLIALSLGLTPNFKSNFDLAEDAKLQLSKDTYDDDLDNLLAQIGDQYADLFLAAKNLSDAILLSDILRVNTEITKAPLSASMIKRYDEHHQDLTLLKALVRQQLPEKYKEIFFDQSKNGYAGYIDGGASQEEFYKFIKPILEKMDGTEELLVKLNREDLLRKQRTFDNGSIPHQIHLGELHAILRRQEDFYPFLKDNREKIEKILTFRIPYYVGPLARGNSRFAWMTRKSEETITPWNFEEVVDKGASAQSFIERMTNFDKNLPNEKVLPKHSLLYEYFTVYNELTKVKYVTEGMRKPAFLSGEQKKAIVDLLFKTNRKVTVKQLKEDYFKKIECFDSVEISGVEDRFNASLGTYHDLLKIIKDKDFLDNEENEDILEDIVLTLTLFEDREMIEERLKTYAHLFDDKVMKQLKRRRYTGWGRLSRKLINGIRDKQSGKTILDFLKSDGFANRNFMQLIHDDSLTFKEDIQKAQVSGQGDSLHEHIANLAGSPAIKKGILQTVKVVDELVKVMGRHKPENIVIEMARENQTTQKGQKNSRERMKRIEEGIKELGSQILKEHPVENTQLQNEKLYLYYLQNGRDMYVDQELDINRLSDYDVDHIVPQSFLKDDSIDNKVLTRSDKARGKSDNVPSEEVVKKMKNYWRQLLNAKLITQRKFDNLTKAERGGLSELDKAGFIKRQLVETRQITKHVAQILDSRMNTKYDENDKLIREVKVITLKSKLVSDFRKDFQFYKVREINNYHHAHDAYLNAVVGTALIKKYPKLESEFVYGDYKVYDVRKMIAKSEQEIGKATAKYFFYSNIMNFFKTEITLANGEIRKRPLIETNGETGEIVWDKGRDFATVRKVLSMPQVNIVKKTEVQTGGFSKESILPKRNSDKLIARKKDWDPKKYGGFDSPTVAYSVLVVAKVEKGKSKKLKSVKELLGITIMERSSFEKNPIDFLEAKGYKEVKKDLIIKLPKYSLFELENGRKRMLASAGELQKGNELALPSKYVNFLYLASHYEKLKGSPEDNEQKQLFVEQHKHYLDEIIEQISEFSKRVILADANLDKVLSAYNKHRDKPIREQAENIIHLFTLTNLGAPAAFKYFDTTIDRKRYTSTKEVLDATLIHQSITGLYETRIDLSQLGGDGGEAAAKGGGGSEAAAKGGTLNIEDEHRLHETSKEPDVSLGSTWLSDFPQAWAETGGMGLAVRQAPLIIPLKATSTPVSIKQYPMSQEARLGIKPHIQRLLDQGILVPCQSPWNTPLLPVKKPGTNDYRPVQDLREVNKRVEDIHPTVPNPYNLLSGLPPSHQWYTVLDLKDAFFCLRLHPTSQPLFAFEWRDPEMGISGQLTWTRLPQGFKNSPTLFNEALHRDLADFRIQHPDLILLQYVDDLLLAATSELDCQQGTRALLQTLGNLGYRASAKKAQICQKQVKYLGYLLKEGQRWLTEARKETVMGQPTPKTPRQLREFLGKAGFCRLFIPGFAEMAAPLYPLTKPGTLFNWGPDQQKAYQEIKQALLTAPALGLPDLTKPFELFVDEKQGYAKGVLTQKLGPWRRPVAYLSKKLDPVAAGWPPCLRMVAAIAVLTKDAGKLTMGQPLVILAPHAVEALVKQPPDRWLSNARMTHYQALLLDTDRVQFGPVVALNPATLLPLPEEGLQHNCLDILAEAHGTRPDLTDQPLPDADHTWYTDGSSLLQEGQRKAGAAVTTETEVIWAKALPAGTSAQRAELIALTQALKMAEGKKLNVYTDSRYAFATAHIHGEIYRRRGWLTSEGKEIKNKDEILALLKALFLPKRLSIIHCPGHQKGHSAEARGNRMADQAARKAAITETPDTSTLLAGKRTADGSEFEKRTADGSEFESPKKKAKVE

SEQ ID NO: 2789 - protein, 2096 aa, synthetic construct
MPAAKRVKLDGGDKKYSIGLDIGTNSVGWAVITDEYKVPSKKFKVLGNTDRHSIKKNLIGALLFDSGETAEATRLKRTARRRYTRRKNRICYLQEIFSNEMAKVDDSFFHRLEESFLVEEDKKHERHPIFGNIVDEVAYHEKYPTIYHLRKKLVDSTDKADLRLIYLALAHMIKFRGHFLIEGDLNPDNSDVDKLFIQLVQTYNQLFEENPINASGVDAKAILSARLSKSRRLENLIAQLPGEKKNGLFGNLIALSLGLTPNFKSNFDLAEDAKLQLSKDTYDDDLDNLLAQIGDQYADLFLAAKNLSDAILLSDILRVNTEITKAPLSASMIKRYDEHHQDLTLLKALVRQQLPEKYKEIFFDQSKNGYAGYIDGGASQEEFYKFIKPILEKMDGTEELLVKLNREDLLRKQRTFDNGSIPHQIHLGELHAILRRQEDFYPFLKDNREKIEKILTFRIPYYVGPLARGNSRFAWMTRKSEETITPWNFEEVVDKGASAQSFIERMTNFDKNLPNEKVLPKHSLLYEYFTVYNELTKVKYVTEGMRKPAFLSGEQKKAIVDLLFKTNRKVTVKQLKEDYFKKIECFDSVEISGVEDRFNASLGTYHDLLKIIKDKDFLDNEENEDILEDIVLTLTLFEDREMIEERLKTYAHLFDDKVMKQLKRRRYTGWGRLSRKLINGIRDKQSGKTILDFLKSDGFANRNFMQLIHDDSLTFKEDIQKAQVSGQGDSLHEHIANLAGSPAIKKGILQTVKVVDELVKVMGRHKPENIVIEMARENQTTQKGQKNSRERMKRIEEGIKELGSQILKEHPVENTQLQNEKLYLYYLQNGRDMYVDQELDINRLSDYDVDHIVPQSFLKDDSIDNKVLTRSDKARGKSDNVPSEEVVKKMKNYWRQLLNAKLITQRKFDNLTKAERGGLSELDKAGFIKRQLVETRQITKHVAQILDSRMNTKYDENDKLIREVKVITLKSKLVSDFRKDFQFYKVREINNYHHAHDAYLNAVVGTALIKKYPKLESEFVYGDYKVYDVRKMIAKSEQEIGKATAKYFFYSNIMNFFKTEITLANGEIRKRPLIETNGETGEIVWDKGRDFATVRKVLSMPQVNIVKKTEVQTGGFSKESILPKRNSDKLIARKKDWDPKKYGGFDSPTVAYSVLVVAKVEKGKSKKLKSVKELLGITIMERSSFEKNPIDFLEAKGYKEVKKDLIIKLPKYSLFELENGRKRMLASAGELQKGNELALPSKYVNFLYLASHYEKLKGSPEDNEQKQLFVEQHKHYLDEIIEQISEFSKRVILADANLDKVLSAYNKHRDKPIREQAENIIHLFTLTNLGAPAAFKYFDTTIDRKRYTSTKEVLDATLIHQSITGLYETRIDLSQLGGDGGEAAAKGGGGSSGGTLNIEDEHRLHETSKEPDVSLGSTWLSDFPQAWAETGGMGLAVRQAPLIIPLKATSTPVSIKQYPMSQEARLGIKPHIQRLLDQGILVPCQSPWNTPLLPVKKPGTNDYRPVQDLREVNKRVEDIHPTVPNPYNLLSGLPPSHQWYTVLDLKDAFFCLRLHPTSQPLFAFEWRDPEMGISGQLTWTRLPQGFKNSPTLFNEALHRDLADFRIQHPDLILLQYVDDLLLAATSELDCQQGTRALLQTLGNLGYRASAKKAQICQKQVKYLGYLLKEGQRWLTEARKETVMGQPTPKTPRQLREFLGKAGFCRLFIPGFAEMAAPLYPLTKPGTLFNWGPDQQKAYQEIKQALLTAPALGLPDLTKPFELFVDEKQGYAKGVLTQKLGPWRRPVAYLSKKLDPVAAGWPPCLRMVAAIAVLTKDAGKLTMGQPLVILAPHAVEALVKQPPDRWLSNARMTHYQALLLDTDRVQFGPVVALNPATLLPLPEEGLQHNCLDILAEAHGTRPDLTDQPLPDADHTWYTDGSSLLQEGQRKAGAAVTTETEVIWAKALPAGTSAQRAELIALTQALKMAEGKKLNVYTDSRYAFATAHIHGEIYRRRGWLTSEGKEIKNKDEILALLKALFLPKRLSIIHCPGHQKGHSAEARGNRMADQAARKAAITETPDTSTLLAGKRTADGSEFEKRTADGSEFESPKKKAKVE

SEQ ID NO: 2790 - protein, 2092 aa, synthetic construct
MPAAKRVKLDGGDKKYSIGLDIGTNSVGWAVITDEYKVPSKKFKVLGNTDRHSIKKNLIGALLFDSGETAEATRLKRTARRRYTRRKNRICYLQEIFSNEMAKVDDSFFHRLEESFLVEEDKKHERHPIFGNIVDEVAYHEKYPTIYHLRKKLVDSTDKADLRLIYLALAHMIKFRGHFLIEGDLNPDNSDVDKLFIQLVQTYNQLFEENPINASGVDAKAILSARLSKSRRLENLIAQLPGEKKNGLFGNLIALSLGLTPNFKSNFDLAEDAKLQLSKDTYDDDLDNLLAQIGDQYADLFLAAKNLSDAILLSDILRVNTEITKAPLSASMIKRYDEHHQDLTLLKALVRQQLPEKYKEIFFDQSKNGYAGYIDGGASQEEFYKFIKPILEKMDGTEELLVKLNREDLLRKQRTFDNGSIPHQIHLGELHAILRRQEDFYPFLKDNREKIEKILTFRIPYYVGPLARGNSRFAWMTRKSEETITPWNFEEVVDKGASAQSFIERMTNFDKNLPNEKVLPKHSLLYEYFTVYNELTKVKYVTEGMRKPAFLSGEQKKAIVDLLFKTNRKVTVKQLKEDYFKKIECFDSVEISGVEDRFNASLGTYHDLLKIIKDKDFLDNEENEDILEDIVLTLTLFEDREMIEERLKTYAHLFDDKVMKQLKRRRYTGWGRLSRKLINGIRDKQSGKTILDFLKSDGFANRNFMQLIHDDSLTFKEDIQKAQVSGQGDSLHEHIANLAGSPAIKKGILQTVKVVDELVKVMGRHKPENIVIEMARENQTTQKGQKNSRERMKRIEEGIKELGSQILKEHPVENTQLQNEKLYLYYLQNGRDMYVDQELDINRLSDYDVDHIVPQSFLKDDSIDNKVLTRSDKARGKSDNVPSEEVVKKMKNYWRQLLNAKLITQRKFDNLTKAERGGLSELDKAGFIKRQLVETRQITKHVAQILDSRMNTKYDENDKLIREVKVITLKSKLVSDFRKDFQFYKVREINNYHHAHDAYLNAVVGTALIKKYPKLESEFVYGDYKVYDVRKMIAKSEQEIGKATAKYFFYSNIMNFFKTEITLANGEIRKRPLIETNGETGEIVWDKGRDFATVRKVLSMPQVNIVKKTEVQTGGFSKESILPKRNSDKLIARKKDWDPKKYGGFDSPTVAYSVLVVAKVEKGKSKKLKSVKELLGITIMERSSFEKNPIDFLEAKGYKEVKKDLIIKLPKYSLFELENGRKRMLASAGELQKGNELALPSKYVNFLYLASHYEKLKGSPEDNEQKQLFVEQHKHYLDEIIEQISEFSKRVILADANLDKVLSAYNKHRDKPIREQAENIIHLFTLTNLGAPAAFKYFDTTIDRKRYTSTKEVLDATLIHQSITGLYETRIDLSQLGGDGGGGGGGGGGGTLNIEDEHRLHETSKEPDVSLGSTWLSDFPQAWAETGGMGLAVRQAPLIIPLKATSTPVSIKQYPMSQEARLGIKPHIQRLLDQGILVPCQSPWNTPLLPVKKPGTNDYRPVQDLREVNKRVEDIHPTVPNPYNLLSGLPPSHQWYTVLDLKDAFFCLRLHPTSQPLFAFEWRDPEMGISGQLTWTRLPQGFKNSPTLFNEALHRDLADFRIQHPDLILLQYVDDLLLAATSELDCQQGTRALLQTLGNLGYRASAKKAQICQKQVKYLGYLLKEGQRWLTEARKETVMGQPTPKTPRQLREFLGKAGFCRLFIPGFAEMAAPLYPLTKPGTLFNWGPDQQKAYQEIKQALLTAPALGLPDLTKPFELFVDEKQGYAKGVLTQKLGPWRRPVAYLSKKLDPVAAGWPPCLRMVAAIAVLTKDAGKLTMGQPLVILAPHAVEALVKQPPDRWLSNARMTHYQALLLDTDRVQFGPVVALNPATLLPLPEEGLQHNCLDILAEAHGTRPDLTDQPLPDADHTWYTDGSSLLQEGQRKAGAAVTTETEVIWAKALPAGTSAQRAELIALTQALKMAEGKKLNVYTDSRYAFATAHIHGEIYRRRGWLTSEGKEIKNKDEILALLKALFLPKRLSIIHCPGHQKGHSAEARGNRMADQAARKAAITETPDTSTLLAGKRTADGSEFEKRTADGSEFESPKKKAKVE

SEQ ID NO: 2791 - protein, 2100 aa, synthetic construct
MPAAKRVKLDGGDKKYSIGLDIGTNSVGWAVITDEYKVPSKKFKVLGNTDRHSIKKNLIGALLFDSGETAEATRLKRTARRRYTRRKNRICYLQEIFSNEMAKVDDSFFHRLEESFLVEEDKKHERHPIFGNIVDEVAYHEKYPTIYHLRKKLVDSTDKADLRLIYLALAHMIKFRGHFLIEGDLNPDNSDVDKLFIQLVQTYNQLFEENPINASGVDAKAILSARLSKSRRLENLIAQLPGEKKNGLFGNLIALSLGLTPNFKSNFDLAEDAKLQLSKDTYDDDLDNLLAQIGDQYADLFLAAKNLSDAILLSDILRVNTEITKAPLSASMIKRYDEHHQDLTLLKALVRQQLPEKYKEIFFDQSKNGYAGYIDGGASQEEFYKFIKPILEKMDGTEELLVKLNREDLLRKQRTFDNGSIPHQIHLGELHAILRRQEDFYPFLKDNREKIEKILTFRIPYYVGPLARGNSRFAWMTRKSEETITPWNFEEVVDKGASAQSFIERMTNFDKNLPNEKVLPKHSLLYEYFTVYNELTKVKYVTEGMRKPAFLSGEQKKAIVDLLFKTNRKVTVKQLKEDYFKKIECFDSVEISGVEDRFNASLGTYHDLLKIIKDKDFLDNEENEDILEDIVLTLTLFEDREMIEERLKTYAHLFDDKVMKQLKRRRYTGWGRLSRKLINGIRDKQSGKTILDFLKSDGFANRNFMQLIHDDSLTFKEDIQKAQVSGQGDSLHEHIANLAGSPAIKKGILQTVKVVDELVKVMGRHKPENIVIEMARENQTTQKGQKNSRERMKRIEEGIKELGSQILKEHPVENTQLQNEKLYLYYLQNGRDMYVDQELDINRLSDYDVDHIVPQSFLKDDSIDNKVLTRSDKARGKSDNVPSEEVVKKMKNYWRQLLNAKLITQRKFDNLTKAERGGLSELDKAGFIKRQLVETRQITKHVAQILDSRMNTKYDENDKLIREVKVITLKSKLVSDFRKDFQFYKVREINNYHHAHDAYLNAVVGTALIKKYPKLESEFVYGDYKVYDVRKMIAKSEQEIGKATAKYFFYSNIMNFFKTEITLANGEIRKRPLIETNGETGEIVWDKGRDFATVRKVLSMPQVNIVKKTEVQTGGFSKESILPKRNSDKLIARKKDWDPKKYGGFDSPTVAYSVLVVAKVEKGKSKKLKSVKELLGITIMERSSFEKNPIDFLEAKGYKEVKKDLIIKLPKYSLFELENGRKRMLASAGELQKGNELALPSKYVNFLYLASHYEKLKGSPEDNEQKQLFVEQHKHYLDEIIEQISEFSKRVILADANLDKVLSAYNKHRDKPIREQAENIIHLFTLTNLGAPAAFKYFDTTIDRKRYTSTKEVLDATLIHQSITGLYETRIDLSQLGGDGGEAAAKEAAAKEAAAKGGTLNIEDEHRLHETSKEPDVSLGSTWLSDFPQAWAETGGMGLAVRQAPLIIPLKATSTPVSIKQYPMSQEARLGIKPHIQRLLDQGILVPCQSPWNTPLLPVKKPGTNDYRPVQDLREVNKRVEDIHPTVPNPYNLLSGLPPSHQWYTVLDLKDAFFCLRLHPTSQPLFAFEWRDPEMGISGQLTWTRLPQGFKNSPTLFNEALHRDLADFRIQHPDLILLQYVDDLLLAATSELDCQQGTRALLQTLGNLGYRASAKKAQICQKQVKYLGYLLKEGQRWLTEARKETVMGQPTPKTPRQLREFLGKAGFCRLFIPGFAEMAAPLYPLTKPGTLFNWGPDQQKAYQEIKQALLTAPALGLPDLTKPFELFVDEKQGYAKGVLTQKLGPWRRPVAYLSKKLDPVAAGWPPCLRMVAAIAVLTKDAGKLTMGQPLVILAPHAVEALVKQPPDRWLSNARMTHYQALLLDTDRVQFGPVVALNPATLLPLPEEGLQHNCLDILAEAHGTRPDLTDQPLPDADHTWYTDGSSLLQEGQRKAGAAVTTETEVIWAKALPAGTSAQRAELIALTQALKMAEGKKLNVYTDSRYAFATAHIHGEIYRRRGWLTSEGKEIKNKDEILALLKALFLPKRLSIIHCPGHQKGHSAEARGNRMADQAARKAAITETPDTSTLLAGKRTADGSEFEKRTADGSEFESPKKKAKVE

SEQ ID NO: 2792 - protein, 2096 aa, synthetic construct
MPAAKRVKLDGGDKKYSIGLDIGTNSVGWAVITDEYKVPSKKFKVLGNTDRHSIKKNLIGALLFDSGETAEATRLKRTARRRYTRRKNRICYLQEIFSNEMAKVDDSFFHRLEESFLVEEDKKHERHPIFGNIVDEVAYHEKYPTIYHLRKKLVDSTDKADLRLIYLALAHMIKFRGHFLIEGDLNPDNSDVDKLFIQLVQTYNQLFEENPINASGVDAKAILSARLSKSRRLENLIAQLPGEKKNGLFGNLIALSLGLTPNFKSNFDLAEDAKLQLSKDTYDDDLDNLLAQIGDQYADLFLAAKNLSDAILLSDILRVNTEITKAPLSASMIKRYDEHHQDLTLLKALVRQQLPEKYKEIFFDQSKNGYAGYIDGGASQEEFYKFIKPILEKMDGTEELLVKLNREDLLRKQRTFDNGSIPHQIHLGELHAILRRQEDFYPFLKDNREKIEKILTFRIPYYVGPLARGNSRFAWMTRKSEETITPWNFEEVVDKGASAQSFIERMTNFDKNLPNEKVLPKHSLLYEYFTVYNELTKVKYVTEGMRKPAFLSGEQKKAIVDLLFKTNRKVTVKQLKEDYFKKIECFDSVEISGVEDRFNASLGTYHDLLKIIKDKDFLDNEENEDILEDIVLTLTLFEDREMIEERLKTYAHLFDDKVMKQLKRRRYTGWGRLSRKLINGIRDKQSGKTILDFLKSDGFANRNFMQLIHDDSLTFKEDIQKAQVSGQGDSLHEHIANLAGSPAIKKGILQTVKVVDELVKVMGRHKPENIVIEMARENQTTQKGQKNSRERMKRIEEGIKELGSQILKEHPVENTQLQNEKLYLYYLQNGRDMYVDQELDINRLSDYDVDHIVPQSFLKDDSIDNKVLTRSDKARGKSDNVPSEEVVKKMKNYWRQLLNAKLITQRKFDNLTKAERGGLSELDKAGFIKRQLVETRQITKHVAQILDSRMNTKYDENDKLIREVKVITLKSKLVSDFRKDFQFYKVREINNYHHAHDAYLNAVVGTALIKKYPKLESEFVYGDYKVYDVRKMIAKSEQEIGKATAKYFFYSNIMNFFKTEITLANGEIRKRPLIETNGETGEIVWDKGRDFATVRKVLSMPQVNIVKKTEVQTGGFSKESILPKRNSDKLIARKKDWDPKKYGGFDSPTVAYSVLVVAKVEKGKSKKLKSVKELLGITIMERSSFEKNPIDFLEAKGYKEVKKDLIIKLPKYSLFELENGRKRMLASAGELQKGNELALPSKYVNFLYLASHYEKLKGSPEDNEQKQLFVEQHKHYLDEIIEQISEFSKRVILADANLDKVLSAYNKHRDKPIREQAENIIHLFTLTNLGAPAAFKYFDTTIDRKRYTSTKEVLDATLIHQSITGLYETRIDLSQLGGDGGEAAAKGSSPAPGGTLNIEDEHRLHETSKEPDVSLGSTWLSDFPQAWAETGGMGLAVRQAPLIIPLKATSTPVSIKQYPMSQEARLGIKPHIQRLLDQGILVPCQSPWNTPLLPVKKPGTNDYRPVQDLREVNKRVEDIHPTVPNPYNLLSGLPPSHQWYTVLDLKDAFFCLRLHPTSQPLFAFEWRDPEMGISGQLTWTRLPQGFKNSPTLFNEALHRDLADFRIQHPDLILLQYVDDLLLAATSELDCQQGTRALLQTLGNLGYRASAKKAQICQKQVKYLGYLLKEGQRWLTEARKETVMGQPTPKTPRQLREFLGKAGFCRLFIPGFAEMAAPLYPLTKPGTLFNWGPDQQKAYQEIKQALLTAPALGLPDLTKPFELFVDEKQGYAKGVLTQKLGPWRRPVAYLSKKLDPVAAGWPPCLRMVAAIAVLTKDAGKLTMGQPLVILAPHAVEALVKQPPDRWLSNARMTHYQALLLDTDRVQFGPVVALNPATLLPLPEEGLQHNCLDILAEAHGTRPDLTDQPLPDADHTWYTDGSSLLQEGQRKAGAAVTTETEVIWAKALPAGTSAQRAELIALTQALKMAEGKKLNVYTDSRYAFATAHIHGEIYRRRGWLTSEGKEIKNKDEILALLKALFLPKRLSIIHCPGHQKGHSAEARGNRMADQAARKAAITETPDTSTLLAGKRTADGSEFEKRTADGSEFESPKKKAKVE

SEQ ID NO: 2793 - protein, 2094 aa, synthetic construct
MPAAKRVKLDGGDKKYSIGLDIGTNSVGWAVITDEYKVPSKKFKVLGNTDRHSIKKNLIGALLFDSGETAEATRLKRTARRRYTRRKNRICYLQEIFSNEMAKVDDSFFHRLEESFLVEEDKKHERHPIFGNIVDEVAYHEKYPTIYHLRKKLVDSTDKADLRLIYLALAHMIKFRGHFLIEGDLNPDNSDVDKLFIQLVQTYNQLFEENPINASGVDAKAILSARLSKSRRLENLIAQLPGEKKNGLFGNLIALSLGLTPNFKSNFDLAEDAKLQLSKDTYDDDLDNLLAQIGDQYADLFLAAKNLSDAILLSDILRVNTEITKAPLSASMIKRYDEHHQDLTLLKALVRQQLPEKYKEIFFDQSKNGYAGYIDGGASQEEFYKFIKPILEKMDGTEELLVKLNREDLLRKQRTFDNGSIPHQIHLGELHAILRRQEDFYPFLKDNREKIEKILTFRIPYYVGPLARGNSRFAWMTRKSEETITPWNFEEVVDKGASAQSFIERMTNFDKNLPNEKVLPKHSLLYEYFTVYNELTKVKYVTEGMRKPAFLSGEQKKAIVDLLFKTNRKVTVKQLKEDYFKKIECFDSVEISGVEDRFNASLGTYHDLLKIIKDKDFLDNEENEDILEDIVLTLTLFEDREMIEERLKTYAHLFDDKVMKQLKRRRYTGWGRLSRKLINGIRDKQSGKTILDFLKSDGFANRNFMQLIHDDSLTFKEDIQKAQVSGQGDSLHEHIANLAGSPAIKKGILQTVKVVDELVKVMGRHKPENIVIEMARENQTTQKGQKNSRERMKRIEEGIKELGSQILKEHPVENTQLQNEKLYLYYLQNGRDMYVDQELDINRLSDYDVDHIVPQSFLKDDSIDNKVLTRSDKARGKSDNVPSEEVVKKMKNYWRQLLNAKLITQRKFDNLTKAERGGLSELDKAGFIKRQLVETRQITKHVAQILDSRMNTKYDENDKLIREVKVITLKSKLVSDFRKDFQFYKVREINNYHHAHDAYLNAVVGTALIKKYPKLESEFVYGDYKVYDVRKMIAKSEQEIGKATAKYFFYSNIMNFFKTEITLANGEIRKRPLIETNGETGEIVWDKGRDFATVRKVLSMPQVNIVKKTEVQTGGFSKESILPKRNSDKLIARKKDWDPKKYGGFDSPTVAYSVLVVAKVEKGKSKKLKSVKELLGITIMERSSFEKNPIDFLEAKGYKEVKKDLIIKLPKYSLFELENGRKRMLASAGELQKGNELALPSKYVNFLYLASHYEKLKGSPEDNEQKQLFVEQHKHYLDEIIEQISEFSKRVILADANLDKVLSAYNKHRDKPIREQAENIIHLFTLTNLGAPAAFKYFDTTIDRKRYTSTKEVLDATLIHQSITGLYETRIDLSQLGGDGGPAPGGGGSSGGTLNIEDEHRLHETSKEPDVSLGSTWLSDFPQAWAETGGMGLAVRQAPLIIPLKATSTPVSIKQYPMSQEARLGIKPHIQRLLDQGILVPCQSPWNTPLLPVKKPGTNDYRPVQDLREVNKRVEDIHPTVPNPYNLLSGLPPSHQWYTVLDLKDAFFCLRLHPTSQPLFAFEWRDPEMGISGQLTWTRLPQGFKNSPTLFNEALHRDLADFRIQHPDLILLQYVDDLLLAATSELDCQQGTRALLQTLGNLGYRASAKKAQICQKQVKYLGYLLKEGQRWLTEARKETVMGQPTPKTPRQLREFLGKAGFCRLFIPGFAEMAAPLYPLTKPGTLFNWGPDQQKAYQEIKQALLTAPALGLPDLTKPFELFVDEKQGYAKGVLTQKLGPWRRPVAYLSKKLDPVAAGWPPCLRMVAAIAVLTKDAGKLTMGQPLVILAPHAVEALVKQPPDRWLSNARMTHYQALLLDTDRVQFGPVVALNPATLLPLPEEGLQHNCLDILAEAHGTRPDLTDQPLPDADHTWYTDGSSLLQEGQRKAGAAVTTETEVIWAKALPAGTSAQRAELIALTQALKMAEGKKLNVYTDSRYAFATAHIHGEIYRRRGWLTSEGKEIKNKDEILALLKALFLPKRLSIIHCPGHQKGHSAEARGNRMADQAARKAAITETPDTSTLLAGKRTADGSEFEKRTADGSEFESPKKKAKVE

SEQ ID NO: 2794 - protein, 2096 aa, synthetic construct
MPAAKRVKLDGGDKKYSIGLDIGTNSVGWAVITDEYKVPSKKFKVLGNTDRHSIKKNLIGALLFDSGETAEATRLKRTARRRYTRRKNRICYLQEIFSNEMAKVDDSFFHRLEESFLVEEDKKHERHPIFGNIVDEVAYHEKYPTIYHLRKKLVDSTDKADLRLIYLALAHMIKFRGHFLIEGDLNPDNSDVDKLFIQLVQTYNQLFEENPINASGVDAKAILSARLSKSRRLENLIAQLPGEKKNGLFGNLIALSLGLTPNFKSNFDLAEDAKLQLSKDTYDDDLDNLLAQIGDQYADLFLAAKNLSDAILLSDILRVNTEITKAPLSASMIKRYDEHHQDLTLLKALVRQQLPEKYKEIFFDQSKNGYAGYIDGGASQEEFYKFIKPILEKMDGTEELLVKLNREDLLRKQRTFDNGSIPHQIHLGELHAILRRQEDFYPFLKDNREKIEKILTFRIPYYVGPLARGNSRFAWMTRKSEETITPWNFEEVVDKGASAQSFIERMTNFDKNLPNEKVLPKHSLLYEYFTVYNELTKVKYVTEGMRKPAFLSGEQKKAIVDLLFKTNRKVTVKQLKEDYFKKIECFDSVEISGVEDRFNASLGTYHDLLKIIKDKDFLDNEENEDILEDIVLTLTLFEDREMIEERLKTYAHLFDDKVMKQLKRRRYTGWGRLSRKLINGIRDKQSGKTILDFLKSDGFANRNFMQLIHDDSLTFKEDIQKAQVSGQGDSLHEHIANLAGSPAIKKGILQTVKVVDELVKVMGRHKPENIVIEMARENQTTQKGQKNSRERMKRIEEGIKELGSQILKEHPVENTQLQNEKLYLYYLQNGRDMYVDQELDINRLSDYDVDHIVPQSFLKDDSIDNKVLTRSDKARGKSDNVPSEEVVKKMKNYWRQLLNAKLITQRKFDNLTKAERGGLSELDKAGFIKRQLVETRQITKHVAQILDSRMNTKYDENDKLIREVKVITLKSKLVSDFRKDFQFYKVREINNYHHAHDAYLNAVVGTALIKKYPKLESEFVYGDYKVYDVRKMIAKSEQEIGKATAKYFFYSNIMNFFKTEITLANGEIRKRPLIETNGETGEIVWDKGRDFATVRKVLSMPQVNIVKKTEVQTGGFSKESILPKRNSDKLIARKKDWDPKKYGGFDSPTVAYSVLVVAKVEKGKSKKLKSVKELLGITIMERSSFEKNPIDFLEAKGYKEVKKDLIIKLPKYSLFELENGRKRMLASAGELQKGNELALPSKYVNFLYLASHYEKLKGSPEDNEQKQLFVEQHKHYLDEIIEQISEFSKRVILADANLDKVLSAYNKHRDKPIREQAENIIHLFTLTNLGAPAAFKYFDTTIDRKRYTSTKEVLDATLIHQSITGLYETRIDLSQLGGDGGEAAAKGGSGGGGGTLNIEDEHRLHETSKEPDVSLGSTWLSDFPQAWAETGGMGLAVRQAPLIIPLKATSTPVSIKQYPMSQEARLGIKPHIQRLLDQGILVPCQSPWNTPLLPVKKPGTNDYRPVQDLREVNKRVEDIHPTVPNPYNLLSGLPPSHQWYTVLDLKDAFFCLRLHPTSQPLFAFEWRDPEMGISGQLTWTRLPQGFKNSPTLFNEALHRDLADFRIQHPDLILLQYVDDLLLAATSELDCQQGTRALLQTLGNLGYRASAKKAQICQKQVKYLGYLLKEGQRWLTEARKETVMGQPTPKTPRQLREFLGKAGFCRLFIPGFAEMAAPLYPLTKPGTLFNWGPDQQKAYQEIKQALLTAPALGLPDLTKPFELFVDEKQGYAKGVLTQKLGPWRRPVAYLSKKLDPVAAGWPPCLRMVAAIAVLTKDAGKLTMGQPLVILAPHAVEALVKQPPDRWLSNARMTHYQALLLDTDRVQFGPVVALNPATLLPLPEEGLQHNCLDILAEAHGTRPDLTDQPLPDADHTWYTDGSSLLQEGQRKAGAAVTTETEVIWAKALPAGTSAQRAELIALTQALKMAEGKKLNVYTDSRYAFATAHIHGEIYRRRGWLTSEGKEIKNKDEILALLKALFLPKRLSIIHCPGHQKGHSAEARGNRMADQAARKAAITETPDTSTLLAGKRTADGSEFEKRTADGSEFESPKKKAKVE

SEQ ID NO: 2795 - protein, 2097 aa, synthetic construct
MPAAKRVKLDGGDKKYSIGLDIGTNSVGWAVITDEYKVPSKKFKVLGNTDRHSIKKNLIGALLFDSGETAEATRLKRTARRRYTRRKNRICYLQEIFSNEMAKVDDSFFHRLEESFLVEEDKKHERHPIFGNIVDEVAYHEKYPTIYHLRKKLVDSTDKADLRLIYLALAHMIKFRGHFLIEGDLNPDNSDVDKLFIQLVQTYNQLFEENPINASGVDAKAILSARLSKSRRLENLIAQLPGEKKNGLFGNLIALSLGLTPNFKSNFDLAEDAKLQLSKDTYDDDLDNLLAQIGDQYADLFLAAKNLSDAILLSDILRVNTEITKAPLSASMIKRYDEHHQDLTLLKALVRQQLPEKYKEIFFDQSKNGYAGYIDGGASQEEFYKFIKPILEKMDGTEELLVKLNREDLLRKQRTFDNGSIPHQIHLGELHAILRRQEDFYPFLKDNREKIEKILTFRIPYYVGPLARGNSRFAWMTRKSEETITPWNFEEVVDKGASAQSFIERMTNFDKNLPNEKVLPKHSLLYEYFTVYNELTKVKYVTEGMRKPAFLSGEQKKAIVDLLFKTNRKVTVKQLKEDYFKKIECFDSVEISGVEDRFNASLGTYHDLLKIIKDKDFLDNEENEDILEDIVLTLTLFEDREMIEERLKTYAHLFDDKVMKQLKRRRYTGWGRLSRKLINGIRDKQSGKTILDFLKSDGFANRNFMQLIHDDSLTFKEDIQKAQVSGQGDSLHEHIANLAGSPAIKKGILQTVKVVDELVKVMGRHKPENIVIEMARENQTTQKGQKNSRERMKRIEEGIKELGSQILKEHPVENTQLQNEKLYLYYLQNGRDMYVDQELDINRLSDYDVDHIVPQSFLKDDSIDNKVLTRSDKARGKSDNVPSEEVVKKMKNYWRQLLNAKLITQRKFDNLTKAERGGLSELDKAGFIKRQLVETRQITKHVAQILDSRMNTKYDENDKLIREVKVITLKSKLVSDFRKDFQFYKVREINNYHHAHDAYLNAVVGTALIKKYPKLESEFVYGDYKVYDVRKMIAKSEQEIGKATAKYFFYSNIMNFFKTEITLANGEIRKRPLIETNGETGEIVWDKGRDFATVRKVLSMPQVNIVKKTEVQTGGFSKESILPKRNSDKLIARKKDWDPKKYGGFDSPTVAYSVLVVAKVEKGKSKKLKSVKELLGITIMERSSFEKNPIDFLEAKGYKEVKKDLIIKLPKYSLFELENGRKRMLASAGELQKGNELALPSKYVNFLYLASHYEKLKGSPEDNEQKQLFVEQHKHYLDEIIEQISEFSKRVILADANLDKVLSAYNKHRDKPIREQAENIIHLFTLTNLGAPAAFKYFDTTIDRKRYTSTKEVLDATLIHQSITGLYETRIDLSQLGGDGGGGSGGSGGSGGSGGTLNIEDEHRLHETSKEPDVSLGSTWLSDFPQAWAETGGMGLAVRQAPLIIPLKATSTPVSIKQYPMSQEARLGIKPHIQRLLDQGILVPCQSPWNTPLLPVKKPGTNDYRPVQDLREVNKRVEDIHPTVPNPYNLLSGLPPSHQWYTVLDLKDAFFCLRLHPTSQPLFAFEWRDPEMGISGQLTWTRLPQGFKNSPTLFNEALHRDLADFRIQHPDLILLQYVDDLLLAATSELDCQQGTRALLQTLGNLGYRASAKKAQICQKQVKYLGYLLKEGQRWLTEARKETVMGQPTPKTPRQLREFLGKAGFCRLFIPGFAEMAAPLYPLTKPGTLFNWGPDQQKAYQEIKQALLTAPALGLPDLTKPFELFVDEKQGYAKGVLTQKLGPWRRPVAYLSKKLDPVAAGWPPCLRMVAAIAVLTKDAGKLTMGQPLVILAPHAVEALVKQPPDRWLSNARMTHYQALLLDTDRVQFGPVVALNPATLLPLPEEGLQHNCLDILAEAHGTRPDLTDQPLPDADHTWYTDGSSLLQEGQRKAGAAVTTETEVIWAKALPAGTSAQRAELIALTQALKMAEGKKLNVYTDSRYAFATAHIHGEIYRRRGWLTSEGKEIKNKDEILALLKALFLPKRLSIIHCPGHQKGHSAEARGNRMADQAARKAAITETPDTSTLLAGKRTADGSEFEKRTADGSEFESPKKKAKVE

SEQ ID NO: 2796 - protein, 2093 aa, synthetic construct
MPAAKRVKLDGGDKKYSIGLDIGTNSVGWAVITDEYKVPSKKFKVLGNTDRHSIKKNLIGALLFDSGETAEATRLKRTARRRYTRRKNRICYLQEIFSNEMAKVDDSFFHRLEESFLVEEDKKHERHPIFGNIVDEVAYHEKYPTIYHLRKKLVDSTDKADLRLIYLALAHMIKFRGHFLIEGDLNPDNSDVDKLFIQLVQTYNQLFEENPINASGVDAKAILSARLSKSRRLENLIAQLPGEKKNGLFGNLIALSLGLTPNFKSNFDLAEDAKLQLSKDTYDDDLDNLLAQIGDQYADLFLAAKNLSDAILLSDILRVNTEITKAPLSASMIKRYDEHHQDLTLLKALVRQQLPEKYKEIFFDQSKNGYAGYIDGGASQEEFYKFIKPILEKMDGTEELLVKLNREDLLRKQRTFDNGSIPHQIHLGELHAILRRQEDFYPFLKDNREKIEKILTFRIPYYVGPLARGNSRFAWMTRKSEETITPWNFEEVVDKGASAQSFIERMTNFDKNLPNEKVLPKHSLLYEYFTVYNELTKVKYVTEGMRKPAFLSGEQKKAIVDLLFKTNRKVTVKQLKEDYFKKIECFDSVEISGVEDRFNASLGTYHDLLKIIKDKDFLDNEENEDILEDIVLTLTLFEDREMIEERLKTYAHLFDDKVMKQLKRRRYTGWGRLSRKLINGIRDKQSGKTILDFLKSDGFANRNFMQLIHDDSLTFKEDIQKAQVSGQGDSLHEHIANLAGSPAIKKGILQTVKVVDELVKVMGRHKPENIVIEMARENQTTQKGQKNSRERMKRIEEGIKELGSQILKEHPVENTQLQNEKLYLYYLQNGRDMYVDQELDINRLSDYDVDHIVPQSFLKDDSIDNKVLTRSDKARGKSDNVPSEEVVKKMKNYWRQLLNAKLITQRKFDNLTKAERGGLSELDKAGFIKRQLVETRQITKHVAQILDSRMNTKYDENDKLIREVKVITLKSKLVSDFRKDFQFYKVREINNYHHAHDAYLNAVVGTALIKKYPKLESEFVYGDYKVYDVRKMIAKSEQEIGKATAKYFFYSNIMNFFKTEITLANGEIRKRPLIETNGETGEIVWDKGRDFATVRKVLSMPQVNIVKKTEVQTGGFSKESILPKRNSDKLIARKKDWDPKKYGGFDSPTVAYSVLVVAKVEKGKSKKLKSVKELLGITIMERSSFEKNPIDFLEAKGYKEVKKDLIIKLPKYSLFELENGRKRMLASAGELQKGNELALPSKYVNFLYLASHYEKLKGSPEDNEQKQLFVEQHKHYLDEIIEQISEFSKRVILADANLDKVLSAYNKHRDKPIREQAENIIHLFTLTNLGAPAAFKYFDTTIDRKRYTSTKEVLDATLIHQSITGLYETRIDLSQLGGDGGEAAAKGGGGGTLNIEDEHRLHETSKEPDVSLGSTWLSDFPQAWAETGGMGLAVRQAPLIIPLKATSTPVSIKQYPMSQEARLGIKPHIQRLLDQGILVPCQSPWNTPLLPVKKPGTNDYRPVQDLREVNKRVEDIHPTVPNPYNLLSGLPPSHQWYTVLDLKDAFFCLRLHPTSQPLFAFEWRDPEMGISGQLTWTRLPQGFKNSPTLFNEALHRDLADFRIQHPDLILLQYVDDLLLAATSELDCQQGTRALLQTLGNLGYRASAKKAQICQKQVKYLGYLLKEGQRWLTEARKETVMGQPTPKTPRQLREFLGKAGFCRLFIPGFAEMAAPLYPLTKPGTLFNWGPDQQKAYQEIKQALLTAPALGLPDLTKPFELFVDEKQGYAKGVLTQKLGPWRRPVAYLSKKLDPVAAGWPPCLRMVAAIAVLTKDAGKLTMGQPLVILAPHAVEALVKQPPDRWLSNARMTHYQALLLDTDRVQFGPVVALNPATLLPLPEEGLQHNCLDILAEAHGTRPDLTDQPLPDADHTWYTDGSSLLQEGQRKAGAAVTTETEVIWAKALPAGTSAQRAELIALTQALKMAEGKKLNVYTDSRYAFATAHIHGEIYRRRGWLTSEGKEIKNKDEILALLKALFLPKRLSIIHCPGHQKGHSAEARGNRMADQAARKAAITETPDTSTLLAGKRTADGSEFEKRTADGSEFESPKKKAKVE

SEQ ID NO: 2797 - protein, 2098 aa, synthetic construct
MPAAKRVKLDGGDKKYSIGLDIGTNSVGWAVITDEYKVPSKKFKVLGNTDRHSIKKNLIGALLFDSGETAEATRLKRTARRRYTRRKNRICYLQEIFSNEMAKVDDSFFHRLEESFLVEEDKKHERHPIFGNIVDEVAYHEKYPTIYHLRKKLVDSTDKADLRLIYLALAHMIKFRGHFLIEGDLNPDNSDVDKLFIQLVQTYNQLFEENPINASGVDAKAILSARLSKSRRLENLIAQLPGEKKNGLFGNLIALSLGLTPNFKSNFDLAEDAKLQLSKDTYDDDLDNLLAQIGDQYADLFLAAKNLSDAILLSDILRVNTEITKAPLSASMIKRYDEHHQDLTLLKALVRQQLPEKYKEIFFDQSKNGYAGYIDGGASQEEFYKFIKPILEKMDGTEELLVKLNREDLLRKQRTFDNGSIPHQIHLGELHAILRRQEDFYPFLKDNREKIEKILTFRIPYYVGPLARGNSRFAWMTRKSEETITPWNFEEVVDKGASAQSFIERMTNFDKNLPNEKVLPKHSLLYEYFTVYNELTKVKYVTEGMRKPAFLSGEQKKAIVDLLFKTNRKVTVKQLKEDYFKKIECFDSVEISGVEDRFNASLGTYHDLLKIIKDKDFLDNEENEDILEDIVLTLTLFEDREMIEERLKTYAHLFDDKVMKQLKRRRYTGWGRLSRKLINGIRDKQSGKTILDFLKSDGFANRNFMQLIHDDSLTFKEDIQKAQVSGQGDSLHEHIANLAGSPAIKKGILQTVKVVDELVKVMGRHKPENIVIEMARENQTTQKGQKNSRERMKRIEEGIKELGSQILKEHPVENTQLQNEKLYLYYLQNGRDMYVDQELDINRLSDYDVDHIVPQSFLKDDSIDNKVLTRSDKARGKSDNVPSEEVVKKMKNYWRQLLNAKLITQRKFDNLTKAERGGLSELDKAGFIKRQLVETRQITKHVAQILDSRMNTKYDENDKLIREVKVITLKSKLVSDFRKDFQFYKVREINNYHHAHDAYLNAVVGTALIKKYPKLESEFVYGDYKVYDVRKMIAKSEQEIGKATAKYFFYSNIMNFFKTEITLANGEIRKRPLIETNGETGEIVWDKGRDFATVRKVLSMPQVNIVKKTEVQTGGFSKESILPKRNSDKLIARKKDWDPKKYGGFDSPTVAYSVLVVAKVEKGKSKKLKSVKELLGITIMERSSFEKNPIDFLEAKGYKEVKKDLIIKLPKYSLFELENGRKRMLASAGELQKGNELALPSKYVNFLYLASHYEKLKGSPEDNEQKQLFVEQHKHYLDEIIEQISEFSKRVILADANLDKVLSAYNKHRDKPIREQAENIIHLFTLTNLGAPAAFKYFDTTIDRKRYTSTKEVLDATLIHQSITGLYETRIDLSQLGGDGGPAPAPAPAPAPAPGGTLNIEDEHRLHETSKEPDVSLGSTWLSDFPQAWAETGGMGLAVRQAPLIIPLKATSTPVSIKQYPMSQEARLGIKPHIQRLLDQGILVPCQSPWNTPLLPVKKPGTNDYRPVQDLREVNKRVEDIHPTVPNPYNLLSGLPPSHQWYTVLDLKDAFFCLRLHPTSQPLFAFEWRDPEMGISGQLTWTRLPQGFKNSPTLFNEALHRDLADFRIQHPDLILLQYVDDLLLAATSELDCQQGTRALLQTLGNLGYRASAKKAQICQKQVKYLGYLLKEGQRWLTEARKETVMGQPTPKTPRQLREFLGKAGFCRLFIPGFAEMAAPLYPLTKPGTLFNWGPDQQKAYQEIKQALLTAPALGLPDLTKPFELFVDEKQGYAKGVLTQKLGPWRRPVAYLSKKLDPVAAGWPPCLRMVAAIAVLTKDAGKLTMGQPLVILAPHAVEALVKQPPDRWLSNARMTHYQALLLDTDRVQFGPVVALNPATLLPLPEEGLQHNCLDILAEAHGTRPDLTDQPLPDADHTWYTDGSSLLQEGQRKAGAAVTTETEVIWAKALPAGTSAQRAELIALTQALKMAEGKKLNVYTDSRYAFATAHIHGEIYRRRGWLTSEGKEIKNKDEILALLKALFLPKRLSIIHCPGHQKGHSAEARGNRMADQAARKAAITETPDTSTLLAGKRTADGSEFEKRTADGSEFESPKKKAKVE

SEQ ID NO: 2798 - protein, 2096 aa, synthetic construct
MPAAKRVKLDGGDKKYSIGLDIGTNSVGWAVITDEYKVPSKKFKVLGNTDRHSIKKNLIGALLFDSGETAEATRLKRTARRRYTRRKNRICYLQEIFSNEMAKVDDSFFHRLEESFLVEEDKKHERHPIFGNIVDEVAYHEKYPTIYHLRKKLVDSTDKADLRLIYLALAHMIKFRGHFLIEGDLNPDNSDVDKLFIQLVQTYNQLFEENPINASGVDAKAILSARLSKSRRLENLIAQLPGEKKNGLFGNLIALSLGLTPNFKSNFDLAEDAKLQLSKDTYDDDLDNLLAQIGDQYADLFLAAKNLSDAILLSDILRVNTEITKAPLSASMIKRYDEHHQDLTLLKALVRQQLPEKYKEIFFDQSKNGYAGYIDGGASQEEFYKFIKPILEKMDGTEELLVKLNREDLLRKQRTFDNGSIPHQIHLGELHAILRRQEDFYPFLKDNREKIEKILTFRIPYYVGPLARGNSRFAWMTRKSEETITPWNFEEVVDKGASAQSFIERMTNFDKNLPNEKVLPKHSLLYEYFTVYNELTKVKYVTEGMRKPAFLSGEQKKAIVDLLFKTNRKVTVKQLKEDYFKKIECFDSVEISGVEDRFNASLGTYHDLLKIIKDKDFLDNEENEDILEDIVLTLTLFEDREMIEERLKTYAHLFDDKVMKQLKRRRYTGWGRLSRKLINGIRDKQSGKTILDFLKSDGFANRNFMQLIHDDSLTFKEDIQKAQVSGQGDSLHEHIANLAGSPAIKKGILQTVKVVDELVKVMGRHKPENIVIEMARENQTTQKGQKNSRERMKRIEEGIKELGSQILKEHPVENTQLQNEKLYLYYLQNGRDMYVDQELDINRLSDYDVDHIVPQSFLKDDSIDNKVLTRSDKARGKSDNVPSEEVVKKMKNYWRQLLNAKLITQRKFDNLTKAERGGLSELDKAGFIKRQLVETRQITKHVAQILDSRMNTKYDENDKLIREVKVITLKSKLVSDFRKDFQFYKVREINNYHHAHDAYLNAVVGTALIKKYPKLESEFVYGDYKVYDVRKMIAKSEQEIGKATAKYFFYSNIMNFFKTEITLANGEIRKRPLIETNGETGEIVWDKGRDFATVRKVLSMPQVNIVKKTEVQTGGFSKESILPKRNSDKLIARKKDWDPKKYGGFDSPTVAYSVLVVAKVEKGKSKKLKSVKELLGITIMERSSFEKNPIDFLEAKGYKEVKKDLIIKLPKYSLFELENGRKRMLASAGELQKGNELALPSKYVNFLYLASHYEKLKGSPEDNEQKQLFVEQHKHYLDEIIEQISEFSKRVILADANLDKVLSAYNKHRDKPIREQAENIIHLFTLTNLGAPAAFKYFDTTIDRKRYTSTKEVLDATLIHQSITGLYETRIDLSQLGGDGGPAPGSSEAAAKGGTLNIEDEHRLHETSKEPDVSLGSTWLSDFPQAWAETGGMGLAVRQAPLIIPLKATSTPVSIKQYPMSQEARLGIKPHIQRLLDQGILVPCQSPWNTPLLPVKKPGTNDYRPVQDLREVNKRVEDIHPTVPNPYNLLSGLPPSHQWYTVLDLKDAFFCLRLHPTSQPLFAFEWRDPEMGISGQLTWTRLPQGFKNSPTLFNEALHRDLADFRIQHPDLILLQYVDDLLLAATSELDCQQGTRALLQTLGNLGYRASAKKAQICQKQVKYLGYLLKEGQRWLTEARKETVMGQPTPKTPRQLREFLGKAGFCRLFIPGFAEMAAPLYPLTKPGTLFNWGPDQQKAYQEIKQALLTAPALGLPDLTKPFELFVDEKQGYAKGVLTQKLGPWRRPVAYLSKKLDPVAAGWPPCLRMVAAIAVLTKDAGKLTMGQPLVILAPHAVEALVKQPPDRWLSNARMTHYQALLLDTDRVQFGPVVALNPATLLPLPEEGLQHNCLDILAEAHGTRPDLTDQPLPDADHTWYTDGSSLLQEGQRKAGAAVTTETEVIWAKALPAGTSAQRAELIALTQALKMAEGKKLNVYTDSRYAFATAHIHGEIYRRRGWLTSEGKEIKNKDEILALLKALFLPKRLSIIHCPGHQKGHSAEARGNRMADQAARKAAITETPDTSTLLAGKRTADGSEFEKRTADGSEFESPKKKAKVE

SEQ ID NO: 2799 - protein, 2096 aa, synthetic construct
MPAAKRVKLDGGDKKYSIGLDIGTNSVGWAVITDEYKVPSKKFKVLGNTDRHSIKKNLIGALLFDSGETAEATRLKRTARRRYTRRKNRICYLQEIFSNEMAKVDDSFFHRLEESFLVEEDKKHERHPIFGNIVDEVAYHEKYPTIYHLRKKLVDSTDKADLRLIYLALAHMIKFRGHFLIEGDLNPDNSDVDKLFIQLVQTYNQLFEENPINASGVDAKAILSARLSKSRRLENLIAQLPGEKKNGLFGNLIALSLGLTPNFKSNFDLAEDAKLQLSKDTYDDDLDNLLAQIGDQYADLFLAAKNLSDAILLSDILRVNTEITKAPLSASMIKRYDEHHQDLTLLKALVRQQLPEKYKEIFFDQSKNGYAGYIDGGASQEEFYKFIKPILEKMDGTEELLVKLNREDLLRKQRTFDNGSIPHQIHLGELHAILRRQEDFYPFLKDNREKIEKILTFRIPYYVGPLARGNSRFAWMTRKSEETITPWNFEEVVDKGASAQSFIERMTNFDKNLPNEKVLPKHSLLYEYFTVYNELTKVKYVTEGMRKPAFLSGEQKKAIVDLLFKTNRKVTVKQLKEDYFKKIECFDSVEISGVEDRFNASLGTYHDLLKIIKDKDFLDNEENEDILEDIVLTLTLFEDREMIEERLKTYAHLFDDKVMKQLKRRRYTGWGRLSRKLINGIRDKQSGKTILDFLKSDGFANRNFMQLIHDDSLTFKEDIQKAQVSGQGDSLHEHIANLAGSPAIKKGILQTVKVVDELVKVMGRHKPENIVIEMARENQTTQKGQKNSRERMKRIEEGIKELGSQILKEHPVENTQLQNEKLYLYYLQNGRDMYVDQELDINRLSDYDVDHIVPQSFLKDDSIDNKVLTRSDKARGKSDNVPSEEVVKKMKNYWRQLLNAKLITQRKFDNLTKAERGGLSELDKAGFIKRQLVETRQITKHVAQILDSRMNTKYDENDKLIREVKVITLKSKLVSDFRKDFQFYKVREINNYHHAHDAYLNAVVGTALIKKYPKLESEFVYGDYKVYDVRKMIAKSEQEIGKATAKYFFYSNIMNFFKTEITLANGEIRKRPLIETNGETGEIVWDKGRDFATVRKVLSMPQVNIVKKTEVQTGGFSKESILPKRNSDKLIARKKDWDPKKYGGFDSPTVAYSVLVVAKVEKGKSKKLKSVKELLGITIMERSSFEKNPIDFLEAKGYKEVKKDLIIKLPKYSLFELENGRKRMLASAGELQKGNELALPSKYVNFLYLASHYEKLKGSPEDNEQKQLFVEQHKHYLDEIIEQISEFSKRVILADANLDKVLSAYNKHRDKPIREQAENIIHLFTLTNLGAPAAFKYFDTTIDRKRYTSTKEVLDATLIHQSITGLYETRIDLSQLGGDGGEAAAKGSSGGSGGTLNIEDEHRLHETSKEPDVSLGSTWLSDFPQAWAETGGMGLAVRQAPLIIPLKATSTPVSIKQYPMSQEARLGIKPHIQRLLDQGILVPCQSPWNTPLLPVKKPGTNDYRPVQDLREVNKRVEDIHPTVPNPYNLLSGLPPSHQWYTVLDLKDAFFCLRLHPTSQPLFAFEWRDPEMGISGQLTWTRLPQGFKNSPTLFNEALHRDLADFRIQHPDLILLQYVDDLLLAATSELDCQQGTRALLQTLGNLGYRASAKKAQICQKQVKYLGYLLKEGQRWLTEARKETVMGQPTPKTPRQLREFLGKAGFCRLFIPGFAEMAAPLYPLTKPGTLFNWGPDQQKAYQEIKQALLTAPALGLPDLTKPFELFVDEKQGYAKGVLTQKLGPWRRPVAYLSKKLDPVAAGWPPCLRMVAAIAVLTKDAGKLTMGQPLVILAPHAVEALVKQPPDRWLSNARMTHYQALLLDTDRVQFGPVVALNPATLLPLPEEGLQHNCLDILAEAHGTRPDLTDQPLPDADHTWYTDGSSLLQEGQRKAGAAVTTETEVIWAKALPAGTSAQRAELIALTQALKMAEGKKLNVYTDSRYAFATAHIHGEIYRRRGWLTSEGKEIKNKDEILALLKALFLPKRLSIIHCPGHQKGHSAEARGNRMADQAARKAAITETPDTSTLLAGKRTADGSEFEKRTADGSEFESPKKKAKVE

SEQ ID NO: 2800 - protein, 2094 aa, synthetic construct
MPAAKRVKLDGGDKKYSIGLDIGTNSVGWAVITDEYKVPSKKFKVLGNTDRHSIKKNLIGALLFDSGETAEATRLKRTARRRYTRRKNRICYLQEIFSNEMAKVDDSFFHRLEESFLVEEDKKHERHPIFGNIVDEVAYHEKYPTIYHLRKKLVDSTDKADLRLIYLALAHMIKFRGHFLIEGDLNPDNSDVDKLFIQLVQTYNQLFEENPINASGVDAKAILSARLSKSRRLENLIAQLPGEKKNGLFGNLIALSLGLTPNFKSNFDLAEDAKLQLSKDTYDDDLDNLLAQIGDQYADLFLAAKNLSDAILLSDILRVNTEITKAPLSASMIKRYDEHHQDLTLLKALVRQQLPEKYKEIFFDQSKNGYAGYIDGGASQEEFYKFIKPILEKMDGTEELLVKLNREDLLRKQRTFDNGSIPHQIHLGELHAILRRQEDFYPFLKDNREKIEKILTFRIPYYVGPLARGNSRFAWMTRKSEETITPWNFEEVVDKGASAQSFIERMTNFDKNLPNEKVLPKHSLLYEYFTVYNELTKVKYVTEGMRKPAFLSGEQKKAIVDLLFKTNRKVTVKQLKEDYFKKIECFDSVEISGVEDRFNASLGTYHDLLKIIKDKDFLDNEENEDILEDIVLTLTLFEDREMIEERLKTYAHLFDDKVMKQLKRRRYTGWGRLSRKLINGIRDKQSGKTILDFLKSDGFANRNFMQLIHDDSLTFKEDIQKAQVSGQGDSLHEHIANLAGSPAIKKGILQTVKVVDELVKVMGRHKPENIVIEMARENQTTQKGQKNSRERMKRIEEGIKELGSQILKEHPVENTQLQNEKLYLYYLQNGRDMYVDQELDINRLSDYDVDHIVPQSFLKDDSIDNKVLTRSDKARGKSDNVPSEEVVKKMKNYWRQLLNAKLITQRKFDNLTKAERGGLSELDKAGFIKRQLVETRQITKHVAQILDSRMNTKYDENDKLIREVKVITLKSKLVSDFRKDFQFYKVREINNYHHAHDAYLNAVVGTALIKKYPKLESEFVYGDYKVYDVRKMIAKSEQEIGKATAKYFFYSNIMNFFKTEITLANGEIRKRPLIETNGETGEIVWDKGRDFATVRKVLSMPQVNIVKKTEVQTGGFSKESILPKRNSDKLIARKKDWDPKKYGGFDSPTVAYSVLVVAKVEKGKSKKLKSVKELLGITIMERSSFEKNPIDFLEAKGYKEVKKDLIIKLPKYSLFELENGRKRMLASAGELQKGNELALPSKYVNFLYLASHYEKLKGSPEDNEQKQLFVEQHKHYLDEIIEQISEFSKRVILADANLDKVLSAYNKHRDKPIREQAENIIHLFTLTNLGAPAAFKYFDTTIDRKRYTSTKEVLDATLIHQSITGLYETRIDLSQLGGDGGGGGPAPGGSGGTLNIEDEHRLHETSKEPDVSLGSTWLSDFPQAWAETGGMGLAVRQAPLIIPLKATSTPVSIKQYPMSQEARLGIKPHIQRLLDQGILVPCQSPWNTPLLPVKKPGTNDYRPVQDLREVNKRVEDIHPTVPNPYNLLSGLPPSHQWYTVLDLKDAFFCLRLHPTSQPLFAFEWRDPEMGISGQLTWTRLPQGFKNSPTLFNEALHRDLADFRIQHPDLILLQYVDDLLLAATSELDCQQGTRALLQTLGNLGYRASAKKAQICQKQVKYLGYLLKEGQRWLTEARKETVMGQPTPKTPRQLREFLGKAGFCRLFIPGFAEMAAPLYPLTKPGTLFNWGPDQQKAYQEIKQALLTAPALGLPDLTKPFELFVDEKQGYAKGVLTQKLGPWRRPVAYLSKKLDPVAAGWPPCLRMVAAIAVLTKDAGKLTMGQPLVILAPHAVEALVKQPPDRWLSNARMTHYQALLLDTDRVQFGPVVALNPATLLPLPEEGLQHNCLDILAEAHGTRPDLTDQPLPDADHTWYTDGSSLLQEGQRKAGAAVTTETEVIWAKALPAGTSAQRAELIALTQALKMAEGKKLNVYTDSRYAFATAHIHGEIYRRRGWLTSEGKEIKNKDEILALLKALFLPKRLSIIHCPGHQKGHSAEARGNRMADQAARKAAITETPDTSTLLAGKRTADGSEFEKRTADGSEFESPKKKAKVE

SEQ ID NO: 2801 - protein, 2094 aa, synthetic construct
MPAAKRVKLDGGDKKYSIGLDIGTNSVGWAVITDEYKVPSKKFKVLGNTDRHSIKKNLIGALLFDSGETAEATRLKRTARRRYTRRKNRICYLQEIFSNEMAKVDDSFFHRLEESFLVEEDKKHERHPIFGNIVDEVAYHEKYPTIYHLRKKLVDSTDKADLRLIYLALAHMIKFRGHFLIEGDLNPDNSDVDKLFIQLVQTYNQLFEENPINASGVDAKAILSARLSKSRRLENLIAQLPGEKKNGLFGNLIALSLGLTPNFKSNFDLAEDAKLQLSKDTYDDDLDNLLAQIGDQYADLFLAAKNLSDAILLSDILRVNTEITKAPLSASMIKRYDEHHQDLTLLKALVRQQLPEKYKEIFFDQSKNGYAGYIDGGASQEEFYKFIKPILEKMDGTEELLVKLNREDLLRKQRTFDNGSIPHQIHLGELHAILRRQEDFYPFLKDNREKIEKILTFRIPYYVGPLARGNSRFAWMTRKSEETITPWNFEEVVDKGASAQSFIERMTNFDKNLPNEKVLPKHSLLYEYFTVYNELTKVKYVTEGMRKPAFLSGEQKKAIVDLLFKTNRKVTVKQLKEDYFKKIECFDSVEISGVEDRFNASLGTYHDLLKIIKDKDFLDNEENEDILEDIVLTLTLFEDREMIEERLKTYAHLFDDKVMKQLKRRRYTGWGRLSRKLINGIRDKQSGKTILDFLKSDGFANRNFMQLIHDDSLTFKEDIQKAQVSGQGDSLHEHIANLAGSPAIKKGILQTVKVVDELVKVMGRHKPENIVIEMARENQTTQKGQKNSRERMKRIEEGIKELGSQILKEHPVENTQLQNEKLYLYYLQNGRDMYVDQELDINRLSDYDVDHIVPQSFLKDDSIDNKVLTRSDKARGKSDNVPSEEVVKKMKNYWRQLLNAKLITQRKFDNLTKAERGGLSELDKAGFIKRQLVETRQITKHVAQILDSRMNTKYDENDKLIREVKVITLKSKLVSDFRKDFQFYKVREINNYHHAHDAYLNAVVGTALIKKYPKLESEFVYGDYKVYDVRKMIAKSEQEIGKATAKYFFYSNIMNFFKTEITLANGEIRKRPLIETNGETGEIVWDKGRDFATVRKVLSMPQVNIVKKTEVQTGGFSKESILPKRNSDKLIARKKDWDPKKYGGFDSPTVAYSVLVVAKVEKGKSKKLKSVKELLGITIMERSSFEKNPIDFLEAKGYKEVKKDLIIKLPKYSLFELENGRKRMLASAGELQKGNELALPSKYVNFLYLASHYEKLKGSPEDNEQKQLFVEQHKHYLDEIIEQISEFSKRVILADANLDKVLSAYNKHRDKPIREQAENIIHLFTLTNLGAPAAFKYFDTTIDRKRYTSTKEVLDATLIHQSITGLYETRIDLSQLGGDGGGGSPAPGGGGGTLNIEDEHRLHETSKEPDVSLGSTWLSDFPQAWAETGGMGLAVRQAPLIIPLKATSTPVSIKQYPMSQEARLGIKPHIQRLLDQGILVPCQSPWNTPLLPVKKPGTNDYRPVQDLREVNKRVEDIHPTVPNPYNLLSGLPPSHQWYTVLDLKDAFFCLRLHPTSQPLFAFEWRDPEMGISGQLTWTRLPQGFKNSPTLFNEALHRDLADFRIQHPDLILLQYVDDLLLAATSELDCQQGTRALLQTLGNLGYRASAKKAQICQKQVKYLGYLLKEGQRWLTEARKETVMGQPTPKTPRQLREFLGKAGFCRLFIPGFAEMAAPLYPLTKPGTLFNWGPDQQKAYQEIKQALLTAPALGLPDLTKPFELFVDEKQGYAKGVLTQKLGPWRRPVAYLSKKLDPVAAGWPPCLRMVAAIAVLTKDAGKLTMGQPLVILAPHAVEALVKQPPDRWLSNARMTHYQALLLDTDRVQFGPVVALNPATLLPLPEEGLQHNCLDILAEAHGTRPDLTDQPLPDADHTWYTDGSSLLQEGQRKAGAAVTTETEVIWAKALPAGTSAQRAELIALTQALKMAEGKKLNVYTDSRYAFATAHIHGEIYRRRGWLTSEGKEIKNKDEILALLKALFLPKRLSIIHCPGHQKGHSAEARGNRMADQAARKAAITETPDTSTLLAGKRTADGSEFEKRTADGSEFESPKKKAKVE

SEQ ID NO: 2802 - protein, 2100 aa, synthetic construct
MPAAKRVKLDGGDKKYSIGLDIGTNSVGWAVITDEYKVPSKKFKVLGNTDRHSIKKNLIGALLFDSGETAEATRLKRTARRRYTRRKNRICYLQEIFSNEMAKVDDSFFHRLEESFLVEEDKKHERHPIFGNIVDEVAYHEKYPTIYHLRKKLVDSTDKADLRLIYLALAHMIKFRGHFLIEGDLNPDNSDVDKLFIQLVQTYNQLFEENPINASGVDAKAILSARLSKSRRLENLIAQLPGEKKNGLFGNLIALSLGLTPNFKSNFDLAEDAKLQLSKDTYDDDLDNLLAQIGDQYADLFLAAKNLSDAILLSDILRVNTEITKAPLSASMIKRYDEHHQDLTLLKALVRQQLPEKYKEIFFDQSKNGYAGYIDGGASQEEFYKFIKPILEKMDGTEELLVKLNREDLLRKQRTFDNGSIPHQIHLGELHAILRRQEDFYPFLKDNREKIEKILTFRIPYYVGPLARGNSRFAWMTRKSEETITPWNFEEVVDKGASAQSFIERMTNFDKNLPNEKVLPKHSLLYEYFTVYNELTKVKYVTEGMRKPAFLSGEQKKAIVDLLFKTNRKVTVKQLKEDYFKKIECFDSVEISGVEDRFNASLGTYHDLLKIIKDKDFLDNEENEDILEDIVLTLTLFEDREMIEERLKTYAHLFDDKVMKQLKRRRYTGWGRLSRKLINGIRDKQSGKTILDFLKSDGFANRNFMQLIHDDSLTFKEDIQKAQVSGQGDSLHEHIANLAGSPAIKKGILQTVKVVDELVKVMGRHKPENIVIEMARENQTTQKGQKNSRERMKRIEEGIKELGSQILKEHPVENTQLQNEKLYLYYLQNGRDMYVDQELDINRLSDYDVDHIVPQSFLKDDSIDNKVLTRSDKARGKSDNVPSEEVVKKMKNYWRQLLNAKLITQRKFDNLTKAERGGLSELDKAGFIKRQLVETRQITKHVAQILDSRMNTKYDENDKLIREVKVITLKSKLVSDFRKDFQFYKVREINNYHHAHDAYLNAVVGTALIKKYPKLESEFVYGDYKVYDVRKMIAKSEQEIGKATAKYFFYSNIMNFFKTEITLANGEIRKRPLIETNGETGEIVWDKGRDFATVRKVLSMPQVNIVKKTEVQTGGFSKESILPKRNSDKLIARKKDWDPKKYGGFDSPTVAYSVLVVAKVEKGKSKKLKSVKELLGITIMERSSFEKNPIDFLEAKGYKEVKKDLIIKLPKYSLFELENGRKRMLASAGELQKGNELALPSKYVNFLYLASHYEKLKGSPEDNEQKQLFVEQHKHYLDEIIEQISEFSKRVILADANLDKVLSAYNKHRDKPIREQAENIIHLFTLTNLGAPAAFKYFDTTIDRKRYTSTKEVLDATLIHQSITGLYETRIDLSQLGGDGGGSSGSSGSSGSSGSSGGTLNIEDEHRLHETSKEPDVSLGSTWLSDFPQAWAETGGMGLAVRQAPLIIPLKATSTPVSIKQYPMSQEARLGIKPHIQRLLDQGILVPCQSPWNTPLLPVKKPGTNDYRPVQDLREVNKRVEDIHPTVPNPYNLLSGLPPSHQWYTVLDLKDAFFCLRLHPTSQPLFAFEWRDPEMGISGQLTWTRLPQGFKNSPTLFNEALHRDLADFRIQHPDLILLQYVDDLLLAATSELDCQQGTRALLQTLGNLGYRASAKKAQICQKQVKYLGYLLKEGQRWLTEARKETVMGQPTPKTPRQLREFLGKAGFCRLFIPGFAEMAAPLYPLTKPGTLFNWGPDQQKAYQEIKQALLTAPALGLPDLTKPFELFVDEKQGYAKGVLTQKLGPWRRPVAYLSKKLDPVAAGWPPCLRMVAAIAVLTKDAGKLTMGQPLVILAPHAVEALVKQPPDRWLSNARMTHYQALLLDTDRVQFGPVVALNPATLLPLPEEGLQHNCLDILAEAHGTRPDLTDQPLPDADHTWYTDGSSLLQEGQRKAGAAVTTETEVIWAKALPAGTSAQRAELIALTQALKMAEGKKLNVYTDSRYAFATAHIHGEIYRRRGWLTSEGKEIKNKDEILALLKALFLPKRLSIIHCPGHQKGHSAEARGNRMADQAARKAAITETPDTSTLLAGKRTADGSEFEKRTADGSEFESPKKKAKVE

SEQ ID NO: 2803 - protein, 2110 aa, synthetic construct
MPAAKRVKLDGGDKKYSIGLDIGTNSVGWAVITDEYKVPSKKFKVLGNTDRHSIKKNLIGALLFDSGETAEATRLKRTARRRYTRRKNRICYLQEIFSNEMAKVDDSFFHRLEESFLVEEDKKHERHPIFGNIVDEVAYHEKYPTIYHLRKKLVDSTDKADLRLIYLALAHMIKFRGHFLIEGDLNPDNSDVDKLFIQLVQTYNQLFEENPINASGVDAKAILSARLSKSRRLENLIAQLPGEKKNGLFGNLIALSLGLTPNFKSNFDLAEDAKLQLSKDTYDDDLDNLLAQIGDQYADLFLAAKNLSDAILLSDILRVNTEITKAPLSASMIKRYDEHHQDLTLLKALVRQQLPEKYKEIFFDQSKNGYAGYIDGGASQEEFYKFIKPILEKMDGTEELLVKLNREDLLRKQRTFDNGSIPHQIHLGELHAILRRQEDFYPFLKDNREKIEKILTFRIPYYVGPLARGNSRFAWMTRKSEETITPWNFEEVVDKGASAQSFIERMTNFDKNLPNEKVLPKHSLLYEYFTVYNELTKVKYVTEGMRKPAFLSGEQKKAIVDLLFKTNRKVTVKQLKEDYFKKIECFDSVEISGVEDRFNASLGTYHDLLKIIKDKDFLDNEENEDILEDIVLTLTLFEDREMIEERLKTYAHLFDDKVMKQLKRRRYTGWGRLSRKLINGIRDKQSGKTILDFLKSDGFANRNFMQLIHDDSLTFKEDIQKAQVSGQGDSLHEHIANLAGSPAIKKGILQTVKVVDELVKVMGRHKPENIVIEMARENQTTQKGQKNSRERMKRIEEGIKELGSQILKEHPVENTQLQNEKLYLYYLQNGRDMYVDQELDINRLSDYDVDHIVPQSFLKDDSIDNKVLTRSDKARGKSDNVPSEEVVKKMKNYWRQLLNAKLITQRKFDNLTKAERGGLSELDKAGFIKRQLVETRQITKHVAQILDSRMNTKYDENDKLIREVKVITLKSKLVSDFRKDFQFYKVREINNYHHAHDAYLNAVVGTALIKKYPKLESEFVYGDYKVYDVRKMIAKSEQEIGKATAKYFFYSNIMNFFKTEITLANGEIRKRPLIETNGETGEIVWDKGRDFATVRKVLSMPQVNIVKKTEVQTGGFSKESILPKRNSDKLIARKKDWDPKKYGGFDSPTVAYSVLVVAKVEKGKSKKLKSVKELLGITIMERSSFEKNPIDFLEAKGYKEVKKDLIIKLPKYSLFELENGRKRMLASAGELQKGNELALPSKYVNFLYLASHYEKLKGSPEDNEQKQLFVEQHKHYLDEIIEQISEFSKRVILADANLDKVLSAYNKHRDKPIREQAENIIHLFTLTNLGAPAAFKYFDTTIDRKRYTSTKEVLDATLIHQSITGLYETRIDLSQLGGDGGEAAAKEAAAKEAAAKEAAAKEAAAKGGTLNIEDEHRLHETSKEPDVSLGSTWLSDFPQAWAETGGMGLAVRQAPLIIPLKATSTPVSIKQYPMSQEARLGIKPHIQRLLDQGILVPCQSPWNTPLLPVKKPGTNDYRPVQDLREVNKRVEDIHPTVPNPYNLLSGLPPSHQWYTVLDLKDAFFCLRLHPTSQPLFAFEWRDPEMGISGQLTWTRLPQGFKNSPTLFNEALHRDLADFRIQHPDLILLQYVDDLLLAATSELDCQQGTRALLQTLGNLGYRASAKKAQICQKQVKYLGYLLKEGQRWLTEARKETVMGQPTPKTPRQLREFLGKAGFCRLFIPGFAEMAAPLYPLTKPGTLFNWGPDQQKAYQEIKQALLTAPALGLPDLTKPFELFVDEKQGYAKGVLTQKLGPWRRPVAYLSKKLDPVAAGWPPCLRMVAAIAVLTKDAGKLTMGQPLVILAPHAVEALVKQPPDRWLSNARMTHYQALLLDTDRVQFGPVVALNPATLLPLPEEGLQHNCLDILAEAHGTRPDLTDQPLPDADHTWYTDGSSLLQEGQRKAGAAVTTETEVIWAKALPAGTSAQRAELIALTQALKMAEGKKLNVYTDSRYAFATAHIHGEIYRRRGWLTSEGKEIKNKDEILALLKALFLPKRLSIIHCPGHQKGHSAEARGNRMADQAARKAAITETPDTSTLLAGKRTADGSEFEKRTADGSEFESPKKKAKVE

SEQ ID NO: 2804 - protein, 2094 aa, synthetic construct
MPAAKRVKLDGGDKKYSIGLDIGTNSVGWAVITDEYKVPSKKFKVLGNTDRHSIKKNLIGALLFDSGETAEATRLKRTARRRYTRRKNRICYLQEIFSNEMAKVDDSFFHRLEESFLVEEDKKHERHPIFGNIVDEVAYHEKYPTIYHLRKKLVDSTDKADLRLIYLALAHMIKFRGHFLIEGDLNPDNSDVDKLFIQLVQTYNQLFEENPINASGVDAKAILSARLSKSRRLENLIAQLPGEKKNGLFGNLIALSLGLTPNFKSNFDLAEDAKLQLSKDTYDDDLDNLLAQIGDQYADLFLAAKNLSDAILLSDILRVNTEITKAPLSASMIKRYDEHHQDLTLLKALVRQQLPEKYKEIFFDQSKNGYAGYIDGGASQEEFYKFIKPILEKMDGTEELLVKLNREDLLRKQRTFDNGSIPHQIHLGELHAILRRQEDFYPFLKDNREKIEKILTFRIPYYVGPLARGNSRFAWMTRKSEETITPWNFEEVVDKGASAQSFIERMTNFDKNLPNEKVLPKHSLLYEYFTVYNELTKVKYVTEGMRKPAFLSGEQKKAIVDLLFKTNRKVTVKQLKEDYFKKIECFDSVEISGVEDRFNASLGTYHDLLKIIKDKDFLDNEENEDILEDIVLTLTLFEDREMIEERLKTYAHLFDDKVMKQLKRRRYTGWGRLSRKLINGIRDKQSGKTILDFLKSDGFANRNFMQLIHDDSLTFKEDIQKAQVSGQGDSLHEHIANLAGSPAIKKGILQTVKVVDELVKVMGRHKPENIVIEMARENQTTQKGQKNSRERMKRIEEGIKELGSQILKEHPVENTQLQNEKLYLYYLQNGRDMYVDQELDINRLSDYDVDHIVPQSFLKDDSIDNKVLTRSDKARGKSDNVPSEEVVKKMKNYWRQLLNAKLITQRKFDNLTKAERGGLSELDKAGFIKRQLVETRQITKHVAQILDSRMNTKYDENDKLIREVKVITLKSKLVSDFRKDFQFYKVREINNYHHAHDAYLNAVVGTALIKKYPKLESEFVYGDYKVYDVRKMIAKSEQEIGKATAKYFFYSNIMNFFKTEITLANGEIRKRPLIETNGETGEIVWDKGRDFATVRKVLSMPQVNIVKKTEVQTGGFSKESILPKRNSDKLIARKKDWDPKKYGGFDSPTVAYSVLVVAKVEKGKSKKLKSVKELLGITIMERSSFEKNPIDFLEAKGYKEVKKDLIIKLPKYSLFELENGRKRMLASAGELQKGNELALPSKYVNFLYLASHYEKLKGSPEDNEQKQLFVEQHKHYLDEIIEQISEFSKRVILADANLDKVLSAYNKHRDKPIREQAENIIHLFTLTNLGAPAAFKYFDTTIDRKRYTSTKEVLDATLIHQSITGLYETRIDLSQLGGDGGGGSGGGPAPGGTLNIEDEHRLHETSKEPDVSLGSTWLSDFPQAWAETGGMGLAVRQAPLIIPLKATSTPVSIKQYPMSQEARLGIKPHIQRLLDQGILVPCQSPWNTPLLPVKKPGTNDYRPVQDLREVNKRVEDIHPTVPNPYNLLSGLPPSHQWYTVLDLKDAFFCLRLHPTSQPLFAFEWRDPEMGISGQLTWTRLPQGFKNSPTLFNEALHRDLADFRIQHPDLILLQYVDDLLLAATSELDCQQGTRALLQTLGNLGYRASAKKAQICQKQVKYLGYLLKEGQRWLTEARKETVMGQPTPKTPRQLREFLGKAGFCRLFIPGFAEMAAPLYPLTKPGTLFNWGPDQQKAYQEIKQALLTAPALGLPDLTKPFELFVDEKQGYAKGVLTQKLGPWRRPVAYLSKKLDPVAAGWPPCLRMVAAIAVLTKDAGKLTMGQPLVILAPHAVEALVKQPPDRWLSNARMTHYQALLLDTDRVQFGPVVALNPATLLPLPEEGLQHNCLDILAEAHGTRPDLTDQPLPDADHTWYTDGSSLLQEGQRKAGAAVTTETEVIWAKALPAGTSAQRAELIALTQALKMAEGKKLNVYTDSRYAFATAHIHGEIYRRRGWLTSEGKEIKNKDEILALLKALFLPKRLSIIHCPGHQKGHSAEARGNRMADQAARKAAITETPDTSTLLAGKRTADGSEFEKRTADGSEFESPKKKAKVE

SEQ ID NO: 2805 - protein, 2096 aa, synthetic construct
MPAAKRVKLDGGDKKYSIGLDIGTNSVGWAVITDEYKVPSKKFKVLGNTDRHSIKKNLIGALLFDSGETAEATRLKRTARRRYTRRKNRICYLQEIFSNEMAKVDDSFFHRLEESFLVEEDKKHERHPIFGNIVDEVAYHEKYPTIYHLRKKLVDSTDKADLRLIYLALAHMIKFRGHFLIEGDLNPDNSDVDKLFIQLVQTYNQLFEENPINASGVDAKAILSARLSKSRRLENLIAQLPGEKKNGLFGNLIALSLGLTPNFKSNFDLAEDAKLQLSKDTYDDDLDNLLAQIGDQYADLFLAAKNLSDAILLSDILRVNTEITKAPLSASMIKRYDEHHQDLTLLKALVRQQLPEKYKEIFFDQSKNGYAGYIDGGASQEEFYKFIKPILEKMDGTEELLVKLNREDLLRKQRTFDNGSIPHQIHLGELHAILRRQEDFYPFLKDNREKIEKILTFRIPYYVGPLARGNSRFAWMTRKSEETITPWNFEEVVDKGASAQSFIERMTNFDKNLPNEKVLPKHSLLYEYFTVYNELTKVKYVTEGMRKPAFLSGEQKKAIVDLLFKTNRKVTVKQLKEDYFKKIECFDSVEISGVEDRFNASLGTYHDLLKIIKDKDFLDNEENEDILEDIVLTLTLFEDREMIEERLKTYAHLFDDKVMKQLKRRRYTGWGRLSRKLINGIRDKQSGKTILDFLKSDGFANRNFMQLIHDDSLTFKEDIQKAQVSGQGDSLHEHIANLAGSPAIKKGILQTVKVVDELVKVMGRHKPENIVIEMARENQTTQKGQKNSRERMKRIEEGIKELGSQILKEHPVENTQLQNEKLYLYYLQNGRDMYVDQELDINRLSDYDVDHIVPQSFLKDDSIDNKVLTRSDKARGKSDNVPSEEVVKKMKNYWRQLLNAKLITQRKFDNLTKAERGGLSELDKAGFIKRQLVETRQITKHVAQILDSRMNTKYDENDKLIREVKVITLKSKLVSDFRKDFQFYKVREINNYHHAHDAYLNAVVGTALIKKYPKLESEFVYGDYKVYDVRKMIAKSEQEIGKATAKYFFYSNIMNFFKTEITLANGEIRKRPLIETNGETGEIVWDKGRDFATVRKVLSMPQVNIVKKTEVQTGGFSKESILPKRNSDKLIARKKDWDPKKYGGFDSPTVAYSVLVVAKVEKGKSKKLKSVKELLGITIMERSSFEKNPIDFLEAKGYKEVKKDLIIKLPKYSLFELENGRKRMLASAGELQKGNELALPSKYVNFLYLASHYEKLKGSPEDNEQKQLFVEQHKHYLDEIIEQISEFSKRVILADANLDKVLSAYNKHRDKPIREQAENIIHLFTLTNLGAPAAFKYFDTTIDRKRYTSTKEVLDATLIHQSITGLYETRIDLSQLGGDGGGGSPAPEAAAKGGTLNIEDEHRLHETSKEPDVSLGSTWLSDFPQAWAETGGMGLAVRQAPLIIPLKATSTPVSIKQYPMSQEARLGIKPHIQRLLDQGILVPCQSPWNTPLLPVKKPGTNDYRPVQDLREVNKRVEDIHPTVPNPYNLLSGLPPSHQWYTVLDLKDAFFCLRLHPTSQPLFAFEWRDPEMGISGQLTWTRLPQGFKNSPTLFNEALHRDLADFRIQHPDLILLQYVDDLLLAATSELDCQQGTRALLQTLGNLGYRASAKKAQICQKQVKYLGYLLKEGQRWLTEARKETVMGQPTPKTPRQLREFLGKAGFCRLFIPGFAEMAAPLYPLTKPGTLFNWGPDQQKAYQEIKQALLTAPALGLPDLTKPFELFVDEKQGYAKGVLTQKLGPWRRPVAYLSKKLDPVAAGWPPCLRMVAAIAVLTKDAGKLTMGQPLVILAPHAVEALVKQPPDRWLSNARMTHYQALLLDTDRVQFGPVVALNPATLLPLPEEGLQHNCLDILAEAHGTRPDLTDQPLPDADHTWYTDGSSLLQEGQRKAGAAVTTETEVIWAKALPAGTSAQRAELIALTQALKMAEGKKLNVYTDSRYAFATAHIHGEIYRRRGWLTSEGKEIKNKDEILALLKALFLPKRLSIIHCPGHQKGHSAEARGNRMADQAARKAAITETPDTSTLLAGKRTADGSEFEKRTADGSEFESPKKKAKVE

SEQ ID NO: 2806 - protein, 2097 aa, synthetic construct
MPAAKRVKLDGGDKKYSIGLDIGTNSVGWAVITDEYKVPSKKFKVLGNTDRHSIKKNLIGALLFDSGETAEATRLKRTARRRYTRRKNRICYLQEIFSNEMAKVDDSFFHRLEESFLVEEDKKHERHPIFGNIVDEVAYHEKYPTIYHLRKKLVDSTDKADLRLIYLALAHMIKFRGHFLIEGDLNPDNSDVDKLFIQLVQTYNQLFEENPINASGVDAKAILSARLSKSRRLENLIAQLPGEKKNGLFGNLIALSLGLTPNFKSNFDLAEDAKLQLSKDTYDDDLDNLLAQIGDQYADLFLAAKNLSDAILLSDILRVNTEITKAPLSASMIKRYDEHHQDLTLLKALVRQQLPEKYKEIFFDQSKNGYAGYIDGGASQEEFYKFIKPILEKMDGTEELLVKLNREDLLRKQRTFDNGSIPHQIHLGELHAILRRQEDFYPFLKDNREKIEKILTFRIPYYVGPLARGNSRFAWMTRKSEETITPWNFEEVVDKGASAQSFIERMTNFDKNLPNEKVLPKHSLLYEYFTVYNELTKVKYVTEGMRKPAFLSGEQKKAIVDLLFKTNRKVTVKQLKEDYFKKIECFDSVEISGVEDRFNASLGTYHDLLKIIKDKDFLDNEENEDILEDIVLTLTLFEDREMIEERLKTYAHLFDDKVMKQLKRRRYTGWGRLSRKLINGIRDKQSGKTILDFLKSDGFANRNFMQLIHDDSLTFKEDIQKAQVSGQGDSLHEHIANLAGSPAIKKGILQTVKVVDELVKVMGRHKPENIVIEMARENQTTQKGQKNSRERMKRIEEGIKELGSQILKEHPVENTQLQNEKLYLYYLQNGRDMYVDQELDINRLSDYDVDHIVPQSFLKDDSIDNKVLTRSDKARGKSDNVPSEEVVKKMKNYWRQLLNAKLITQRKFDNLTKAERGGLSELDKAGFIKRQLVETRQITKHVAQILDSRMNTKYDENDKLIREVKVITLKSKLVSDFRKDFQFYKVREINNYHHAHDAYLNAVVGTALIKKYPKLESEFVYGDYKVYDVRKMIAKSEQEIGKATAKYFFYSNIMNFFKTEITLANGEIRKRPLIETNGETGEIVWDKGRDFATVRKVLSMPQVNIVKKTEVQTGGFSKESILPKRNSDKLIARKKDWDPKKYGGFDSPTVAYSVLVVAKVEKGKSKKLKSVKELLGITIMERSSFEKNPIDFLEAKGYKEVKKDLIIKLPKYSLFELENGRKRMLASAGELQKGNELALPSKYVNFLYLASHYEKLKGSPEDNEQKQLFVEQHKHYLDEIIEQISEFSKRVILADANLDKVLSAYNKHRDKPIREQAENIIHLFTLTNLGAPAAFKYFDTTIDRKRYTSTKEVLDATLIHQSITGLYETRIDLSQLGGDGGGSSGSSGSSGSSGGTLNIEDEHRLHETSKEPDVSLGSTWLSDFPQAWAETGGMGLAVRQAPLIIPLKATSTPVSIKQYPMSQEARLGIKPHIQRLLDQGILVPCQSPWNTPLLPVKKPGTNDYRPVQDLREVNKRVEDIHPTVPNPYNLLSGLPPSHQWYTVLDLKDAFFCLRLHPTSQPLFAFEWRDPEMGISGQLTWTRLPQGFKNSPTLFNEALHRDLADFRIQHPDLILLQYVDDLLLAATSELDCQQGTRALLQTLGNLGYRASAKKAQICQKQVKYLGYLLKEGQRWLTEARKETVMGQPTPKTPRQLREFLGKAGFCRLFIPGFAEMAAPLYPLTKPGTLFNWGPDQQKAYQEIKQALLTAPALGLPDLTKPFELFVDEKQGYAKGVLTQKLGPWRRPVAYLSKKLDPVAAGWPPCLRMVAAIAVLTKDAGKLTMGQPLVILAPHAVEALVKQPPDRWLSNARMTHYQALLLDTDRVQFGPVVALNPATLLPLPEEGLQHNCLDILAEAHGTRPDLTDQPLPDADHTWYTDGSSLLQEGQRKAGAAVTTETEVIWAKALPAGTSAQRAELIALTQALKMAEGKKLNVYTDSRYAFATAHIHGEIYRRRGWLTSEGKEIKNKDEILALLKALFLPKRLSIIHCPGHQKGHSAEARGNRMADQAARKAAITETPDTSTLLAGKRTADGSEFEKRTADGSEFESPKKKAKVE

SEQ ID NO: 2807 - protein, 2100 aa, synthetic construct
MPAAKRVKLDGGDKKYSIGLDIGTNSVGWAVITDEYKVPSKKFKVLGNTDRHSIKKNLIGALLFDSGETAEATRLKRTARRRYTRRKNRICYLQEIFSNEMAKVDDSFFHRLEESFLVEEDKKHERHPIFGNIVDEVAYHEKYPTIYHLRKKLVDSTDKADLRLIYLALAHMIKFRGHFLIEGDLNPDNSDVDKLFIQLVQTYNQLFEENPINASGVDAKAILSARLSKSRRLENLIAQLPGEKKNGLFGNLIALSLGLTPNFKSNFDLAEDAKLQLSKDTYDDDLDNLLAQIGDQYADLFLAAKNLSDAILLSDILRVNTEITKAPLSASMIKRYDEHHQDLTLLKALVRQQLPEKYKEIFFDQSKNGYAGYIDGGASQEEFYKFIKPILEKMDGTEELLVKLNREDLLRKQRTFDNGSIPHQIHLGELHAILRRQEDFYPFLKDNREKIEKILTFRIPYYVGPLARGNSRFAWMTRKSEETITPWNFEEVVDKGASAQSFIERMTNFDKNLPNEKVLPKHSLLYEYFTVYNELTKVKYVTEGMRKPAFLSGEQKKAIVDLLFKTNRKVTVKQLKEDYFKKIECFDSVEISGVEDRFNASLGTYHDLLKIIKDKDFLDNEENEDILEDIVLTLTLFEDREMIEERLKTYAHLFDDKVMKQLKRRRYTGWGRLSRKLINGIRDKQSGKTILDFLKSDGFANRNFMQLIHDDSLTFKEDIQKAQVSGQGDSLHEHIANLAGSPAIKKGILQTVKVVDELVKVMGRHKPENIVIEMARENQTTQKGQKNSRERMKRIEEGIKELGSQILKEHPVENTQLQNEKLYLYYLQNGRDMYVDQELDINRLSDYDVDHIVPQSFLKDDSIDNKVLTRSDKARGKSDNVPSEEVVKKMKNYWRQLLNAKLITQRKFDNLTKAERGGLSELDKAGFIKRQLVETRQITKHVAQILDSRMNTKYDENDKLIREVKVITLKSKLVSDFRKDFQFYKVREINNYHHAHDAYLNAVVGTALIKKYPKLESEFVYGDYKVYDVRKMIAKSEQEIGKATAKYFFYSNIMNFFKTEITLANGEIRKRPLIETNGETGEIVWDKGRDFATVRKVLSMPQVNIVKKTEVQTGGFSKESILPKRNSDKLIARKKDWDPKKYGGFDSPTVAYSVLVVAKVEKGKSKKLKSVKELLGITIMERSSFEKNPIDFLEAKGYKEVKKDLIIKLPKYSLFELENGRKRMLASAGELQKGNELALPSKYVNFLYLASHYEKLKGSPEDNEQKQLFVEQHKHYLDEIIEQISEFSKRVILADANLDKVLSAYNKHRDKPIREQAENIIHLFTLTNLGAPAAFKYFDTTIDRKRYTSTKEVLDATLIHQSITGLYETRIDLSQLGGDGGGGSGGSGGSGGSGGSGGTLNIEDEHRLHETSKEPDVSLGSTWLSDFPQAWAETGGMGLAVRQAPLIIPLKATSTPVSIKQYPMSQEARLGIKPHIQRLLDQGILVPCQSPWNTPLLPVKKPGTNDYRPVQDLREVNKRVEDIHPTVPNPYNLLSGLPPSHQWYTVLDLKDAFFCLRLHPTSQPLFAFEWRDPEMGISGQLTWTRLPQGFKNSPTLFNEALHRDLADFRIQHPDLILLQYVDDLLLAATSELDCQQGTRALLQTLGNLGYRASAKKAQICQKQVKYLGYLLKEGQRWLTEARKETVMGQPTPKTPRQLREFLGKAGFCRLFIPGFAEMAAPLYPLTKPGTLFNWGPDQQKAYQEIKQALLTAPALGLPDLTKPFELFVDEKQGYAKGVLTQKLGPWRRPVAYLSKKLDPVAAGWPPCLRMVAAIAVLTKDAGKLTMGQPLVILAPHAVEALVKQPPDRWLSNARMTHYQALLLDTDRVQFGPVVALNPATLLPLPEEGLQHNCLDILAEAHGTRPDLTDQPLPDADHTWYTDGSSLLQEGQRKAGAAVTTETEVIWAKALPAGTSAQRAELIALTQALKMAEGKKLNVYTDSRYAFATAHIHGEIYRRRGWLTSEGKEIKNKDEILALLKALFLPKRLSIIHCPGHQKGHSAEARGNRMADQAARKAAITETPDTSTLLAGKRTADGSEFEKRTADGSEFESPKKKAKVE

SEQ ID NO: 2808 - protein, 2091 aa, synthetic construct
MPAAKRVKLDGGDKKYSIGLDIGTNSVGWAVITDEYKVPSKKFKVLGNTDRHSIKKNLIGALLFDSGETAEATRLKRTARRRYTRRKNRICYLQEIFSNEMAKVDDSFFHRLEESFLVEEDKKHERHPIFGNIVDEVAYHEKYPTIYHLRKKLVDSTDKADLRLIYLALAHMIKFRGHFLIEGDLNPDNSDVDKLFIQLVQTYNQLFEENPINASGVDAKAILSARLSKSRRLENLIAQLPGEKKNGLFGNLIALSLGLTPNFKSNFDLAEDAKLQLSKDTYDDDLDNLLAQIGDQYADLFLAAKNLSDAILLSDILRVNTEITKAPLSASMIKRYDEHHQDLTLLKALVRQQLPEKYKEIFFDQSKNGYAGYIDGGASQEEFYKFIKPILEKMDGTEELLVKLNREDLLRKQRTFDNGSIPHQIHLGELHAILRRQEDFYPFLKDNREKIEKILTFRIPYYVGPLARGNSRFAWMTRKSEETITPWNFEEVVDKGASAQSFIERMTNFDKNLPNEKVLPKHSLLYEYFTVYNELTKVKYVTEGMRKPAFLSGEQKKAIVDLLFKTNRKVTVKQLKEDYFKKIECFDSVEISGVEDRFNASLGTYHDLLKIIKDKDFLDNEENEDILEDIVLTLTLFEDREMIEERLKTYAHLFDDKVMKQLKRRRYTGWGRLSRKLINGIRDKQSGKTILDFLKSDGFANRNFMQLIHDDSLTFKEDIQKAQVSGQGDSLHEHIANLAGSPAIKKGILQTVKVVDELVKVMGRHKPENIVIEMARENQTTQKGQKNSRERMKRIEEGIKELGSQILKEHPVENTQLQNEKLYLYYLQNGRDMYVDQELDINRLSDYDVDHIVPQSFLKDDSIDNKVLTRSDKARGKSDNVPSEEVVKKMKNYWRQLLNAKLITQRKFDNLTKAERGGLSELDKAGFIKRQLVETRQITKHVAQILDSRMNTKYDENDKLIREVKVITLKSKLVSDFRKDFQFYKVREINNYHHAHDAYLNAVVGTALIKKYPKLESEFVYGDYKVYDVRKMIAKSEQEIGKATAKYFFYSNIMNFFKTEITLANGEIRKRPLIETNGETGEIVWDKGRDFATVRKVLSMPQVNIVKKTEVQTGGFSKESILPKRNSDKLIARKKDWDPKKYGGFDSPTVAYSVLVVAKVEKGKSKKLKSVKELLGITIMERSSFEKNPIDFLEAKGYKEVKKDLIIKLPKYSLFELENGRKRMLASAGELQKGNELALPSKYVNFLYLASHYEKLKGSPEDNEQKQLFVEQHKHYLDEIIEQISEFSKRVILADANLDKVLSAYNKHRDKPIREQAENIIHLFTLTNLGAPAAFKYFDTTIDRKRYTSTKEVLDATLIHQSITGLYETRIDLSQLGGDGGGGSPAPGGTLNIEDEHRLHETSKEPDVSLGSTWLSDFPQAWAETGGMGLAVRQAPLIIPLKATSTPVSIKQYPMSQEARLGIKPHIQRLLDQGILVPCQSPWNTPLLPVKKPGTNDYRPVQDLREVNKRVEDIHPTVPNPYNLLSGLPPSHQWYTVLDLKDAFFCLRLHPTSQPLFAFEWRDPEMGISGQLTWTRLPQGFKNSPTLFNEALHRDLADFRIQHPDLILLQYVDDLLLAATSELDCQQGTRALLQTLGNLGYRASAKKAQICQKQVKYLGYLLKEGQRWLTEARKETVMGQPTPKTPRQLREFLGKAGFCRLFIPGFAEMAAPLYPLTKPGTLFNWGPDQQKAYQEIKQALLTAPALGLPDLTKPFELFVDEKQGYAKGVLTQKLGPWRRPVAYLSKKLDPVAAGWPPCLRMVAAIAVLTKDAGKLTMGQPLVILAPHAVEALVKQPPDRWLSNARMTHYQALLLDTDRVQFGPVVALNPATLLPLPEEGLQHNCLDILAEAHGTRPDLTDQPLPDADHTWYTDGSSLLQEGQRKAGAAVTTETEVIWAKALPAGTSAQRAELIALTQALKMAEGKKLNVYTDSRYAFATAHIHGEIYRRRGWLTSEGKEIKNKDEILALLKALFLPKRLSIIHCPGHQKGHSAEARGNRMADQAARKAAITETPDTSTLLAGKRTADGSEFEKRTADGSEFESPKKKAKVE

SEQ ID NO: 2809 - protein, 2094 aa, synthetic construct
MPAAKRVKLDGGDKKYSIGLDIGTNSVGWAVITDEYKVPSKKFKVLGNTDRHSIKKNLIGALLFDSGETAEATRLKRTARRRYTRRKNRICYLQEIFSNEMAKVDDSFFHRLEESFLVEEDKKHERHPIFGNIVDEVAYHEKYPTIYHLRKKLVDSTDKADLRLIYLALAHMIKFRGHFLIEGDLNPDNSDVDKLFIQLVQTYNQLFEENPINASGVDAKAILSARLSKSRRLENLIAQLPGEKKNGLFGNLIALSLGLTPNFKSNFDLAEDAKLQLSKDTYDDDLDNLLAQIGDQYADLFLAAKNLSDAILLSDILRVNTEITKAPLSASMIKRYDEHHQDLTLLKALVRQQLPEKYKEIFFDQSKNGYAGYIDGGASQEEFYKFIKPILEKMDGTEELLVKLNREDLLRKQRTFDNGSIPHQIHLGELHAILRRQEDFYPFLKDNREKIEKILTFRIPYYVGPLARGNSRFAWMTRKSEETITPWNFEEVVDKGASAQSFIERMTNFDKNLPNEKVLPKHSLLYEYFTVYNELTKVKYVTEGMRKPAFLSGEQKKAIVDLLFKTNRKVTVKQLKEDYFKKIECFDSVEISGVEDRFNASLGTYHDLLKIIKDKDFLDNEENEDILEDIVLTLTLFEDREMIEERLKTYAHLFDDKVMKQLKRRRYTGWGRLSRKLINGIRDKQSGKTILDFLKSDGFANRNFMQLIHDDSLTFKEDIQKAQVSGQGDSLHEHIANLAGSPAIKKGILQTVKVVDELVKVMGRHKPENIVIEMARENQTTQKGQKNSRERMKRIEEGIKELGSQILKEHPVENTQLQNEKLYLYYLQNGRDMYVDQELDINRLSDYDVDHIVPQSFLKDDSIDNKVLTRSDKARGKSDNVPSEEVVKKMKNYWRQLLNAKLITQRKFDNLTKAERGGLSELDKAGFIKRQLVETRQITKHVAQILDSRMNTKYDENDKLIREVKVITLKSKLVSDFRKDFQFYKVREINNYHHAHDAYLNAVVGTALIKKYPKLESEFVYGDYKVYDVRKMIAKSEQEIGKATAKYFFYSNIMNFFKTEITLANGEIRKRPLIETNGETGEIVWDKGRDFATVRKVLSMPQVNIVKKTEVQTGGFSKESILPKRNSDKLIARKKDWDPKKYGGFDSPTVAYSVLVVAKVEKGKSKKLKSVKELLGITIMERSSFEKNPIDFLEAKGYKEVKKDLIIKLPKYSLFELENGRKRMLASAGELQKGNELALPSKYVNFLYLASHYEKLKGSPEDNEQKQLFVEQHKHYLDEIIEQISEFSKRVILADANLDKVLSAYNKHRDKPIREQAENIIHLFTLTNLGAPAAFKYFDTTIDRKRYTSTKEVLDATLIHQSITGLYETRIDLSQLGGDGGGGSGGSGGSGGTLNIEDEHRLHETSKEPDVSLGSTWLSDFPQAWAETGGMGLAVRQAPLIIPLKATSTPVSIKQYPMSQEARLGIKPHIQRLLDQGILVPCQSPWNTPLLPVKKPGTNDYRPVQDLREVNKRVEDIHPTVPNPYNLLSGLPPSHQWYTVLDLKDAFFCLRLHPTSQPLFAFEWRDPEMGISGQLTWTRLPQGFKNSPTLFNEALHRDLADFRIQHPDLILLQYVDDLLLAATSELDCQQGTRALLQTLGNLGYRASAKKAQICQKQVKYLGYLLKEGQRWLTEARKETVMGQPTPKTPRQLREFLGKAGFCRLFIPGFAEMAAPLYPLTKPGTLFNWGPDQQKAYQEIKQALLTAPALGLPDLTKPFELFVDEKQGYAKGVLTQKLGPWRRPVAYLSKKLDPVAAGWPPCLRMVAAIAVLTKDAGKLTMGQPLVILAPHAVEALVKQPPDRWLSNARMTHYQALLLDTDRVQFGPVVALNPATLLPLPEEGLQHNCLDILAEAHGTRPDLTDQPLPDADHTWYTDGSSLLQEGQRKAGAAVTTETEVIWAKALPAGTSAQRAELIALTQALKMAEGKKLNVYTDSRYAFATAHIHGEIYRRRGWLTSEGKEIKNKDEILALLKALFLPKRLSIIHCPGHQKGHSAEARGNRMADQAARKAAITETPDTSTLLAGKRTADGSEFEKRTADGSEFESPKKKAKVE

SEQ ID NO: 2810 - protein, 2096 aa, synthetic construct
MPAAKRVKLDGGDKKYSIGLDIGTNSVGWAVITDEYKVPSKKFKVLGNTDRHSIKKNLIGALLFDSGETAEATRLKRTARRRYTRRKNRICYLQEIFSNEMAKVDDSFFHRLEESFLVEEDKKHERHPIFGNIVDEVAYHEKYPTIYHLRKKLVDSTDKADLRLIYLALAHMIKFRGHFLIEGDLNPDNSDVDKLFIQLVQTYNQLFEENPINASGVDAKAILSARLSKSRRLENLIAQLPGEKKNGLFGNLIALSLGLTPNFKSNFDLAEDAKLQLSKDTYDDDLDNLLAQIGDQYADLFLAAKNLSDAILLSDILRVNTEITKAPLSASMIKRYDEHHQDLTLLKALVRQQLPEKYKEIFFDQSKNGYAGYIDGGASQEEFYKFIKPILEKMDGTEELLVKLNREDLLRKQRTFDNGSIPHQIHLGELHAILRRQEDFYPFLKDNREKIEKILTFRIPYYVGPLARGNSRFAWMTRKSEETITPWNFEEVVDKGASAQSFIERMTNFDKNLPNEKVLPKHSLLYEYFTVYNELTKVKYVTEGMRKPAFLSGEQKKAIVDLLFKTNRKVTVKQLKEDYFKKIECFDSVEISGVEDRFNASLGTYHDLLKIIKDKDFLDNEENEDILEDIVLTLTLFEDREMIEERLKTYAHLFDDKVMKQLKRRRYTGWGRLSRKLINGIRDKQSGKTILDFLKSDGFANRNFMQLIHDDSLTFKEDIQKAQVSGQGDSLHEHIANLAGSPAIKKGILQTVKVVDELVKVMGRHKPENIVIEMARENQTTQKGQKNSRERMKRIEEGIKELGSQILKEHPVENTQLQNEKLYLYYLQNGRDMYVDQELDINRLSDYDVDHIVPQSFLKDDSIDNKVLTRSDKARGKSDNVPSEEVVKKMKNYWRQLLNAKLITQRKFDNLTKAERGGLSELDKAGFIKRQLVETRQITKHVAQILDSRMNTKYDENDKLIREVKVITLKSKLVSDFRKDFQFYKVREINNYHHAHDAYLNAVVGTALIKKYPKLESEFVYGDYKVYDVRKMIAKSEQEIGKATAKYFFYSNIMNFFKTEITLANGEIRKRPLIETNGETGEIVWDKGRDFATVRKVLSMPQVNIVKKTEVQTGGFSKESILPKRNSDKLIARKKDWDPKKYGGFDSPTVAYSVLVVAKVEKGKSKKLKSVKELLGITIMERSSFEKNPIDFLEAKGYKEVKKDLIIKLPKYSLFELENGRKRMLASAGELQKGNELALPSKYVNFLYLASHYEKLKGSPEDNEQKQLFVEQHKHYLDEIIEQISEFSKRVILADANLDKVLSAYNKHRDKPIREQAENIIHLFTLTNLGAPAAFKYFDTTIDRKRYTSTKEVLDATLIHQSITGLYETRIDLSQLGGDGGGSSGGGEAAAKGGTLNIEDEHRLHETSKEPDVSLGSTWLSDFPQAWAETGGMGLAVRQAPLIIPLKATSTPVSIKQYPMSQEARLGIKPHIQRLLDQGILVPCQSPWNTPLLPVKKPGTNDYRPVQDLREVNKRVEDIHPTVPNPYNLLSGLPPSHQWYTVLDLKDAFFCLRLHPTSQPLFAFEWRDPEMGISGQLTWTRLPQGFKNSPTLFNEALHRDLADFRIQHPDLILLQYVDDLLLAATSELDCQQGTRALLQTLGNLGYRASAKKAQICQKQVKYLGYLLKEGQRWLTEARKETVMGQPTPKTPRQLREFLGKAGFCRLFIPGFAEMAAPLYPLTKPGTLFNWGPDQQKAYQEIKQALLTAPALGLPDLTKPFELFVDEKQGYAKGVLTQKLGPWRRPVAYLSKKLDPVAAGWPPCLRMVAAIAVLTKDAGKLTMGQPLVILAPHAVEALVKQPPDRWLSNARMTHYQALLLDTDRVQFGPVVALNPATLLPLPEEGLQHNCLDILAEAHGTRPDLTDQPLPDADHTWYTDGSSLLQEGQRKAGAAVTTETEVIWAKALPAGTSAQRAELIALTQALKMAEGKKLNVYTDSRYAFATAHIHGEIYRRRGWLTSEGKEIKNKDEILALLKALFLPKRLSIIHCPGHQKGHSAEARGNRMADQAARKAAITETPDTSTLLAGKRTADGSEFEKRTADGSEFESPKKKAKVE

SEQ ID NO: 2811 - protein, 2094 aa, synthetic construct
MPAAKRVKLDGGDKKYSIGLDIGTNSVGWAVITDEYKVPSKKFKVLGNTDRHSIKKNLIGALLFDSGETAEATRLKRTARRRYTRRKNRICYLQEIFSNEMAKVDDSFFHRLEESFLVEEDKKHERHPIFGNIVDEVAYHEKYPTIYHLRKKLVDSTDKADLRLIYLALAHMIKFRGHFLIEGDLNPDNSDVDKLFIQLVQTYNQLFEENPINASGVDAKAILSARLSKSRRLENLIAQLPGEKKNGLFGNLIALSLGLTPNFKSNFDLAEDAKLQLSKDTYDDDLDNLLAQIGDQYADLFLAAKNLSDAILLSDILRVNTEITKAPLSASMIKRYDEHHQDLTLLKALVRQQLPEKYKEIFFDQSKNGYAGYIDGGASQEEFYKFIKPILEKMDGTEELLVKLNREDLLRKQRTFDNGSIPHQIHLGELHAILRRQEDFYPFLKDNREKIEKILTFRIPYYVGPLARGNSRFAWMTRKSEETITPWNFEEVVDKGASAQSFIERMTNFDKNLPNEKVLPKHSLLYEYFTVYNELTKVKYVTEGMRKPAFLSGEQKKAIVDLLFKTNRKVTVKQLKEDYFKKIECFDSVEISGVEDRFNASLGTYHDLLKIIKDKDFLDNEENEDILEDIVLTLTLFEDREMIEERLKTYAHLFDDKVMKQLKRRRYTGWGRLSRKLINGIRDKQSGKTILDFLKSDGFANRNFMQLIHDDSLTFKEDIQKAQVSGQGDSLHEHIANLAGSPAIKKGILQTVKVVDELVKVMGRHKPENIVIEMARENQTTQKGQKNSRERMKRIEEGIKELGSQILKEHPVENTQLQNEKLYLYYLQNGRDMYVDQELDINRLSDYDVDHIVPQSFLKDDSIDNKVLTRSDKARGKSDNVPSEEVVKKMKNYWRQLLNAKLITQRKFDNLTKAERGGLSELDKAGFIKRQLVETRQITKHVAQILDSRMNTKYDENDKLIREVKVITLKSKLVSDFRKDFQFYKVREINNYHHAHDAYLNAVVGTALIKKYPKLESEFVYGDYKVYDVRKMIAKSEQEIGKATAKYFFYSNIMNFFKTEITLANGEIRKRPLIETNGETGEIVWDKGRDFATVRKVLSMPQVNIVKKTEVQTGGFSKESILPKRNSDKLIARKKDWDPKKYGGFDSPTVAYSVLVVAKVEKGKSKKLKSVKELLGITIMERSSFEKNPIDFLEAKGYKEVKKDLIIKLPKYSLFELENGRKRMLASAGELQKGNELALPSKYVNFLYLASHYEKLKGSPEDNEQKQLFVEQHKHYLDEIIEQISEFSKRVILADANLDKVLSAYNKHRDKPIREQAENIIHLFTLTNLGAPAAFKYFDTTIDRKRYTSTKEVLDATLIHQSITGLYETRIDLSQLGGDGGGSSGSSGSSGGTLNIEDEHRLHETSKEPDVSLGSTWLSDFPQAWAETGGMGLAVRQAPLIIPLKATSTPVSIKQYPMSQEARLGIKPHIQRLLDQGILVPCQSPWNTPLLPVKKPGTNDYRPVQDLREVNKRVEDIHPTVPNPYNLLSGLPPSHQWYTVLDLKDAFFCLRLHPTSQPLFAFEWRDPEMGISGQLTWTRLPQGFKNSPTLFNEALHRDLADFRIQHPDLILLQYVDDLLLAATSELDCQQGTRALLQTLGNLGYRASAKKAQICQKQVKYLGYLLKEGQRWLTEARKETVMGQPTPKTPRQLREFLGKAGFCRLFIPGFAEMAAPLYPLTKPGTLFNWGPDQQKAYQEIKQALLTAPALGLPDLTKPFELFVDEKQGYAKGVLTQKLGPWRRPVAYLSKKLDPVAAGWPPCLRMVAAIAVLTKDAGKLTMGQPLVILAPHAVEALVKQPPDRWLSNARMTHYQALLLDTDRVQFGPVVALNPATLLPLPEEGLQHNCLDILAEAHGTRPDLTDQPLPDADHTWYTDGSSLLQEGQRKAGAAVTTETEVIWAKALPAGTSAQRAELIALTQALKMAEGKKLNVYTDSRYAFATAHIHGEIYRRRGWLTSEGKEIKNKDEILALLKALFLPKRLSIIHCPGHQKGHSAEARGNRMADQAARKAAITETPDTSTLLAGKRTADGSEFEKRTADGSEFESPKKKAKVE

SEQ ID NO: 2812 - protein, 2088 aa, synthetic construct
MPAAKRVKLDGGDKKYSIGLDIGTNSVGWAVITDEYKVPSKKFKVLGNTDRHSIKKNLIGALLFDSGETAEATRLKRTARRRYTRRKNRICYLQEIFSNEMAKVDDSFFHRLEESFLVEEDKKHERHPIFGNIVDEVAYHEKYPTIYHLRKKLVDSTDKADLRLIYLALAHMIKFRGHFLIEGDLNPDNSDVDKLFIQLVQTYNQLFEENPINASGVDAKAILSARLSKSRRLENLIAQLPGEKKNGLFGNLIALSLGLTPNFKSNFDLAEDAKLQLSKDTYDDDLDNLLAQIGDQYADLFLAAKNLSDAILLSDILRVNTEITKAPLSASMIKRYDEHHQDLTLLKALVRQQLPEKYKEIFFDQSKNGYAGYIDGGASQEEFYKFIKPILEKMDGTEELLVKLNREDLLRKQRTFDNGSIPHQIHLGELHAILRRQEDFYPFLKDNREKIEKILTFRIPYYVGPLARGNSRFAWMTRKSEETITPWNFEEVVDKGASAQSFIERMTNFDKNLPNEKVLPKHSLLYEYFTVYNELTKVKYVTEGMRKPAFLSGEQKKAIVDLLFKTNRKVTVKQLKEDYFKKIECFDSVEISGVEDRFNASLGTYHDLLKIIKDKDFLDNEENEDILEDIVLTLTLFEDREMIEERLKTYAHLFDDKVMKQLKRRRYTGWGRLSRKLINGIRDKQSGKTILDFLKSDGFANRNFMQLIHDDSLTFKEDIQKAQVSGQGDSLHEHIANLAGSPAIKKGILQTVKVVDELVKVMGRHKPENIVIEMARENQTTQKGQKNSRERMKRIEEGIKELGSQILKEHPVENTQLQNEKLYLYYLQNGRDMYVDQELDINRLSDYDVDHIVPQSFLKDDSIDNKVLTRSDKARGKSDNVPSEEVVKKMKNYWRQLLNAKLITQRKFDNLTKAERGGLSELDKAGFIKRQLVETRQITKHVAQILDSRMNTKYDENDKLIREVKVITLKSKLVSDFRKDFQFYKVREINNYHHAHDAYLNAVVGTALIKKYPKLESEFVYGDYKVYDVRKMIAKSEQEIGKATAKYFFYSNIMNFFKTEITLANGEIRKRPLIETNGETGEIVWDKGRDFATVRKVLSMPQVNIVKKTEVQTGGFSKESILPKRNSDKLIARKKDWDPKKYGGFDSPTVAYSVLVVAKVEKGKSKKLKSVKELLGITIMERSSFEKNPIDFLEAKGYKEVKKDLIIKLPKYSLFELENGRKRMLASAGELQKGNELALPSKYVNFLYLASHYEKLKGSPEDNEQKQLFVEQHKHYLDEIIEQISEFSKRVILADANLDKVLSAYNKHRDKPIREQAENIIHLFTLTNLGAPAAFKYFDTTIDRKRYTSTKEVLDATLIHQSITGLYETRIDLSQLGGDGGPAPGGTLNIEDEHRLHETSKEPDVSLGSTWLSDFPQAWAETGGMGLAVRQAPLIIPLKATSTPVSIKQYPMSQEARLGIKPHIQRLLDQGILVPCQSPWNTPLLPVKKPGTNDYRPVQDLREVNKRVEDIHPTVPNPYNLLSGLPPSHQWYTVLDLKDAFFCLRLHPTSQPLFAFEWRDPEMGISGQLTWTRLPQGFKNSPTLFNEALHRDLADFRIQHPDLILLQYVDDLLLAATSELDCQQGTRALLQTLGNLGYRASAKKAQICQKQVKYLGYLLKEGQRWLTEARKETVMGQPTPKTPRQLREFLGKAGFCRLFIPGFAEMAAPLYPLTKPGTLFNWGPDQQKAYQEIKQALLTAPALGLPDLTKPFELFVDEKQGYAKGVLTQKLGPWRRPVAYLSKKLDPVAAGWPPCLRMVAAIAVLTKDAGKLTMGQPLVILAPHAVEALVKQPPDRWLSNARMTHYQALLLDTDRVQFGPVVALNPATLLPLPEEGLQHNCLDILAEAHGTRPDLTDQPLPDADHTWYTDGSSLLQEGQRKAGAAVTTETEVIWAKALPAGTSAQRAELIALTQALKMAEGKKLNVYTDSRYAFATAHIHGEIYRRRGWLTSEGKEIKNKDEILALLKALFLPKRLSIIHCPGHQKGHSAEARGNRMADQAARKAAITETPDTSTLLAGKRTADGSEFEKRTADGSEFESPKKKAKVE

SEQ ID NO: 2813 - protein, 2115 aa, synthetic construct
MPAAKRVKLDGGDKKYSIGLDIGTNSVGWAVITDEYKVPSKKFKVLGNTDRHSIKKNLIGALLFDSGETAEATRLKRTARRRYTRRKNRICYLQEIFSNEMAKVDDSFFHRLEESFLVEEDKKHERHPIFGNIVDEVAYHEKYPTIYHLRKKLVDSTDKADLRLIYLALAHMIKFRGHFLIEGDLNPDNSDVDKLFIQLVQTYNQLFEENPINASGVDAKAILSARLSKSRRLENLIAQLPGEKKNGLFGNLIALSLGLTPNFKSNFDLAEDAKLQLSKDTYDDDLDNLLAQIGDQYADLFLAAKNLSDAILLSDILRVNTEITKAPLSASMIKRYDEHHQDLTLLKALVRQQLPEKYKEIFFDQSKNGYAGYIDGGASQEEFYKFIKPILEKMDGTEELLVKLNREDLLRKQRTFDNGSIPHQIHLGELHAILRRQEDFYPFLKDNREKIEKILTFRIPYYVGPLARGNSRFAWMTRKSEETITPWNFEEVVDKGASAQSFIERMTNFDKNLPNEKVLPKHSLLYEYFTVYNELTKVKYVTEGMRKPAFLSGEQKKAIVDLLFKTNRKVTVKQLKEDYFKKIECFDSVEISGVEDRFNASLGTYHDLLKIIKDKDFLDNEENEDILEDIVLTLTLFEDREMIEERLKTYAHLFDDKVMKQLKRRRYTGWGRLSRKLINGIRDKQSGKTILDFLKSDGFANRNFMQLIHDDSLTFKEDIQKAQVSGQGDSLHEHIANLAGSPAIKKGILQTVKVVDELVKVMGRHKPENIVIEMARENQTTQKGQKNSRERMKRIEEGIKELGSQILKEHPVENTQLQNEKLYLYYLQNGRDMYVDQELDINRLSDYDVDHIVPQSFLKDDSIDNKVLTRSDKARGKSDNVPSEEVVKKMKNYWRQLLNAKLITQRKFDNLTKAERGGLSELDKAGFIKRQLVETRQITKHVAQILDSRMNTKYDENDKLIREVKVITLKSKLVSDFRKDFQFYKVREINNYHHAHDAYLNAVVGTALIKKYPKLESEFVYGDYKVYDVRKMIAKSEQEIGKATAKYFFYSNIMNFFKTEITLANGEIRKRPLIETNGETGEIVWDKGRDFATVRKVLSMPQVNIVKKTEVQTGGFSKESILPKRNSDKLIARKKDWDPKKYGGFDSPTVAYSVLVVAKVEKGKSKKLKSVKELLGITIMERSSFEKNPIDFLEAKGYKEVKKDLIIKLPKYSLFELENGRKRMLASAGELQKGNELALPSKYVNFLYLASHYEKLKGSPEDNEQKQLFVEQHKHYLDEIIEQISEFSKRVILADANLDKVLSAYNKHRDKPIREQAENIIHLFTLTNLGAPAAFKYFDTTIDRKRYTSTKEVLDATLIHQSITGLYETRIDLSQLGGDGGEAAAKEAAAKEAAAKEAAAKEAAAKEAAAKGGTLNIEDEHRLHETSKEPDVSLGSTWLSDFPQAWAETGGMGLAVRQAPLIIPLKATSTPVSIKQYPMSQEARLGIKPHIQRLLDQGILVPCQSPWNTPLLPVKKPGTNDYRPVQDLREVNKRVEDIHPTVPNPYNLLSGLPPSHQWYTVLDLKDAFFCLRLHPTSQPLFAFEWRDPEMGISGQLTWTRLPQGFKNSPTLFNEALHRDLADFRIQHPDLILLQYVDDLLLAATSELDCQQGTRALLQTLGNLGYRASAKKAQICQKQVKYLGYLLKEGQRWLTEARKETVMGQPTPKTPRQLREFLGKAGFCRLFIPGFAEMAAPLYPLTKPGTLFNWGPDQQKAYQEIKQALLTAPALGLPDLTKPFELFVDEKQGYAKGVLTQKLGPWRRPVAYLSKKLDPVAAGWPPCLRMVAAIAVLTKDAGKLTMGQPLVILAPHAVEALVKQPPDRWLSNARMTHYQALLLDTDRVQFGPVVALNPATLLPLPEEGLQHNCLDILAEAHGTRPDLTDQPLPDADHTWYTDGSSLLQEGQRKAGAAVTTETEVIWAKALPAGTSAQRAELIALTQALKMAEGKKLNVYTDSRYAFATAHIHGEIYRRRGWLTSEGKEIKNKDEILALLKALFLPKRLSIIHCPGHQKGHSAEARGNRMADQAARKAAITETPDTSTLLAGKRTADGSEFEKRTADGSEFESPKKKAKVE

SEQ ID NO: 2814 - protein, 2097 aa, synthetic construct
MPAAKRVKLDGGDKKYSIGLDIGTNSVGWAVITDEYKVPSKKFKVLGNTDRHSIKKNLIGALLFDSGETAEATRLKRTARRRYTRRKNRICYLQEIFSNEMAKVDDSFFHRLEESFLVEEDKKHERHPIFGNIVDEVAYHEKYPTIYHLRKKLVDSTDKADLRLIYLALAHMIKFRGHFLIEGDLNPDNSDVDKLFIQLVQTYNQLFEENPINASGVDAKAILSARLSKSRRLENLIAQLPGEKKNGLFGNLIALSLGLTPNFKSNFDLAEDAKLQLSKDTYDDDLDNLLAQIGDQYADLFLAAKNLSDAILLSDILRVNTEITKAPLSASMIKRYDEHHQDLTLLKALVRQQLPEKYKEIFFDQSKNGYAGYIDGGASQEEFYKFIKPILEKMDGTEELLVKLNREDLLRKQRTFDNGSIPHQIHLGELHAILRRQEDFYPFLKDNREKIEKILTFRIPYYVGPLARGNSRFAWMTRKSEETITPWNFEEVVDKGASAQSFIERMTNFDKNLPNEKVLPKHSLLYEYFTVYNELTKVKYVTEGMRKPAFLSGEQKKAIVDLLFKTNRKVTVKQLKEDYFKKIECFDSVEISGVEDRFNASLGTYHDLLKIIKDKDFLDNEENEDILEDIVLTLTLFEDREMIEERLKTYAHLFDDKVMKQLKRRRYTGWGRLSRKLINGIRDKQSGKTILDFLKSDGFANRNFMQLIHDDSLTFKEDIQKAQVSGQGDSLHEHIANLAGSPAIKKGILQTVKVVDELVKVMGRHKPENIVIEMARENQTTQKGQKNSRERMKRIEEGIKELGSQILKEHPVENTQLQNEKLYLYYLQNGRDMYVDQELDINRLSDYDVDHIVPQSFLKDDSIDNKVLTRSDKARGKSDNVPSEEVVKKMKNYWRQLLNAKLITQRKFDNLTKAERGGLSELDKAGFIKRQLVETRQITKHVAQILDSRMNTKYDENDKLIREVKVITLKSKLVSDFRKDFQFYKVREINNYHHAHDAYLNAVVGTALIKKYPKLESEFVYGDYKVYDVRKMIAKSEQEIGKATAKYFFYSNIMNFFKTEITLANGEIRKRPLIETNGETGEIVWDKGRDFATVRKVLSMPQVNIVKKTEVQTGGFSKESILPKRNSDKLIARKKDWDPKKYGGFDSPTVAYSVLVVAKVEKGKSKKLKSVKELLGITIMERSSFEKNPIDFLEAKGYKEVKKDLIIKLPKYSLFELENGRKRMLASAGELQKGNELALPSKYVNFLYLASHYEKLKGSPEDNEQKQLFVEQHKHYLDEIIEQISEFSKRVILADANLDKVLSAYNKHRDKPIREQAENIIHLFTLTNLGAPAAFKYFDTTIDRKRYTSTKEVLDATLIHQSITGLYETRIDLSQLGGDGGGSAGSAAGSGEFGGTLNIEDEHRLHETSKEPDVSLGSTWLSDFPQAWAETGGMGLAVRQAPLIIPLKATSTPVSIKQYPMSQEARLGIKPHIQRLLDQGILVPCQSPWNTPLLPVKKPGTNDYRPVQDLREVNKRVEDIHPTVPNPYNLLSGLPPSHQWYTVLDLKDAFFCLRLHPTSQPLFAFEWRDPEMGISGQLTWTRLPQGFKNSPTLFNEALHRDLADFRIQHPDLILLQYVDDLLLAATSELDCQQGTRALLQTLGNLGYRASAKKAQICQKQVKYLGYLLKEGQRWLTEARKETVMGQPTPKTPRQLREFLGKAGFCRLFIPGFAEMAAPLYPLTKPGTLFNWGPDQQKAYQEIKQALLTAPALGLPDLTKPFELFVDEKQGYAKGVLTQKLGPWRRPVAYLSKKLDPVAAGWPPCLRMVAAIAVLTKDAGKLTMGQPLVILAPHAVEALVKQPPDRWLSNARMTHYQALLLDTDRVQFGPVVALNPATLLPLPEEGLQHNCLDILAEAHGTRPDLTDQPLPDADHTWYTDGSSLLQEGQRKAGAAVTTETEVIWAKALPAGTSAQRAELIALTQALKMAEGKKLNVYTDSRYAFATAHIHGEIYRRRGWLTSEGKEIKNKDEILALLKALFLPKRLSIIHCPGHQKGHSAEARGNRMADQAARKAAITETPDTSTLLAGKRTADGSEFEKRTADGSEFESPKKKAKVE

SEQ ID NO: 2815 - protein, 2096 aa, synthetic construct
MPAAKRVKLDGGDKKYSIGLDIGTNSVGWAVITDEYKVPSKKFKVLGNTDRHSIKKNLIGALLFDSGETAEATRLKRTARRRYTRRKNRICYLQEIFSNEMAKVDDSFFHRLEESFLVEEDKKHERHPIFGNIVDEVAYHEKYPTIYHLRKKLVDSTDKADLRLIYLALAHMIKFRGHFLIEGDLNPDNSDVDKLFIQLVQTYNQLFEENPINASGVDAKAILSARLSKSRRLENLIAQLPGEKKNGLFGNLIALSLGLTPNFKSNFDLAEDAKLQLSKDTYDDDLDNLLAQIGDQYADLFLAAKNLSDAILLSDILRVNTEITKAPLSASMIKRYDEHHQDLTLLKALVRQQLPEKYKEIFFDQSKNGYAGYIDGGASQEEFYKFIKPILEKMDGTEELLVKLNREDLLRKQRTFDNGSIPHQIHLGELHAILRRQEDFYPFLKDNREKIEKILTFRIPYYVGPLARGNSRFAWMTRKSEETITPWNFEEVVDKGASAQSFIERMTNFDKNLPNEKVLPKHSLLYEYFTVYNELTKVKYVTEGMRKPAFLSGEQKKAIVDLLFKTNRKVTVKQLKEDYFKKIECFDSVEISGVEDRFNASLGTYHDLLKIIKDKDFLDNEENEDILEDIVLTLTLFEDREMIEERLKTYAHLFDDKVMKQLKRRRYTGWGRLSRKLINGIRDKQSGKTILDFLKSDGFANRNFMQLIHDDSLTFKEDIQKAQVSGQGDSLHEHIANLAGSPAIKKGILQTVKVVDELVKVMGRHKPENIVIEMARENQTTQKGQKNSRERMKRIEEGIKELGSQILKEHPVENTQLQNEKLYLYYLQNGRDMYVDQELDINRLSDYDVDHIVPQSFLKDDSIDNKVLTRSDKARGKSDNVPSEEVVKKMKNYWRQLLNAKLITQRKFDNLTKAERGGLSELDKAGFIKRQLVETRQITKHVAQILDSRMNTKYDENDKLIREVKVITLKSKLVSDFRKDFQFYKVREINNYHHAHDAYLNAVVGTALIKKYPKLESEFVYGDYKVYDVRKMIAKSEQEIGKATAKYFFYSNIMNFFKTEITLANGEIRKRPLIETNGETGEIVWDKGRDFATVRKVLSMPQVNIVKKTEVQTGGFSKESILPKRNSDKLIARKKDWDPKKYGGFDSPTVAYSVLVVAKVEKGKSKKLKSVKELLGITIMERSSFEKNPIDFLEAKGYKEVKKDLIIKLPKYSLFELENGRKRMLASAGELQKGNELALPSKYVNFLYLASHYEKLKGSPEDNEQKQLFVEQHKHYLDEIIEQISEFSKRVILADANLDKVLSAYNKHRDKPIREQAENIIHLFTLTNLGAPAAFKYFDTTIDRKRYTSTKEVLDATLIHQSITGLYETRIDLSQLGGDGGEAAAKGGGGGSGGTLNIEDEHRLHETSKEPDVSLGSTWLSDFPQAWAETGGMGLAVRQAPLIIPLKATSTPVSIKQYPMSQEARLGIKPHIQRLLDQGILVPCQSPWNTPLLPVKKPGTNDYRPVQDLREVNKRVEDIHPTVPNPYNLLSGLPPSHQWYTVLDLKDAFFCLRLHPTSQPLFAFEWRDPEMGISGQLTWTRLPQGFKNSPTLFNEALHRDLADFRIQHPDLILLQYVDDLLLAATSELDCQQGTRALLQTLGNLGYRASAKKAQICQKQVKYLGYLLKEGQRWLTEARKETVMGQPTPKTPRQLREFLGKAGFCRLFIPGFAEMAAPLYPLTKPGTLFNWGPDQQKAYQEIKQALLTAPALGLPDLTKPFELFVDEKQGYAKGVLTQKLGPWRRPVAYLSKKLDPVAAGWPPCLRMVAAIAVLTKDAGKLTMGQPLVILAPHAVEALVKQPPDRWLSNARMTHYQALLLDTDRVQFGPVVALNPATLLPLPEEGLQHNCLDILAEAHGTRPDLTDQPLPDADHTWYTDGSSLLQEGQRKAGAAVTTETEVIWAKALPAGTSAQRAELIALTQALKMAEGKKLNVYTDSRYAFATAHIHGEIYRRRGWLTSEGKEIKNKDEILALLKALFLPKRLSIIHCPGHQKGHSAEARGNRMADQAARKAAITETPDTSTLLAGKRTADGSEFEKRTADGSEFESPKKKAKVE

SEQ ID NO: 2816 - protein, 2103 aa, synthetic construct
MPAAKRVKLDGGDKKYSIGLDIGTNSVGWAVITDEYKVPSKKFKVLGNTDRHSIKKNLIGALLFDSGETAEATRLKRTARRRYTRRKNRICYLQEIFSNEMAKVDDSFFHRLEESFLVEEDKKHERHPIFGNIVDEVAYHEKYPTIYHLRKKLVDSTDKADLRLIYLALAHMIKFRGHFLIEGDLNPDNSDVDKLFIQLVQTYNQLFEENPINASGVDAKAILSARLSKSRRLENLIAQLPGEKKNGLFGNLIALSLGLTPNFKSNFDLAEDAKLQLSKDTYDDDLDNLLAQIGDQYADLFLAAKNLSDAILLSDILRVNTEITKAPLSASMIKRYDEHHQDLTLLKALVRQQLPEKYKEIFFDQSKNGYAGYIDGGASQEEFYKFIKPILEKMDGTEELLVKLNREDLLRKQRTFDNGSIPHQIHLGELHAILRRQEDFYPFLKDNREKIEKILTFRIPYYVGPLARGNSRFAWMTRKSEETITPWNFEEVVDKGASAQSFIERMTNFDKNLPNEKVLPKHSLLYEYFTVYNELTKVKYVTEGMRKPAFLSGEQKKAIVDLLFKTNRKVTVKQLKEDYFKKIECFDSVEISGVEDRFNASLGTYHDLLKIIKDKDFLDNEENEDILEDIVLTLTLFEDREMIEERLKTYAHLFDDKVMKQLKRRRYTGWGRLSRKLINGIRDKQSGKTILDFLKSDGFANRNFMQLIHDDSLTFKEDIQKAQVSGQGDSLHEHIANLAGSPAIKKGILQTVKVVDELVKVMGRHKPENIVIEMARENQTTQKGQKNSRERMKRIEEGIKELGSQILKEHPVENTQLQNEKLYLYYLQNGRDMYVDQELDINRLSDYDVDHIVPQSFLKDDSIDNKVLTRSDKARGKSDNVPSEEVVKKMKNYWRQLLNAKLITQRKFDNLTKAERGGLSELDKAGFIKRQLVETRQITKHVAQILDSRMNTKYDENDKLIREVKVITLKSKLVSDFRKDFQFYKVREINNYHHAHDAYLNAVVGTALIKKYPKLESEFVYGDYKVYDVRKMIAKSEQEIGKATAKYFFYSNIMNFFKTEITLANGEIRKRPLIETNGETGEIVWDKGRDFATVRKVLSMPQVNIVKKTEVQTGGFSKESILPKRNSDKLIARKKDWDPKKYGGFDSPTVAYSVLVVAKVEKGKSKKLKSVKELLGITIMERSSFEKNPIDFLEAKGYKEVKKDLIIKLPKYSLFELENGRKRMLASAGELQKGNELALPSKYVNFLYLASHYEKLKGSPEDNEQKQLFVEQHKHYLDEIIEQISEFSKRVILADANLDKVLSAYNKHRDKPIREQAENIIHLFTLTNLGAPAAFKYFDTTIDRKRYTSTKEVLDATLIHQSITGLYETRIDLSQLGGDGGGSSGSSGSSGSSGSSGSSGGTLNIEDEHRLHETSKEPDVSLGSTWLSDFPQAWAETGGMGLAVRQAPLIIPLKATSTPVSIKQYPMSQEARLGIKPHIQRLLDQGILVPCQSPWNTPLLPVKKPGTNDYRPVQDLREVNKRVEDIHPTVPNPYNLLSGLPPSHQWYTVLDLKDAFFCLRLHPTSQPLFAFEWRDPEMGISGQLTWTRLPQGFKNSPTLFNEALHRDLADFRIQHPDLILLQYVDDLLLAATSELDCQQGTRALLQTLGNLGYRASAKKAQICQKQVKYLGYLLKEGQRWLTEARKETVMGQPTPKTPRQLREFLGKAGFCRLFIPGFAEMAAPLYPLTKPGTLFNWGPDQQKAYQEIKQALLTAPALGLPDLTKPFELFVDEKQGYAKGVLTQKLGPWRRPVAYLSKKLDPVAAGWPPCLRMVAAIAVLTKDAGKLTMGQPLVILAPHAVEALVKQPPDRWLSNARMTHYQALLLDTDRVQFGPVVALNPATLLPLPEEGLQHNCLDILAEAHGTRPDLTDQPLPDADHTWYTDGSSLLQEGQRKAGAAVTTETEVIWAKALPAGTSAQRAELIALTQALKMAEGKKLNVYTDSRYAFATAHIHGEIYRRRGWLTSEGKEIKNKDEILALLKALFLPKRLSIIHCPGHQKGHSAEARGNRMADQAARKAAITETPDTSTLLAGKRTADGSEFEKRTADGSEFESPKKKAKVE

SEQ ID NO: 2817 - protein, 2096 aa, synthetic construct
MPAAKRVKLDGGDKKYSIGLDIGTNSVGWAVITDEYKVPSKKFKVLGNTDRHSIKKNLIGALLFDSGETAEATRLKRTARRRYTRRKNRICYLQEIFSNEMAKVDDSFFHRLEESFLVEEDKKHERHPIFGNIVDEVAYHEKYPTIYHLRKKLVDSTDKADLRLIYLALAHMIKFRGHFLIEGDLNPDNSDVDKLFIQLVQTYNQLFEENPINASGVDAKAILSARLSKSRRLENLIAQLPGEKKNGLFGNLIALSLGLTPNFKSNFDLAEDAKLQLSKDTYDDDLDNLLAQIGDQYADLFLAAKNLSDAILLSDILRVNTEITKAPLSASMIKRYDEHHQDLTLLKALVRQQLPEKYKEIFFDQSKNGYAGYIDGGASQEEFYKFIKPILEKMDGTEELLVKLNREDLLRKQRTFDNGSIPHQIHLGELHAILRRQEDFYPFLKDNREKIEKILTFRIPYYVGPLARGNSRFAWMTRKSEETITPWNFEEVVDKGASAQSFIERMTNFDKNLPNEKVLPKHSLLYEYFTVYNELTKVKYVTEGMRKPAFLSGEQKKAIVDLLFKTNRKVTVKQLKEDYFKKIECFDSVEISGVEDRFNASLGTYHDLLKIIKDKDFLDNEENEDILEDIVLTLTLFEDREMIEERLKTYAHLFDDKVMKQLKRRRYTGWGRLSRKLINGIRDKQSGKTILDFLKSDGFANRNFMQLIHDDSLTFKEDIQKAQVSGQGDSLHEHIANLAGSPAIKKGILQTVKVVDELVKVMGRHKPENIVIEMARENQTTQKGQKNSRERMKRIEEGIKELGSQILKEHPVENTQLQNEKLYLYYLQNGRDMYVDQELDINRLSDYDVDHIVPQSFLKDDSIDNKVLTRSDKARGKSDNVPSEEVVKKMKNYWRQLLNAKLITQRKFDNLTKAERGGLSELDKAGFIKRQLVETRQITKHVAQILDSRMNTKYDENDKLIREVKVITLKSKLVSDFRKDFQFYKVREINNYHHAHDAYLNAVVGTALIKKYPKLESEFVYGDYKVYDVRKMIAKSEQEIGKATAKYFFYSNIMNFFKTEITLANGEIRKRPLIETNGETGEIVWDKGRDFATVRKVLSMPQVNIVKKTEVQTGGFSKESILPKRNSDKLIARKKDWDPKKYGGFDSPTVAYSVLVVAKVEKGKSKKLKSVKELLGITIMERSSFEKNPIDFLEAKGYKEVKKDLIIKLPKYSLFELENGRKRMLASAGELQKGNELALPSKYVNFLYLASHYEKLKGSPEDNEQKQLFVEQHKHYLDEIIEQISEFSKRVILADANLDKVLSAYNKHRDKPIREQAENIIHLFTLTNLGAPAAFKYFDTTIDRKRYTSTKEVLDATLIHQSITGLYETRIDLSQLGGDGGEAAAKGGSGSSGGTLNIEDEHRLHETSKEPDVSLGSTWLSDFPQAWAETGGMGLAVRQAPLIIPLKATSTPVSIKQYPMSQEARLGIKPHIQRLLDQGILVPCQSPWNTPLLPVKKPGTNDYRPVQDLREVNKRVEDIHPTVPNPYNLLSGLPPSHQWYTVLDLKDAFFCLRLHPTSQPLFAFEWRDPEMGISGQLTWTRLPQGFKNSPTLFNEALHRDLADFRIQHPDLILLQYVDDLLLAATSELDCQQGTRALLQTLGNLGYRASAKKAQICQKQVKYLGYLLKEGQRWLTEARKETVMGQPTPKTPRQLREFLGKAGFCRLFIPGFAEMAAPLYPLTKPGTLFNWGPDQQKAYQEIKQALLTAPALGLPDLTKPFELFVDEKQGYAKGVLTQKLGPWRRPVAYLSKKLDPVAAGWPPCLRMVAAIAVLTKDAGKLTMGQPLVILAPHAVEALVKQPPDRWLSNARMTHYQALLLDTDRVQFGPVVALNPATLLPLPEEGLQHNCLDILAEAHGTRPDLTDQPLPDADHTWYTDGSSLLQEGQRKAGAAVTTETEVIWAKALPAGTSAQRAELIALTQALKMAEGKKLNVYTDSRYAFATAHIHGEIYRRRGWLTSEGKEIKNKDEILALLKALFLPKRLSIIHCPGHQKGHSAEARGNRMADQAARKAAITETPDTSTLLAGKRTADGSEFEKRTADGSEFESPKKKAKVE

SEQ ID NO: 2818 - protein, 2094 aa, synthetic construct
MPAAKRVKLDGGDKKYSIGLDIGTNSVGWAVITDEYKVPSKKFKVLGNTDRHSIKKNLIGALLFDSGETAEATRLKRTARRRYTRRKNRICYLQEIFSNEMAKVDDSFFHRLEESFLVEEDKKHERHPIFGNIVDEVAYHEKYPTIYHLRKKLVDSTDKADLRLIYLALAHMIKFRGHFLIEGDLNPDNSDVDKLFIQLVQTYNQLFEENPINASGVDAKAILSARLSKSRRLENLIAQLPGEKKNGLFGNLIALSLGLTPNFKSNFDLAEDAKLQLSKDTYDDDLDNLLAQIGDQYADLFLAAKNLSDAILLSDILRVNTEITKAPLSASMIKRYDEHHQDLTLLKALVRQQLPEKYKEIFFDQSKNGYAGYIDGGASQEEFYKFIKPILEKMDGTEELLVKLNREDLLRKQRTFDNGSIPHQIHLGELHAILRRQEDFYPFLKDNREKIEKILTFRIPYYVGPLARGNSRFAWMTRKSEETITPWNFEEVVDKGASAQSFIERMTNFDKNLPNEKVLPKHSLLYEYFTVYNELTKVKYVTEGMRKPAFLSGEQKKAIVDLLFKTNRKVTVKQLKEDYFKKIECFDSVEISGVEDRFNASLGTYHDLLKIIKDKDFLDNEENEDILEDIVLTLTLFEDREMIEERLKTYAHLFDDKVMKQLKRRRYTGWGRLSRKLINGIRDKQSGKTILDFLKSDGFANRNFMQLIHDDSLTFKEDIQKAQVSGQGDSLHEHIANLAGSPAIKKGILQTVKVVDELVKVMGRHKPENIVIEMARENQTTQKGQKNSRERMKRIEEGIKELGSQILKEHPVENTQLQNEKLYLYYLQNGRDMYVDQELDINRLSDYDVDHIVPQSFLKDDSIDNKVLTRSDKARGKSDNVPSEEVVKKMKNYWRQLLNAKLITQRKFDNLTKAERGGLSELDKAGFIKRQLVETRQITKHVAQILDSRMNTKYDENDKLIREVKVITLKSKLVSDFRKDFQFYKVREINNYHHAHDAYLNAVVGTALIKKYPKLESEFVYGDYKVYDVRKMIAKSEQEIGKATAKYFFYSNIMNFFKTEITLANGEIRKRPLIETNGETGEIVWDKGRDFATVRKVLSMPQVNIVKKTEVQTGGFSKESILPKRNSDKLIARKKDWDPKKYGGFDSPTVAYSVLVVAKVEKGKSKKLKSVKELLGITIMERSSFEKNPIDFLEAKGYKEVKKDLIIKLPKYSLFELENGRKRMLASAGELQKGNELALPSKYVNFLYLASHYEKLKGSPEDNEQKQLFVEQHKHYLDEIIEQISEFSKRVILADANLDKVLSAYNKHRDKPIREQAENIIHLFTLTNLGAPAAFKYFDTTIDRKRYTSTKEVLDATLIHQSITGLYETRIDLSQLGGDGGGGSGSSGGGGGTLNIEDEHRLHETSKEPDVSLGSTWLSDFPQAWAETGGMGLAVRQAPLIIPLKATSTPVSIKQYPMSQEARLGIKPHIQRLLDQGILVPCQSPWNTPLLPVKKPGTNDYRPVQDLREVNKRVEDIHPTVPNPYNLLSGLPPSHQWYTVLDLKDAFFCLRLHPTSQPLFAFEWRDPEMGISGQLTWTRLPQGFKNSPTLFNEALHRDLADFRIQHPDLILLQYVDDLLLAATSELDCQQGTRALLQTLGNLGYRASAKKAQICQKQVKYLGYLLKEGQRWLTEARKETVMGQPTPKTPRQLREFLGKAGFCRLFIPGFAEMAAPLYPLTKPGTLFNWGPDQQKAYQEIKQALLTAPALGLPDLTKPFELFVDEKQGYAKGVLTQKLGPWRRPVAYLSKKLDPVAAGWPPCLRMVAAIAVLTKDAGKLTMGQPLVILAPHAVEALVKQPPDRWLSNARMTHYQALLLDTDRVQFGPVVALNPATLLPLPEEGLQHNCLDILAEAHGTRPDLTDQPLPDADHTWYTDGSSLLQEGQRKAGAAVTTETEVIWAKALPAGTSAQRAELIALTQALKMAEGKKLNVYTDSRYAFATAHIHGEIYRRRGWLTSEGKEIKNKDEILALLKALFLPKRLSIIHCPGHQKGHSAEARGNRMADQAARKAAITETPDTSTLLAGKRTADGSEFEKRTADGSEFESPKKKAKVE

SEQ ID NO: 2819 - protein, 2100 aa, synthetic construct
MPAAKRVKLDGGDKKYSIGLDIGTNSVGWAVITDEYKVPSKKFKVLGNTDRHSIKKNLIGALLFDSGETAEATRLKRTARRRYTRRKNRICYLQEIFSNEMAKVDDSFFHRLEESFLVEEDKKHERHPIFGNIVDEVAYHEKYPTIYHLRKKLVDSTDKADLRLIYLALAHMIKFRGHFLIEGDLNPDNSDVDKLFIQLVQTYNQLFEENPINASGVDAKAILSARLSKSRRLENLIAQLPGEKKNGLFGNLIALSLGLTPNFKSNFDLAEDAKLQLSKDTYDDDLDNLLAQIGDQYADLFLAAKNLSDAILLSDILRVNTEITKAPLSASMIKRYDEHHQDLTLLKALVRQQLPEKYKEIFFDQSKNGYAGYIDGGASQEEFYKFIKPILEKMDGTEELLVKLNREDLLRKQRTFDNGSIPHQIHLGELHAILRRQEDFYPFLKDNREKIEKILTFRIPYYVGPLARGNSRFAWMTRKSEETITPWNFEEVVDKGASAQSFIERMTNFDKNLPNEKVLPKHSLLYEYFTVYNELTKVKYVTEGMRKPAFLSGEQKKAIVDLLFKTNRKVTVKQLKEDYFKKIECFDSVEISGVEDRFNASLGTYHDLLKIIKDKDFLDNEENEDILEDIVLTLTLFEDREMIEERLKTYAHLFDDKVMKQLKRRRYTGWGRLSRKLINGIRDKQSGKTILDFLKSDGFANRNFMQLIHDDSLTFKEDIQKAQVSGQGDSLHEHIANLAGSPAIKKGILQTVKVVDELVKVMGRHKPENIVIEMARENQTTQKGQKNSRERMKRIEEGIKELGSQILKEHPVENTQLQNEKLYLYYLQNGRDMYVDQELDINRLSDYDVDHIVPQSFLKDDSIDNKVLTRSDKARGKSDNVPSEEVVKKMKNYWRQLLNAKLITQRKFDNLTKAERGGLSELDKAGFIKRQLVETRQITKHVAQILDSRMNTKYDENDKLIREVKVITLKSKLVSDFRKDFQFYKVREINNYHHAHDAYLNAVVGTALIKKYPKLESEFVYGDYKVYDVRKMIAKSEQEIGKATAKYFFYSNIMNFFKTEITLANGEIRKRPLIETNGETGEIVWDKGRDFATVRKVLSMPQVNIVKKTEVQTGGFSKESILPKRNSDKLIARKKDWDPKKYGGFDSPTVAYSVLVVAKVEKGKSKKLKSVKELLGITIMERSSFEKNPIDFLEAKGYKEVKKDLIIKLPKYSLFELENGRKRMLASAGELQKGNELALPSKYVNFLYLASHYEKLKGSPEDNEQKQLFVEQHKHYLDEIIEQISEFSKRVILADANLDKVLSAYNKHRDKPIREQAENIIHLFTLTNLGAPAAFKYFDTTIDRKRYTSTKEVLDATLIHQSITGLYETRIDLSQLGGDGGGGGGSGGGGSGGGGSGGTLNIEDEHRLHETSKEPDVSLGSTWLSDFPQAWAETGGMGLAVRQAPLIIPLKATSTPVSIKQYPMSQEARLGIKPHIQRLLDQGILVPCQSPWNTPLLPVKKPGTNDYRPVQDLREVNKRVEDIHPTVPNPYNLLSGLPPSHQWYTVLDLKDAFFCLRLHPTSQPLFAFEWRDPEMGISGQLTWTRLPQGFKNSPTLFNEALHRDLADFRIQHPDLILLQYVDDLLLAATSELDCQQGTRALLQTLGNLGYRASAKKAQICQKQVKYLGYLLKEGQRWLTEARKETVMGQPTPKTPRQLREFLGKAGFCRLFIPGFAEMAAPLYPLTKPGTLFNWGPDQQKAYQEIKQALLTAPALGLPDLTKPFELFVDEKQGYAKGVLTQKLGPWRRPVAYLSKKLDPVAAGWPPCLRMVAAIAVLTKDAGKLTMGQPLVILAPHAVEALVKQPPDRWLSNARMTHYQALLLDTDRVQFGPVVALNPATLLPLPEEGLQHNCLDILAEAHGTRPDLTDQPLPDADHTWYTDGSSLLQEGQRKAGAAVTTETEVIWAKALPAGTSAQRAELIALTQALKMAEGKKLNVYTDSRYAFATAHIHGEIYRRRGWLTSEGKEIKNKDEILALLKALFLPKRLSIIHCPGHQKGHSAEARGNRMADQAARKAAITETPDTSTLLAGKRTADGSEFEKRTADGSEFESPKKKAKVE

SEQ ID NO: 2820 - protein, 2091 aa, synthetic construct
MPAAKRVKLDGGDKKYSIGLDIGTNSVGWAVITDEYKVPSKKFKVLGNTDRHSIKKNLIGALLFDSGETAEATRLKRTARRRYTRRKNRICYLQEIFSNEMAKVDDSFFHRLEESFLVEEDKKHERHPIFGNIVDEVAYHEKYPTIYHLRKKLVDSTDKADLRLIYLALAHMIKFRGHFLIEGDLNPDNSDVDKLFIQLVQTYNQLFEENPINASGVDAKAILSARLSKSRRLENLIAQLPGEKKNGLFGNLIALSLGLTPNFKSNFDLAEDAKLQLSKDTYDDDLDNLLAQIGDQYADLFLAAKNLSDAILLSDILRVNTEITKAPLSASMIKRYDEHHQDLTLLKALVRQQLPEKYKEIFFDQSKNGYAGYIDGGASQEEFYKFIKPILEKMDGTEELLVKLNREDLLRKQRTFDNGSIPHQIHLGELHAILRRQEDFYPFLKDNREKIEKILTFRIPYYVGPLARGNSRFAWMTRKSEETITPWNFEEVVDKGASAQSFIERMTNFDKNLPNEKVLPKHSLLYEYFTVYNELTKVKYVTEGMRKPAFLSGEQKKAIVDLLFKTNRKVTVKQLKEDYFKKIECFDSVEISGVEDRFNASLGTYHDLLKIIKDKDFLDNEENEDILEDIVLTLTLFEDREMIEERLKTYAHLFDDKVMKQLKRRRYTGWGRLSRKLINGIRDKQSGKTILDFLKSDGFANRNFMQLIHDDSLTFKEDIQKAQVSGQGDSLHEHIANLAGSPAIKKGILQTVKVVDELVKVMGRHKPENIVIEMARENQTTQKGQKNSRERMKRIEEGIKELGSQILKEHPVENTQLQNEKLYLYYLQNGRDMYVDQELDINRLSDYDVDHIVPQSFLKDDSIDNKVLTRSDKARGKSDNVPSEEVVKKMKNYWRQLLNAKLITQRKFDNLTKAERGGLSELDKAGFIKRQLVETRQITKHVAQILDSRMNTKYDENDKLIREVKVITLKSKLVSDFRKDFQFYKVREINNYHHAHDAYLNAVVGTALIKKYPKLESEFVYGDYKVYDVRKMIAKSEQEIGKATAKYFFYSNIMNFFKTEITLANGEIRKRPLIETNGETGEIVWDKGRDFATVRKVLSMPQVNIVKKTEVQTGGFSKESILPKRNSDKLIARKKDWDPKKYGGFDSPTVAYSVLVVAKVEKGKSKKLKSVKELLGITIMERSSFEKNPIDFLEAKGYKEVKKDLIIKLPKYSLFELENGRKRMLASAGELQKGNELALPSKYVNFLYLASHYEKLKGSPEDNEQKQLFVEQHKHYLDEIIEQISEFSKRVILADANLDKVLSAYNKHRDKPIREQAENIIHLFTLTNLGAPAAFKYFDTTIDRKRYTSTKEVLDATLIHQSITGLYETRIDLSQLGGDGGGGGGSSGGTLNIEDEHRLHETSKEPDVSLGSTWLSDFPQAWAETGGMGLAVRQAPLIIPLKATSTPVSIKQYPMSQEARLGIKPHIQRLLDQGILVPCQSPWNTPLLPVKKPGTNDYRPVQDLREVNKRVEDIHPTVPNPYNLLSGLPPSHQWYTVLDLKDAFFCLRLHPTSQPLFAFEWRDPEMGISGQLTWTRLPQGFKNSPTLFNEALHRDLADFRIQHPDLILLQYVDDLLLAATSELDCQQGTRALLQTLGNLGYRASAKKAQICQKQVKYLGYLLKEGQRWLTEARKETVMGQPTPKTPRQLREFLGKAGFCRLFIPGFAEMAAPLYPLTKPGTLFNWGPDQQKAYQEIKQALLTAPALGLPDLTKPFELFVDEKQGYAKGVLTQKLGPWRRPVAYLSKKLDPVAAGWPPCLRMVAAIAVLTKDAGKLTMGQPLVILAPHAVEALVKQPPDRWLSNARMTHYQALLLDTDRVQFGPVVALNPATLLPLPEEGLQHNCLDILAEAHGTRPDLTDQPLPDADHTWYTDGSSLLQEGQRKAGAAVTTETEVIWAKALPAGTSAQRAELIALTQALKMAEGKKLNVYTDSRYAFATAHIHGEIYRRRGWLTSEGKEIKNKDEILALLKALFLPKRLSIIHCPGHQKGHSAEARGNRMADQAARKAAITETPDTSTLLAGKRTADGSEFEKRTADGSEFESPKKKAKVE

SEQ ID NO: 2821 - protein, 2093 aa, synthetic construct
MPAAKRVKLDGGDKKYSIGLDIGTNSVGWAVITDEYKVPSKKFKVLGNTDRHSIKKNLIGALLFDSGETAEATRLKRTARRRYTRRKNRICYLQEIFSNEMAKVDDSFFHRLEESFLVEEDKKHERHPIFGNIVDEVAYHEKYPTIYHLRKKLVDSTDKADLRLIYLALAHMIKFRGHFLIEGDLNPDNSDVDKLFIQLVQTYNQLFEENPINASGVDAKAILSARLSKSRRLENLIAQLPGEKKNGLFGNLIALSLGLTPNFKSNFDLAEDAKLQLSKDTYDDDLDNLLAQIGDQYADLFLAAKNLSDAILLSDILRVNTEITKAPLSASMIKRYDEHHQDLTLLKALVRQQLPEKYKEIFFDQSKNGYAGYIDGGASQEEFYKFIKPILEKMDGTEELLVKLNREDLLRKQRTFDNGSIPHQIHLGELHAILRRQEDFYPFLKDNREKIEKILTFRIPYYVGPLARGNSRFAWMTRKSEETITPWNFEEVVDKGASAQSFIERMTNFDKNLPNEKVLPKHSLLYEYFTVYNELTKVKYVTEGMRKPAFLSGEQKKAIVDLLFKTNRKVTVKQLKEDYFKKIECFDSVEISGVEDRFNASLGTYHDLLKIIKDKDFLDNEENEDILEDIVLTLTLFEDREMIEERLKTYAHLFDDKVMKQLKRRRYTGWGRLSRKLINGIRDKQSGKTILDFLKSDGFANRNFMQLIHDDSLTFKEDIQKAQVSGQGDSLHEHIANLAGSPAIKKGILQTVKVVDELVKVMGRHKPENIVIEMARENQTTQKGQKNSRERMKRIEEGIKELGSQILKEHPVENTQLQNEKLYLYYLQNGRDMYVDQELDINRLSDYDVDHIVPQSFLKDDSIDNKVLTRSDKARGKSDNVPSEEVVKKMKNYWRQLLNAKLITQRKFDNLTKAERGGLSELDKAGFIKRQLVETRQITKHVAQILDSRMNTKYDENDKLIREVKVITLKSKLVSDFRKDFQFYKVREINNYHHAHDAYLNAVVGTALIKKYPKLESEFVYGDYKVYDVRKMIAKSEQEIGKATAKYFFYSNIMNFFKTEITLANGEIRKRPLIETNGETGEIVWDKGRDFATVRKVLSMPQVNIVKKTEVQTGGFSKESILPKRNSDKLIARKKDWDPKKYGGFDSPTVAYSVLVVAKVEKGKSKKLKSVKELLGITIMERSSFEKNPIDFLEAKGYKEVKKDLIIKLPKYSLFELENGRKRMLASAGELQKGNELALPSKYVNFLYLASHYEKLKGSPEDNEQKQLFVEQHKHYLDEIIEQISEFSKRVILADANLDKVLSAYNKHRDKPIREQAENIIHLFTLTNLGAPAAFKYFDTTIDRKRYTSTKEVLDATLIHQSITGLYETRIDLSQLGGDGGEAAAKGSSGGTLNIEDEHRLHETSKEPDVSLGSTWLSDFPQAWAETGGMGLAVRQAPLIIPLKATSTPVSIKQYPMSQEARLGIKPHIQRLLDQGILVPCQSPWNTPLLPVKKPGTNDYRPVQDLREVNKRVEDIHPTVPNPYNLLSGLPPSHQWYTVLDLKDAFFCLRLHPTSQPLFAFEWRDPEMGISGQLTWTRLPQGFKNSPTLFNEALHRDLADFRIQHPDLILLQYVDDLLLAATSELDCQQGTRALLQTLGNLGYRASAKKAQICQKQVKYLGYLLKEGQRWLTEARKETVMGQPTPKTPRQLREFLGKAGFCRLFIPGFAEMAAPLYPLTKPGTLFNWGPDQQKAYQEIKQALLTAPALGLPDLTKPFELFVDEKQGYAKGVLTQKLGPWRRPVAYLSKKLDPVAAGWPPCLRMVAAIAVLTKDAGKLTMGQPLVILAPHAVEALVKQPPDRWLSNARMTHYQALLLDTDRVQFGPVVALNPATLLPLPEEGLQHNCLDILAEAHGTRPDLTDQPLPDADHTWYTDGSSLLQEGQRKAGAAVTTETEVIWAKALPAGTSAQRAELIALTQALKMAEGKKLNVYTDSRYAFATAHIHGEIYRRRGWLTSEGKEIKNKDEILALLKALFLPKRLSIIHCPGHQKGHSAEARGNRMADQAARKAAITETPDTSTLLAGKRTADGSEFEKRTADGSEFESPKKKAKVE

SEQ ID NO: 2822 - protein, 2096 aa, synthetic construct
MPAAKRVKLDGGDKKYSIGLDIGTNSVGWAVITDEYKVPSKKFKVLGNTDRHSIKKNLIGALLFDSGETAEATRLKRTARRRYTRRKNRICYLQEIFSNEMAKVDDSFFHRLEESFLVEEDKKHERHPIFGNIVDEVAYHEKYPTIYHLRKKLVDSTDKADLRLIYLALAHMIKFRGHFLIEGDLNPDNSDVDKLFIQLVQTYNQLFEENPINASGVDAKAILSARLSKSRRLENLIAQLPGEKKNGLFGNLIALSLGLTPNFKSNFDLAEDAKLQLSKDTYDDDLDNLLAQIGDQYADLFLAAKNLSDAILLSDILRVNTEITKAPLSASMIKRYDEHHQDLTLLKALVRQQLPEKYKEIFFDQSKNGYAGYIDGGASQEEFYKFIKPILEKMDGTEELLVKLNREDLLRKQRTFDNGSIPHQIHLGELHAILRRQEDFYPFLKDNREKIEKILTFRIPYYVGPLARGNSRFAWMTRKSEETITPWNFEEVVDKGASAQSFIERMTNFDKNLPNEKVLPKHSLLYEYFTVYNELTKVKYVTEGMRKPAFLSGEQKKAIVDLLFKTNRKVTVKQLKEDYFKKIECFDSVEISGVEDRFNASLGTYHDLLKIIKDKDFLDNEENEDILEDIVLTLTLFEDREMIEERLKTYAHLFDDKVMKQLKRRRYTGWGRLSRKLINGIRDKQSGKTILDFLKSDGFANRNFMQLIHDDSLTFKEDIQKAQVSGQGDSLHEHIANLAGSPAIKKGILQTVKVVDELVKVMGRHKPENIVIEMARENQTTQKGQKNSRERMKRIEEGIKELGSQILKEHPVENTQLQNEKLYLYYLQNGRDMYVDQELDINRLSDYDVDHIVPQSFLKDDSIDNKVLTRSDKARGKSDNVPSEEVVKKMKNYWRQLLNAKLITQRKFDNLTKAERGGLSELDKAGFIKRQLVETRQITKHVAQILDSRMNTKYDENDKLIREVKVITLKSKLVSDFRKDFQFYKVREINNYHHAHDAYLNAVVGTALIKKYPKLESEFVYGDYKVYDVRKMIAKSEQEIGKATAKYFFYSNIMNFFKTEITLANGEIRKRPLIETNGETGEIVWDKGRDFATVRKVLSMPQVNIVKKTEVQTGGFSKESILPKRNSDKLIARKKDWDPKKYGGFDSPTVAYSVLVVAKVEKGKSKKLKSVKELLGITIMERSSFEKNPIDFLEAKGYKEVKKDLIIKLPKYSLFELENGRKRMLASAGELQKGNELALPSKYVNFLYLASHYEKLKGSPEDNEQKQLFVEQHKHYLDEIIEQISEFSKRVILADANLDKVLSAYNKHRDKPIREQAENIIHLFTLTNLGAPAAFKYFDTTIDRKRYTSTKEVLDATLIHQSITGLYETRIDLSQLGGDGGPAPGGGEAAAKGGTLNIEDEHRLHETSKEPDVSLGSTWLSDFPQAWAETGGMGLAVRQAPLIIPLKATSTPVSIKQYPMSQEARLGIKPHIQRLLDQGILVPCQSPWNTPLLPVKKPGTNDYRPVQDLREVNKRVEDIHPTVPNPYNLLSGLPPSHQWYTVLDLKDAFFCLRLHPTSQPLFAFEWRDPEMGISGQLTWTRLPQGFKNSPTLFNEALHRDLADFRIQHPDLILLQYVDDLLLAATSELDCQQGTRALLQTLGNLGYRASAKKAQICQKQVKYLGYLLKEGQRWLTEARKETVMGQPTPKTPRQLREFLGKAGFCRLFIPGFAEMAAPLYPLTKPGTLFNWGPDQQKAYQEIKQALLTAPALGLPDLTKPFELFVDEKQGYAKGVLTQKLGPWRRPVAYLSKKLDPVAAGWPPCLRMVAAIAVLTKDAGKLTMGQPLVILAPHAVEALVKQPPDRWLSNARMTHYQALLLDTDRVQFGPVVALNPATLLPLPEEGLQHNCLDILAEAHGTRPDLTDQPLPDADHTWYTDGSSLLQEGQRKAGAAVTTETEVIWAKALPAGTSAQRAELIALTQALKMAEGKKLNVYTDSRYAFATAHIHGEIYRRRGWLTSEGKEIKNKDEILALLKALFLPKRLSIIHCPGHQKGHSAEARGNRMADQAARKAAITETPDTSTLLAGKRTADGSEFEKRTADGSEFESPKKKAKVE

SEQ ID NO: 2823 - protein, 2090 aa, synthetic construct
MPAAKRVKLDGGDKKYSIGLDIGTNSVGWAVITDEYKVPSKKFKVLGNTDRHSIKKNLIGALLFDSGETAEATRLKRTARRRYTRRKNRICYLQEIFSNEMAKVDDSFFHRLEESFLVEEDKKHERHPIFGNIVDEVAYHEKYPTIYHLRKKLVDSTDKADLRLIYLALAHMIKFRGHFLIEGDLNPDNSDVDKLFIQLVQTYNQLFEENPINASGVDAKAILSARLSKSRRLENLIAQLPGEKKNGLFGNLIALSLGLTPNFKSNFDLAEDAKLQLSKDTYDDDLDNLLAQIGDQYADLFLAAKNLSDAILLSDILRVNTEITKAPLSASMIKRYDEHHQDLTLLKALVRQQLPEKYKEIFFDQSKNGYAGYIDGGASQEEFYKFIKPILEKMDGTEELLVKLNREDLLRKQRTFDNGSIPHQIHLGELHAILRRQEDFYPFLKDNREKIEKILTFRIPYYVGPLARGNSRFAWMTRKSEETITPWNFEEVVDKGASAQSFIERMTNFDKNLPNEKVLPKHSLLYEYFTVYNELTKVKYVTEGMRKPAFLSGEQKKAIVDLLFKTNRKVTVKQLKEDYFKKIECFDSVEISGVEDRFNASLGTYHDLLKIIKDKDFLDNEENEDILEDIVLTLTLFEDREMIEERLKTYAHLFDDKVMKQLKRRRYTGWGRLSRKLINGIRDKQSGKTILDFLKSDGFANRNFMQLIHDDSLTFKEDIQKAQVSGQGDSLHEHIANLAGSPAIKKGILQTVKVVDELVKVMGRHKPENIVIEMARENQTTQKGQKNSRERMKRIEEGIKELGSQILKEHPVENTQLQNEKLYLYYLQNGRDMYVDQELDINRLSDYDVDHIVPQSFLKDDSIDNKVLTRSDKARGKSDNVPSEEVVKKMKNYWRQLLNAKLITQRKFDNLTKAERGGLSELDKAGFIKRQLVETRQITKHVAQILDSRMNTKYDENDKLIREVKVITLKSKLVSDFRKDFQFYKVREINNYHHAHDAYLNAVVGTALIKKYPKLESEFVYGDYKVYDVRKMIAKSEQEIGKATAKYFFYSNIMNFFKTEITLANGEIRKRPLIETNGETGEIVWDKGRDFATVRKVLSMPQVNIVKKTEVQTGGFSKESILPKRNSDKLIARKKDWDPKKYGGFDSPTVAYSVLVVAKVEKGKSKKLKSVKELLGITIMERSSFEKNPIDFLEAKGYKEVKKDLIIKLPKYSLFELENGRKRMLASAGELQKGNELALPSKYVNFLYLASHYEKLKGSPEDNEQKQLFVEQHKHYLDEIIEQISEFSKRVILADANLDKVLSAYNKHRDKPIREQAENIIHLFTLTNLGAPAAFKYFDTTIDRKRYTSTKEVLDATLIHQSITGLYETRIDLSQLGGDGGEAAAKGGTLNIEDEHRLHETSKEPDVSLGSTWLSDFPQAWAETGGMGLAVRQAPLIIPLKATSTPVSIKQYPMSQEARLGIKPHIQRLLDQGILVPCQSPWNTPLLPVKKPGTNDYRPVQDLREVNKRVEDIHPTVPNPYNLLSGLPPSHQWYTVLDLKDAFFCLRLHPTSQPLFAFEWRDPEMGISGQLTWTRLPQGFKNSPTLFNEALHRDLADFRIQHPDLILLQYVDDLLLAATSELDCQQGTRALLQTLGNLGYRASAKKAQICQKQVKYLGYLLKEGQRWLTEARKETVMGQPTPKTPRQLREFLGKAGFCRLFIPGFAEMAAPLYPLTKPGTLFNWGPDQQKAYQEIKQALLTAPALGLPDLTKPFELFVDEKQGYAKGVLTQKLGPWRRPVAYLSKKLDPVAAGWPPCLRMVAAIAVLTKDAGKLTMGQPLVILAPHAVEALVKQPPDRWLSNARMTHYQALLLDTDRVQFGPVVALNPATLLPLPEEGLQHNCLDILAEAHGTRPDLTDQPLPDADHTWYTDGSSLLQEGQRKAGAAVTTETEVIWAKALPAGTSAQRAELIALTQALKMAEGKKLNVYTDSRYAFATAHIHGEIYRRRGWLTSEGKEIKNKDEILALLKALFLPKRLSIIHCPGHQKGHSAEARGNRMADQAARKAAITETPDTSTLLAGKRTADGSEFEKRTADGSEFESPKKKAKVE

SEQ ID NO: 2824 - protein, 2088 aa, synthetic construct
MPAAKRVKLDGGDKKYSIGLDIGTNSVGWAVITDEYKVPSKKFKVLGNTDRHSIKKNLIGALLFDSGETAEATRLKRTARRRYTRRKNRICYLQEIFSNEMAKVDDSFFHRLEESFLVEEDKKHERHPIFGNIVDEVAYHEKYPTIYHLRKKLVDSTDKADLRLIYLALAHMIKFRGHFLIEGDLNPDNSDVDKLFIQLVQTYNQLFEENPINASGVDAKAILSARLSKSRRLENLIAQLPGEKKNGLFGNLIALSLGLTPNFKSNFDLAEDAKLQLSKDTYDDDLDNLLAQIGDQYADLFLAAKNLSDAILLSDILRVNTEITKAPLSASMIKRYDEHHQDLTLLKALVRQQLPEKYKEIFFDQSKNGYAGYIDGGASQEEFYKFIKPILEKMDGTEELLVKLNREDLLRKQRTFDNGSIPHQIHLGELHAILRRQEDFYPFLKDNREKIEKILTFRIPYYVGPLARGNSRFAWMTRKSEETITPWNFEEVVDKGASAQSFIERMTNFDKNLPNEKVLPKHSLLYEYFTVYNELTKVKYVTEGMRKPAFLSGEQKKAIVDLLFKTNRKVTVKQLKEDYFKKIECFDSVEISGVEDRFNASLGTYHDLLKIIKDKDFLDNEENEDILEDIVLTLTLFEDREMIEERLKTYAHLFDDKVMKQLKRRRYTGWGRLSRKLINGIRDKQSGKTILDFLKSDGFANRNFMQLIHDDSLTFKEDIQKAQVSGQGDSLHEHIANLAGSPAIKKGILQTVKVVDELVKVMGRHKPENIVIEMARENQTTQKGQKNSRERMKRIEEGIKELGSQILKEHPVENTQLQNEKLYLYYLQNGRDMYVDQELDINRLSDYDVDHIVPQSFLKDDSIDNKVLTRSDKARGKSDNVPSEEVVKKMKNYWRQLLNAKLITQRKFDNLTKAERGGLSELDKAGFIKRQLVETRQITKHVAQILDSRMNTKYDENDKLIREVKVITLKSKLVSDFRKDFQFYKVREINNYHHAHDAYLNAVVGTALIKKYPKLESEFVYGDYKVYDVRKMIAKSEQEIGKATAKYFFYSNIMNFFKTEITLANGEIRKRPLIETNGETGEIVWDKGRDFATVRKVLSMPQVNIVKKTEVQTGGFSKESILPKRNSDKLIARKKDWDPKKYGGFDSPTVAYSVLVVAKVEKGKSKKLKSVKELLGITIMERSSFEKNPIDFLEAKGYKEVKKDLIIKLPKYSLFELENGRKRMLASAGELQKGNELALPSKYVNFLYLASHYEKLKGSPEDNEQKQLFVEQHKHYLDEIIEQISEFSKRVILADANLDKVLSAYNKHRDKPIREQAENIIHLFTLTNLGAPAAFKYFDTTIDRKRYTSTKEVLDATLIHQSITGLYETRIDLSQLGGDGGGGGGGTLNIEDEHRLHETSKEPDVSLGSTWLSDFPQAWAETGGMGLAVRQAPLIIPLKATSTPVSIKQYPMSQEARLGIKPHIQRLLDQGILVPCQSPWNTPLLPVKKPGTNDYRPVQDLREVNKRVEDIHPTVPNPYNLLSGLPPSHQWYTVLDLKDAFFCLRLHPTSQPLFAFEWRDPEMGISGQLTWTRLPQGFKNSPTLFNEALHRDLADFRIQHPDLILLQYVDDLLLAATSELDCQQGTRALLQTLGNLGYRASAKKAQICQKQVKYLGYLLKEGQRWLTEARKETVMGQPTPKTPRQLREFLGKAGFCRLFIPGFAEMAAPLYPLTKPGTLFNWGPDQQKAYQEIKQALLTAPALGLPDLTKPFELFVDEKQGYAKGVLTQKLGPWRRPVAYLSKKLDPVAAGWPPCLRMVAAIAVLTKDAGKLTMGQPLVILAPHAVEALVKQPPDRWLSNARMTHYQALLLDTDRVQFGPVVALNPATLLPLPEEGLQHNCLDILAEAHGTRPDLTDQPLPDADHTWYTDGSSLLQEGQRKAGAAVTTETEVIWAKALPAGTSAQRAELIALTQALKMAEGKKLNVYTDSRYAFATAHIHGEIYRRRGWLTSEGKEIKNKDEILALLKALFLPKRLSIIHCPGHQKGHSAEARGNRMADQAARKAAITETPDTSTLLAGKRTADGSEFEKRTADGSEFESPKKKAKVE

SEQ ID NO: 2825 - protein, 2090 aa, synthetic construct
MPAAKRVKLDGGDKKYSIGLDIGTNSVGWAVITDEYKVPSKKFKVLGNTDRHSIKKNLIGALLFDSGETAEATRLKRTARRRYTRRKNRICYLQEIFSNEMAKVDDSFFHRLEESFLVEEDKKHERHPIFGNIVDEVAYHEKYPTIYHLRKKLVDSTDKADLRLIYLALAHMIKFRGHFLIEGDLNPDNSDVDKLFIQLVQTYNQLFEENPINASGVDAKAILSARLSKSRRLENLIAQLPGEKKNGLFGNLIALSLGLTPNFKSNFDLAEDAKLQLSKDTYDDDLDNLLAQIGDQYADLFLAAKNLSDAILLSDILRVNTEITKAPLSASMIKRYDEHHQDLTLLKALVRQQLPEKYKEIFFDQSKNGYAGYIDGGASQEEFYKFIKPILEKMDGTEELLVKLNREDLLRKQRTFDNGSIPHQIHLGELHAILRRQEDFYPFLKDNREKIEKILTFRIPYYVGPLARGNSRFAWMTRKSEETITPWNFEEVVDKGASAQSFIERMTNFDKNLPNEKVLPKHSLLYEYFTVYNELTKVKYVTEGMRKPAFLSGEQKKAIVDLLFKTNRKVTVKQLKEDYFKKIECFDSVEISGVEDRFNASLGTYHDLLKIIKDKDFLDNEENEDILEDIVLTLTLFEDREMIEERLKTYAHLFDDKVMKQLKRRRYTGWGRLSRKLINGIRDKQSGKTILDFLKSDGFANRNFMQLIHDDSLTFKEDIQKAQVSGQGDSLHEHIANLAGSPAIKKGILQTVKVVDELVKVMGRHKPENIVIEMARENQTTQKGQKNSRERMKRIEEGIKELGSQILKEHPVENTQLQNEKLYLYYLQNGRDMYVDQELDINRLSDYDVDHIVPQSFLKDDSIDNKVLTRSDKARGKSDNVPSEEVVKKMKNYWRQLLNAKLITQRKFDNLTKAERGGLSELDKAGFIKRQLVETRQITKHVAQILDSRMNTKYDENDKLIREVKVITLKSKLVSDFRKDFQFYKVREINNYHHAHDAYLNAVVGTALIKKYPKLESEFVYGDYKVYDVRKMIAKSEQEIGKATAKYFFYSNIMNFFKTEITLANGEIRKRPLIETNGETGEIVWDKGRDFATVRKVLSMPQVNIVKKTEVQTGGFSKESILPKRNSDKLIARKKDWDPKKYGGFDSPTVAYSVLVVAKVEKGKSKKLKSVKELLGITIMERSSFEKNPIDFLEAKGYKEVKKDLIIKLPKYSLFELENGRKRMLASAGELQKGNELALPSKYVNFLYLASHYEKLKGSPEDNEQKQLFVEQHKHYLDEIIEQISEFSKRVILADANLDKVLSAYNKHRDKPIREQAENIIHLFTLTNLGAPAAFKYFDTTIDRKRYTSTKEVLDATLIHQSITGLYETRIDLSQLGGDGGGGGGSGGTLNIEDEHRLHETSKEPDVSLGSTWLSDFPQAWAETGGMGLAVRQAPLIIPLKATSTPVSIKQYPMSQEARLGIKPHIQRLLDQGILVPCQSPWNTPLLPVKKPGTNDYRPVQDLREVNKRVEDIHPTVPNPYNLLSGLPPSHQWYTVLDLKDAFFCLRLHPTSQPLFAFEWRDPEMGISGQLTWTRLPQGFKNSPTLFNEALHRDLADFRIQHPDLILLQYVDDLLLAATSELDCQQGTRALLQTLGNLGYRASAKKAQICQKQVKYLGYLLKEGQRWLTEARKETVMGQPTPKTPRQLREFLGKAGFCRLFIPGFAEMAAPLYPLTKPGTLFNWGPDQQKAYQEIKQALLTAPALGLPDLTKPFELFVDEKQGYAKGVLTQKLGPWRRPVAYLSKKLDPVAAGWPPCLRMVAAIAVLTKDAGKLTMGQPLVILAPHAVEALVKQPPDRWLSNARMTHYQALLLDTDRVQFGPVVALNPATLLPLPEEGLQHNCLDILAEAHGTRPDLTDQPLPDADHTWYTDGSSLLQEGQRKAGAAVTTETEVIWAKALPAGTSAQRAELIALTQALKMAEGKKLNVYTDSRYAFATAHIHGEIYRRRGWLTSEGKEIKNKDEILALLKALFLPKRLSIIHCPGHQKGHSAEARGNRMADQAARKAAITETPDTSTLLAGKRTADGSEFEKRTADGSEFESPKKKAKVE

SEQ ID NO: 2826 - protein, 2096 aa, synthetic construct
MPAAKRVKLDGGDKKYSIGLDIGTNSVGWAVITDEYKVPSKKFKVLGNTDRHSIKKNLIGALLFDSGETAEATRLKRTARRRYTRRKNRICYLQEIFSNEMAKVDDSFFHRLEESFLVEEDKKHERHPIFGNIVDEVAYHEKYPTIYHLRKKLVDSTDKADLRLIYLALAHMIKFRGHFLIEGDLNPDNSDVDKLFIQLVQTYNQLFEENPINASGVDAKAILSARLSKSRRLENLIAQLPGEKKNGLFGNLIALSLGLTPNFKSNFDLAEDAKLQLSKDTYDDDLDNLLAQIGDQYADLFLAAKNLSDAILLSDILRVNTEITKAPLSASMIKRYDEHHQDLTLLKALVRQQLPEKYKEIFFDQSKNGYAGYIDGGASQEEFYKFIKPILEKMDGTEELLVKLNREDLLRKQRTFDNGSIPHQIHLGELHAILRRQEDFYPFLKDNREKIEKILTFRIPYYVGPLARGNSRFAWMTRKSEETITPWNFEEVVDKGASAQSFIERMTNFDKNLPNEKVLPKHSLLYEYFTVYNELTKVKYVTEGMRKPAFLSGEQKKAIVDLLFKTNRKVTVKQLKEDYFKKIECFDSVEISGVEDRFNASLGTYHDLLKIIKDKDFLDNEENEDILEDIVLTLTLFEDREMIEERLKTYAHLFDDKVMKQLKRRRYTGWGRLSRKLINGIRDKQSGKTILDFLKSDGFANRNFMQLIHDDSLTFKEDIQKAQVSGQGDSLHEHIANLAGSPAIKKGILQTVKVVDELVKVMGRHKPENIVIEMARENQTTQKGQKNSRERMKRIEEGIKELGSQILKEHPVENTQLQNEKLYLYYLQNGRDMYVDQELDINRLSDYDVDHIVPQSFLKDDSIDNKVLTRSDKARGKSDNVPSEEVVKKMKNYWRQLLNAKLITQRKFDNLTKAERGGLSELDKAGFIKRQLVETRQITKHVAQILDSRMNTKYDENDKLIREVKVITLKSKLVSDFRKDFQFYKVREINNYHHAHDAYLNAVVGTALIKKYPKLESEFVYGDYKVYDVRKMIAKSEQEIGKATAKYFFYSNIMNFFKTEITLANGEIRKRPLIETNGETGEIVWDKGRDFATVRKVLSMPQVNIVKKTEVQTGGFSKESILPKRNSDKLIARKKDWDPKKYGGFDSPTVAYSVLVVAKVEKGKSKKLKSVKELLGITIMERSSFEKNPIDFLEAKGYKEVKKDLIIKLPKYSLFELENGRKRMLASAGELQKGNELALPSKYVNFLYLASHYEKLKGSPEDNEQKQLFVEQHKHYLDEIIEQISEFSKRVILADANLDKVLSAYNKHRDKPIREQAENIIHLFTLTNLGAPAAFKYFDTTIDRKRYTSTKEVLDATLIHQSITGLYETRIDLSQLGGDGGGGSEAAAKGSSGGTLNIEDEHRLHETSKEPDVSLGSTWLSDFPQAWAETGGMGLAVRQAPLIIPLKATSTPVSIKQYPMSQEARLGIKPHIQRLLDQGILVPCQSPWNTPLLPVKKPGTNDYRPVQDLREVNKRVEDIHPTVPNPYNLLSGLPPSHQWYTVLDLKDAFFCLRLHPTSQPLFAFEWRDPEMGISGQLTWTRLPQGFKNSPTLFNEALHRDLADFRIQHPDLILLQYVDDLLLAATSELDCQQGTRALLQTLGNLGYRASAKKAQICQKQVKYLGYLLKEGQRWLTEARKETVMGQPTPKTPRQLREFLGKAGFCRLFIPGFAEMAAPLYPLTKPGTLFNWGPDQQKAYQEIKQALLTAPALGLPDLTKPFELFVDEKQGYAKGVLTQKLGPWRRPVAYLSKKLDPVAAGWPPCLRMVAAIAVLTKDAGKLTMGQPLVILAPHAVEALVKQPPDRWLSNARMTHYQALLLDTDRVQFGPVVALNPATLLPLPEEGLQHNCLDILAEAHGTRPDLTDQPLPDADHTWYTDGSSLLQEGQRKAGAAVTTETEVIWAKALPAGTSAQRAELIALTQALKMAEGKKLNVYTDSRYAFATAHIHGEIYRRRGWLTSEGKEIKNKDEILALLKALFLPKRLSIIHCPGHQKGHSAEARGNRMADQAARKAAITETPDTSTLLAGKRTADGSEFEKRTADGSEFESPKKKAKVE

SEQ ID NO: 2827 - protein, 2115 aa, synthetic construct
MPAAKRVKLDGGDKKYSIGLDIGTNSVGWAVITDEYKVPSKKFKVLGNTDRHSIKKNLIGALLFDSGETAEATRLKRTARRRYTRRKNRICYLQEIFSNEMAKVDDSFFHRLEESFLVEEDKKHERHPIFGNIVDEVAYHEKYPTIYHLRKKLVDSTDKADLRLIYLALAHMIKFRGHFLIEGDLNPDNSDVDKLFIQLVQTYNQLFEENPINASGVDAKAILSARLSKSRRLENLIAQLPGEKKNGLFGNLIALSLGLTPNFKSNFDLAEDAKLQLSKDTYDDDLDNLLAQIGDQYADLFLAAKNLSDAILLSDILRVNTEITKAPLSASMIKRYDEHHQDLTLLKALVRQQLPEKYKEIFFDQSKNGYAGYIDGGASQEEFYKFIKPILEKMDGTEELLVKLNREDLLRKQRTFDNGSIPHQIHLGELHAILRRQEDFYPFLKDNREKIEKILTFRIPYYVGPLARGNSRFAWMTRKSEETITPWNFEEVVDKGASAQSFIERMTNFDKNLPNEKVLPKHSLLYEYFTVYNELTKVKYVTEGMRKPAFLSGEQKKAIVDLLFKTNRKVTVKQLKEDYFKKIECFDSVEISGVEDRFNASLGTYHDLLKIIKDKDFLDNEENEDILEDIVLTLTLFEDREMIEERLKTYAHLFDDKVMKQLKRRRYTGWGRLSRKLINGIRDKQSGKTILDFLKSDGFANRNFMQLIHDDSLTFKEDIQKAQVSGQGDSLHEHIANLAGSPAIKKGILQTVKVVDELVKVMGRHKPENIVIEMARENQTTQKGQKNSRERMKRIEEGIKELGSQILKEHPVENTQLQNEKLYLYYLQNGRDMYVDQELDINRLSDYDVDHIVPQSFLKDDSIDNKVLTRSDKARGKSDNVPSEEVVKKMKNYWRQLLNAKLITQRKFDNLTKAERGGLSELDKAGFIKRQLVETRQITKHVAQILDSRMNTKYDENDKLIREVKVITLKSKLVSDFRKDFQFYKVREINNYHHAHDAYLNAVVGTALIKKYPKLESEFVYGDYKVYDVRKMIAKSEQEIGKATAKYFFYSNIMNFFKTEITLANGEIRKRPLIETNGETGEIVWDKGRDFATVRKVLSMPQVNIVKKTEVQTGGFSKESILPKRNSDKLIARKKDWDPKKYGGFDSPTVAYSVLVVAKVEKGKSKKLKSVKELLGITIMERSSFEKNPIDFLEAKGYKEVKKDLIIKLPKYSLFELENGRKRMLASAGELQKGNELALPSKYVNFLYLASHYEKLKGSPEDNEQKQLFVEQHKHYLDEIIEQISEFSKRVILADANLDKVLSAYNKHRDKPIREQAENIIHLFTLTNLGAPAAFKYFDTTIDRKRYTSTKEVLDATLIHQSITGLYETRIDLSQLGGDGGGGGGSGGGGSGGGGSGGGGSGGGGSGGGGSGGTLNIEDEHRLHETSKEPDVSLGSTWLSDFPQAWAETGGMGLAVRQAPLIIPLKATSTPVSIKQYPMSQEARLGIKPHIQRLLDQGILVPCQSPWNTPLLPVKKPGTNDYRPVQDLREVNKRVEDIHPTVPNPYNLLSGLPPSHQWYTVLDLKDAFFCLRLHPTSQPLFAFEWRDPEMGISGQLTWTRLPQGFKNSPTLFNEALHRDLADFRIQHPDLILLQYVDDLLLAATSELDCQQGTRALLQTLGNLGYRASAKKAQICQKQVKYLGYLLKEGQRWLTEARKETVMGQPTPKTPRQLREFLGKAGFCRLFIPGFAEMAAPLYPLTKPGTLFNWGPDQQKAYQEIKQALLTAPALGLPDLTKPFELFVDEKQGYAKGVLTQKLGPWRRPVAYLSKKLDPVAAGWPPCLRMVAAIAVLTKDAGKLTMGQPLVILAPHAVEALVKQPPDRWLSNARMTHYQALLLDTDRVQFGPVVALNPATLLPLPEEGLQHNCLDILAEAHGTRPDLTDQPLPDADHTWYTDGSSLLQEGQRKAGAAVTTETEVIWAKALPAGTSAQRAELIALTQALKMAEGKKLNVYTDSRYAFATAHIHGEIYRRRGWLTSEGKEIKNKDEILALLKALFLPKRLSIIHCPGHQKGHSAEARGNRMADQAARKAAITETPDTSTLLAGKRTADGSEFEKRTADGSEFESPKKKAKVE

SEQ ID NO: 2828 - protein, 2093 aa, synthetic construct
MPAAKRVKLDGGDKKYSIGLDIGTNSVGWAVITDEYKVPSKKFKVLGNTDRHSIKKNLIGALLFDSGETAEATRLKRTARRRYTRRKNRICYLQEIFSNEMAKVDDSFFHRLEESFLVEEDKKHERHPIFGNIVDEVAYHEKYPTIYHLRKKLVDSTDKADLRLIYLALAHMIKFRGHFLIEGDLNPDNSDVDKLFIQLVQTYNQLFEENPINASGVDAKAILSARLSKSRRLENLIAQLPGEKKNGLFGNLIALSLGLTPNFKSNFDLAEDAKLQLSKDTYDDDLDNLLAQIGDQYADLFLAAKNLSDAILLSDILRVNTEITKAPLSASMIKRYDEHHQDLTLLKALVRQQLPEKYKEIFFDQSKNGYAGYIDGGASQEEFYKFIKPILEKMDGTEELLVKLNREDLLRKQRTFDNGSIPHQIHLGELHAILRRQEDFYPFLKDNREKIEKILTFRIPYYVGPLARGNSRFAWMTRKSEETITPWNFEEVVDKGASAQSFIERMTNFDKNLPNEKVLPKHSLLYEYFTVYNELTKVKYVTEGMRKPAFLSGEQKKAIVDLLFKTNRKVTVKQLKEDYFKKIECFDSVEISGVEDRFNASLGTYHDLLKIIKDKDFLDNEENEDILEDIVLTLTLFEDREMIEERLKTYAHLFDDKVMKQLKRRRYTGWGRLSRKLINGIRDKQSGKTILDFLKSDGFANRNFMQLIHDDSLTFKEDIQKAQVSGQGDSLHEHIANLAGSPAIKKGILQTVKVVDELVKVMGRHKPENIVIEMARENQTTQKGQKNSRERMKRIEEGIKELGSQILKEHPVENTQLQNEKLYLYYLQNGRDMYVDQELDINRLSDYDVDHIVPQSFLKDDSIDNKVLTRSDKARGKSDNVPSEEVVKKMKNYWRQLLNAKLITQRKFDNLTKAERGGLSELDKAGFIKRQLVETRQITKHVAQILDSRMNTKYDENDKLIREVKVITLKSKLVSDFRKDFQFYKVREINNYHHAHDAYLNAVVGTALIKKYPKLESEFVYGDYKVYDVRKMIAKSEQEIGKATAKYFFYSNIMNFFKTEITLANGEIRKRPLIETNGETGEIVWDKGRDFATVRKVLSMPQVNIVKKTEVQTGGFSKESILPKRNSDKLIARKKDWDPKKYGGFDSPTVAYSVLVVAKVEKGKSKKLKSVKELLGITIMERSSFEKNPIDFLEAKGYKEVKKDLIIKLPKYSLFELENGRKRMLASAGELQKGNELALPSKYVNFLYLASHYEKLKGSPEDNEQKQLFVEQHKHYLDEIIEQISEFSKRVILADANLDKVLSAYNKHRDKPIREQAENIIHLFTLTNLGAPAAFKYFDTTIDRKRYTSTKEVLDATLIHQSITGLYETRIDLSQLGGDGGGSSEAAAKGGTLNIEDEHRLHETSKEPDVSLGSTWLSDFPQAWAETGGMGLAVRQAPLIIPLKATSTPVSIKQYPMSQEARLGIKPHIQRLLDQGILVPCQSPWNTPLLPVKKPGTNDYRPVQDLREVNKRVEDIHPTVPNPYNLLSGLPPSHQWYTVLDLKDAFFCLRLHPTSQPLFAFEWRDPEMGISGQLTWTRLPQGFKNSPTLFNEALHRDLADFRIQHPDLILLQYVDDLLLAATSELDCQQGTRALLQTLGNLGYRASAKKAQICQKQVKYLGYLLKEGQRWLTEARKETVMGQPTPKTPRQLREFLGKAGFCRLFIPGFAEMAAPLYPLTKPGTLFNWGPDQQKAYQEIKQALLTAPALGLPDLTKPFELFVDEKQGYAKGVLTQKLGPWRRPVAYLSKKLDPVAAGWPPCLRMVAAIAVLTKDAGKLTMGQPLVILAPHAVEALVKQPPDRWLSNARMTHYQALLLDTDRVQFGPVVALNPATLLPLPEEGLQHNCLDILAEAHGTRPDLTDQPLPDADHTWYTDGSSLLQEGQRKAGAAVTTETEVIWAKALPAGTSAQRAELIALTQALKMAEGKKLNVYTDSRYAFATAHIHGEIYRRRGWLTSEGKEIKNKDEILALLKALFLPKRLSIIHCPGHQKGHSAEARGNRMADQAARKAAITETPDTSTLLAGKRTADGSEFEKRTADGSEFESPKKKAKVE

SEQ ID NO: 2829 - protein, 2096 aa, synthetic construct
MPAAKRVKLDGGDKKYSIGLDIGTNSVGWAVITDEYKVPSKKFKVLGNTDRHSIKKNLIGALLFDSGETAEATRLKRTARRRYTRRKNRICYLQEIFSNEMAKVDDSFFHRLEESFLVEEDKKHERHPIFGNIVDEVAYHEKYPTIYHLRKKLVDSTDKADLRLIYLALAHMIKFRGHFLIEGDLNPDNSDVDKLFIQLVQTYNQLFEENPINASGVDAKAILSARLSKSRRLENLIAQLPGEKKNGLFGNLIALSLGLTPNFKSNFDLAEDAKLQLSKDTYDDDLDNLLAQIGDQYADLFLAAKNLSDAILLSDILRVNTEITKAPLSASMIKRYDEHHQDLTLLKALVRQQLPEKYKEIFFDQSKNGYAGYIDGGASQEEFYKFIKPILEKMDGTEELLVKLNREDLLRKQRTFDNGSIPHQIHLGELHAILRRQEDFYPFLKDNREKIEKILTFRIPYYVGPLARGNSRFAWMTRKSEETITPWNFEEVVDKGASAQSFIERMTNFDKNLPNEKVLPKHSLLYEYFTVYNELTKVKYVTEGMRKPAFLSGEQKKAIVDLLFKTNRKVTVKQLKEDYFKKIECFDSVEISGVEDRFNASLGTYHDLLKIIKDKDFLDNEENEDILEDIVLTLTLFEDREMIEERLKTYAHLFDDKVMKQLKRRRYTGWGRLSRKLINGIRDKQSGKTILDFLKSDGFANRNFMQLIHDDSLTFKEDIQKAQVSGQGDSLHEHIANLAGSPAIKKGILQTVKVVDELVKVMGRHKPENIVIEMARENQTTQKGQKNSRERMKRIEEGIKELGSQILKEHPVENTQLQNEKLYLYYLQNGRDMYVDQELDINRLSDYDVDHIVPQSFLKDDSIDNKVLTRSDKARGKSDNVPSEEVVKKMKNYWRQLLNAKLITQRKFDNLTKAERGGLSELDKAGFIKRQLVETRQITKHVAQILDSRMNTKYDENDKLIREVKVITLKSKLVSDFRKDFQFYKVREINNYHHAHDAYLNAVVGTALIKKYPKLESEFVYGDYKVYDVRKMIAKSEQEIGKATAKYFFYSNIMNFFKTEITLANGEIRKRPLIETNGETGEIVWDKGRDFATVRKVLSMPQVNIVKKTEVQTGGFSKESILPKRNSDKLIARKKDWDPKKYGGFDSPTVAYSVLVVAKVEKGKSKKLKSVKELLGITIMERSSFEKNPIDFLEAKGYKEVKKDLIIKLPKYSLFELENGRKRMLASAGELQKGNELALPSKYVNFLYLASHYEKLKGSPEDNEQKQLFVEQHKHYLDEIIEQISEFSKRVILADANLDKVLSAYNKHRDKPIREQAENIIHLFTLTNLGAPAAFKYFDTTIDRKRYTSTKEVLDATLIHQSITGLYETRIDLSQLGGDGGPAPEAAAKGGSGGTLNIEDEHRLHETSKEPDVSLGSTWLSDFPQAWAETGGMGLAVRQAPLIIPLKATSTPVSIKQYPMSQEARLGIKPHIQRLLDQGILVPCQSPWNTPLLPVKKPGTNDYRPVQDLREVNKRVEDIHPTVPNPYNLLSGLPPSHQWYTVLDLKDAFFCLRLHPTSQPLFAFEWRDPEMGISGQLTWTRLPQGFKNSPTLFNEALHRDLADFRIQHPDLILLQYVDDLLLAATSELDCQQGTRALLQTLGNLGYRASAKKAQICQKQVKYLGYLLKEGQRWLTEARKETVMGQPTPKTPRQLREFLGKAGFCRLFIPGFAEMAAPLYPLTKPGTLFNWGPDQQKAYQEIKQALLTAPALGLPDLTKPFELFVDEKQGYAKGVLTQKLGPWRRPVAYLSKKLDPVAAGWPPCLRMVAAIAVLTKDAGKLTMGQPLVILAPHAVEALVKQPPDRWLSNARMTHYQALLLDTDRVQFGPVVALNPATLLPLPEEGLQHNCLDILAEAHGTRPDLTDQPLPDADHTWYTDGSSLLQEGQRKAGAAVTTETEVIWAKALPAGTSAQRAELIALTQALKMAEGKKLNVYTDSRYAFATAHIHGEIYRRRGWLTSEGKEIKNKDEILALLKALFLPKRLSIIHCPGHQKGHSAEARGNRMADQAARKAAITETPDTSTLLAGKRTADGSEFEKRTADGSEFESPKKKAKVE

SEQ ID NO: 2830 - protein, 2096 aa, synthetic construct
MPAAKRVKLDGGDKKYSIGLDIGTNSVGWAVITDEYKVPSKKFKVLGNTDRHSIKKNLIGALLFDSGETAEATRLKRTARRRYTRRKNRICYLQEIFSNEMAKVDDSFFHRLEESFLVEEDKKHERHPIFGNIVDEVAYHEKYPTIYHLRKKLVDSTDKADLRLIYLALAHMIKFRGHFLIEGDLNPDNSDVDKLFIQLVQTYNQLFEENPINASGVDAKAILSARLSKSRRLENLIAQLPGEKKNGLFGNLIALSLGLTPNFKSNFDLAEDAKLQLSKDTYDDDLDNLLAQIGDQYADLFLAAKNLSDAILLSDILRVNTEITKAPLSASMIKRYDEHHQDLTLLKALVRQQLPEKYKEIFFDQSKNGYAGYIDGGASQEEFYKFIKPILEKMDGTEELLVKLNREDLLRKQRTFDNGSIPHQIHLGELHAILRRQEDFYPFLKDNREKIEKILTFRIPYYVGPLARGNSRFAWMTRKSEETITPWNFEEVVDKGASAQSFIERMTNFDKNLPNEKVLPKHSLLYEYFTVYNELTKVKYVTEGMRKPAFLSGEQKKAIVDLLFKTNRKVTVKQLKEDYFKKIECFDSVEISGVEDRFNASLGTYHDLLKIIKDKDFLDNEENEDILEDIVLTLTLFEDREMIEERLKTYAHLFDDKVMKQLKRRRYTGWGRLSRKLINGIRDKQSGKTILDFLKSDGFANRNFMQLIHDDSLTFKEDIQKAQVSGQGDSLHEHIANLAGSPAIKKGILQTVKVVDELVKVMGRHKPENIVIEMARENQTTQKGQKNSRERMKRIEEGIKELGSQILKEHPVENTQLQNEKLYLYYLQNGRDMYVDQELDINRLSDYDVDHIVPQSFLKDDSIDNKVLTRSDKARGKSDNVPSEEVVKKMKNYWRQLLNAKLITQRKFDNLTKAERGGLSELDKAGFIKRQLVETRQITKHVAQILDSRMNTKYDENDKLIREVKVITLKSKLVSDFRKDFQFYKVREINNYHHAHDAYLNAVVGTALIKKYPKLESEFVYGDYKVYDVRKMIAKSEQEIGKATAKYFFYSNIMNFFKTEITLANGEIRKRPLIETNGETGEIVWDKGRDFATVRKVLSMPQVNIVKKTEVQTGGFSKESILPKRNSDKLIARKKDWDPKKYGGFDSPTVAYSVLVVAKVEKGKSKKLKSVKELLGITIMERSSFEKNPIDFLEAKGYKEVKKDLIIKLPKYSLFELENGRKRMLASAGELQKGNELALPSKYVNFLYLASHYEKLKGSPEDNEQKQLFVEQHKHYLDEIIEQISEFSKRVILADANLDKVLSAYNKHRDKPIREQAENIIHLFTLTNLGAPAAFKYFDTTIDRKRYTSTKEVLDATLIHQSITGLYETRIDLSQLGGDGGGGGEAAAKPAPGGTLNIEDEHRLHETSKEPDVSLGSTWLSDFPQAWAETGGMGLAVRQAPLIIPLKATSTPVSIKQYPMSQEARLGIKPHIQRLLDQGILVPCQSPWNTPLLPVKKPGTNDYRPVQDLREVNKRVEDIHPTVPNPYNLLSGLPPSHQWYTVLDLKDAFFCLRLHPTSQPLFAFEWRDPEMGISGQLTWTRLPQGFKNSPTLFNEALHRDLADFRIQHPDLILLQYVDDLLLAATSELDCQQGTRALLQTLGNLGYRASAKKAQICQKQVKYLGYLLKEGQRWLTEARKETVMGQPTPKTPRQLREFLGKAGFCRLFIPGFAEMAAPLYPLTKPGTLFNWGPDQQKAYQEIKQALLTAPALGLPDLTKPFELFVDEKQGYAKGVLTQKLGPWRRPVAYLSKKLDPVAAGWPPCLRMVAAIAVLTKDAGKLTMGQPLVILAPHAVEALVKQPPDRWLSNARMTHYQALLLDTDRVQFGPVVALNPATLLPLPEEGLQHNCLDILAEAHGTRPDLTDQPLPDADHTWYTDGSSLLQEGQRKAGAAVTTETEVIWAKALPAGTSAQRAELIALTQALKMAEGKKLNVYTDSRYAFATAHIHGEIYRRRGWLTSEGKEIKNKDEILALLKALFLPKRLSIIHCPGHQKGHSAEARGNRMADQAARKAAITETPDTSTLLAGKRTADGSEFEKRTADGSEFESPKKKAKVE

SEQ ID NO: 2831 - protein, 2096 aa, synthetic construct
MPAAKRVKLDGGDKKYSIGLDIGTNSVGWAVITDEYKVPSKKFKVLGNTDRHSIKKNLIGALLFDSGETAEATRLKRTARRRYTRRKNRICYLQEIFSNEMAKVDDSFFHRLEESFLVEEDKKHERHPIFGNIVDEVAYHEKYPTIYHLRKKLVDSTDKADLRLIYLALAHMIKFRGHFLIEGDLNPDNSDVDKLFIQLVQTYNQLFEENPINASGVDAKAILSARLSKSRRLENLIAQLPGEKKNGLFGNLIALSLGLTPNFKSNFDLAEDAKLQLSKDTYDDDLDNLLAQIGDQYADLFLAAKNLSDAILLSDILRVNTEITKAPLSASMIKRYDEHHQDLTLLKALVRQQLPEKYKEIFFDQSKNGYAGYIDGGASQEEFYKFIKPILEKMDGTEELLVKLNREDLLRKQRTFDNGSIPHQIHLGELHAILRRQEDFYPFLKDNREKIEKILTFRIPYYVGPLARGNSRFAWMTRKSEETITPWNFEEVVDKGASAQSFIERMTNFDKNLPNEKVLPKHSLLYEYFTVYNELTKVKYVTEGMRKPAFLSGEQKKAIVDLLFKTNRKVTVKQLKEDYFKKIECFDSVEISGVEDRFNASLGTYHDLLKIIKDKDFLDNEENEDILEDIVLTLTLFEDREMIEERLKTYAHLFDDKVMKQLKRRRYTGWGRLSRKLINGIRDKQSGKTILDFLKSDGFANRNFMQLIHDDSLTFKEDIQKAQVSGQGDSLHEHIANLAGSPAIKKGILQTVKVVDELVKVMGRHKPENIVIEMARENQTTQKGQKNSRERMKRIEEGIKELGSQILKEHPVENTQLQNEKLYLYYLQNGRDMYVDQELDINRLSDYDVDHIVPQSFLKDDSIDNKVLTRSDKARGKSDNVPSEEVVKKMKNYWRQLLNAKLITQRKFDNLTKAERGGLSELDKAGFIKRQLVETRQITKHVAQILDSRMNTKYDENDKLIREVKVITLKSKLVSDFRKDFQFYKVREINNYHHAHDAYLNAVVGTALIKKYPKLESEFVYGDYKVYDVRKMIAKSEQEIGKATAKYFFYSNIMNFFKTEITLANGEIRKRPLIETNGETGEIVWDKGRDFATVRKVLSMPQVNIVKKTEVQTGGFSKESILPKRNSDKLIARKKDWDPKKYGGFDSPTVAYSVLVVAKVEKGKSKKLKSVKELLGITIMERSSFEKNPIDFLEAKGYKEVKKDLIIKLPKYSLFELENGRKRMLASAGELQKGNELALPSKYVNFLYLASHYEKLKGSPEDNEQKQLFVEQHKHYLDEIIEQISEFSKRVILADANLDKVLSAYNKHRDKPIREQAENIIHLFTLTNLGAPAAFKYFDTTIDRKRYTSTKEVLDATLIHQSITGLYETRIDLSQLGGDGGGGGGSSEAAAKGGTLNIEDEHRLHETSKEPDVSLGSTWLSDFPQAWAETGGMGLAVRQAPLIIPLKATSTPVSIKQYPMSQEARLGIKPHIQRLLDQGILVPCQSPWNTPLLPVKKPGTNDYRPVQDLREVNKRVEDIHPTVPNPYNLLSGLPPSHQWYTVLDLKDAFFCLRLHPTSQPLFAFEWRDPEMGISGQLTWTRLPQGFKNSPTLFNEALHRDLADFRIQHPDLILLQYVDDLLLAATSELDCQQGTRALLQTLGNLGYRASAKKAQICQKQVKYLGYLLKEGQRWLTEARKETVMGQPTPKTPRQLREFLGKAGFCRLFIPGFAEMAAPLYPLTKPGTLFNWGPDQQKAYQEIKQALLTAPALGLPDLTKPFELFVDEKQGYAKGVLTQKLGPWRRPVAYLSKKLDPVAAGWPPCLRMVAAIAVLTKDAGKLTMGQPLVILAPHAVEALVKQPPDRWLSNARMTHYQALLLDTDRVQFGPVVALNPATLLPLPEEGLQHNCLDILAEAHGTRPDLTDQPLPDADHTWYTDGSSLLQEGQRKAGAAVTTETEVIWAKALPAGTSAQRAELIALTQALKMAEGKKLNVYTDSRYAFATAHIHGEIYRRRGWLTSEGKEIKNKDEILALLKALFLPKRLSIIHCPGHQKGHSAEARGNRMADQAARKAAITETPDTSTLLAGKRTADGSEFEKRTADGSEFESPKKKAKVE

SEQ ID NO: 2832 - protein, 2091 aa, synthetic construct
MPAAKRVKLDGGDKKYSIGLDIGTNSVGWAVITDEYKVPSKKFKVLGNTDRHSIKKNLIGALLFDSGETAEATRLKRTARRRYTRRKNRICYLQEIFSNEMAKVDDSFFHRLEESFLVEEDKKHERHPIFGNIVDEVAYHEKYPTIYHLRKKLVDSTDKADLRLIYLALAHMIKFRGHFLIEGDLNPDNSDVDKLFIQLVQTYNQLFEENPINASGVDAKAILSARLSKSRRLENLIAQLPGEKKNGLFGNLIALSLGLTPNFKSNFDLAEDAKLQLSKDTYDDDLDNLLAQIGDQYADLFLAAKNLSDAILLSDILRVNTEITKAPLSASMIKRYDEHHQDLTLLKALVRQQLPEKYKEIFFDQSKNGYAGYIDGGASQEEFYKFIKPILEKMDGTEELLVKLNREDLLRKQRTFDNGSIPHQIHLGELHAILRRQEDFYPFLKDNREKIEKILTFRIPYYVGPLARGNSRFAWMTRKSEETITPWNFEEVVDKGASAQSFIERMTNFDKNLPNEKVLPKHSLLYEYFTVYNELTKVKYVTEGMRKPAFLSGEQKKAIVDLLFKTNRKVTVKQLKEDYFKKIECFDSVEISGVEDRFNASLGTYHDLLKIIKDKDFLDNEENEDILEDIVLTLTLFEDREMIEERLKTYAHLFDDKVMKQLKRRRYTGWGRLSRKLINGIRDKQSGKTILDFLKSDGFANRNFMQLIHDDSLTFKEDIQKAQVSGQGDSLHEHIANLAGSPAIKKGILQTVKVVDELVKVMGRHKPENIVIEMARENQTTQKGQKNSRERMKRIEEGIKELGSQILKEHPVENTQLQNEKLYLYYLQNGRDMYVDQELDINRLSDYDVDHIVPQSFLKDDSIDNKVLTRSDKARGKSDNVPSEEVVKKMKNYWRQLLNAKLITQRKFDNLTKAERGGLSELDKAGFIKRQLVETRQITKHVAQILDSRMNTKYDENDKLIREVKVITLKSKLVSDFRKDFQFYKVREINNYHHAHDAYLNAVVGTALIKKYPKLESEFVYGDYKVYDVRKMIAKSEQEIGKATAKYFFYSNIMNFFKTEITLANGEIRKRPLIETNGETGEIVWDKGRDFATVRKVLSMPQVNIVKKTEVQTGGFSKESILPKRNSDKLIARKKDWDPKKYGGFDSPTVAYSVLVVAKVEKGKSKKLKSVKELLGITIMERSSFEKNPIDFLEAKGYKEVKKDLIIKLPKYSLFELENGRKRMLASAGELQKGNELALPSKYVNFLYLASHYEKLKGSPEDNEQKQLFVEQHKHYLDEIIEQISEFSKRVILADANLDKVLSAYNKHRDKPIREQAENIIHLFTLTNLGAPAAFKYFDTTIDRKRYTSTKEVLDATLIHQSITGLYETRIDLSQLGGDGGGSSGSSGGTLNIEDEHRLHETSKEPDVSLGSTWLSDFPQAWAETGGMGLAVRQAPLIIPLKATSTPVSIKQYPMSQEARLGIKPHIQRLLDQGILVPCQSPWNTPLLPVKKPGTNDYRPVQDLREVNKRVEDIHPTVPNPYNLLSGLPPSHQWYTVLDLKDAFFCLRLHPTSQPLFAFEWRDPEMGISGQLTWTRLPQGFKNSPTLFNEALHRDLADFRIQHPDLILLQYVDDLLLAATSELDCQQGTRALLQTLGNLGYRASAKKAQICQKQVKYLGYLLKEGQRWLTEARKETVMGQPTPKTPRQLREFLGKAGFCRLFIPGFAEMAAPLYPLTKPGTLFNWGPDQQKAYQEIKQALLTAPALGLPDLTKPFELFVDEKQGYAKGVLTQKLGPWRRPVAYLSKKLDPVAAGWPPCLRMVAAIAVLTKDAGKLTMGQPLVILAPHAVEALVKQPPDRWLSNARMTHYQALLLDTDRVQFGPVVALNPATLLPLPEEGLQHNCLDILAEAHGTRPDLTDQPLPDADHTWYTDGSSLLQEGQRKAGAAVTTETEVIWAKALPAGTSAQRAELIALTQALKMAEGKKLNVYTDSRYAFATAHIHGEIYRRRGWLTSEGKEIKNKDEILALLKALFLPKRLSIIHCPGHQKGHSAEARGNRMADQAARKAAITETPDTSTLLAGKRTADGSEFEKRTADGSEFESPKKKAKVE

SEQ ID NO: 2833 - protein, 2094 aa, synthetic construct
MPAAKRVKLDGGDKKYSIGLDIGTNSVGWAVITDEYKVPSKKFKVLGNTDRHSIKKNLIGALLFDSGETAEATRLKRTARRRYTRRKNRICYLQEIFSNEMAKVDDSFFHRLEESFLVEEDKKHERHPIFGNIVDEVAYHEKYPTIYHLRKKLVDSTDKADLRLIYLALAHMIKFRGHFLIEGDLNPDNSDVDKLFIQLVQTYNQLFEENPINASGVDAKAILSARLSKSRRLENLIAQLPGEKKNGLFGNLIALSLGLTPNFKSNFDLAEDAKLQLSKDTYDDDLDNLLAQIGDQYADLFLAAKNLSDAILLSDILRVNTEITKAPLSASMIKRYDEHHQDLTLLKALVRQQLPEKYKEIFFDQSKNGYAGYIDGGASQEEFYKFIKPILEKMDGTEELLVKLNREDLLRKQRTFDNGSIPHQIHLGELHAILRRQEDFYPFLKDNREKIEKILTFRIPYYVGPLARGNSRFAWMTRKSEETITPWNFEEVVDKGASAQSFIERMTNFDKNLPNEKVLPKHSLLYEYFTVYNELTKVKYVTEGMRKPAFLSGEQKKAIVDLLFKTNRKVTVKQLKEDYFKKIECFDSVEISGVEDRFNASLGTYHDLLKIIKDKDFLDNEENEDILEDIVLTLTLFEDREMIEERLKTYAHLFDDKVMKQLKRRRYTGWGRLSRKLINGIRDKQSGKTILDFLKSDGFANRNFMQLIHDDSLTFKEDIQKAQVSGQGDSLHEHIANLAGSPAIKKGILQTVKVVDELVKVMGRHKPENIVIEMARENQTTQKGQKNSRERMKRIEEGIKELGSQILKEHPVENTQLQNEKLYLYYLQNGRDMYVDQELDINRLSDYDVDHIVPQSFLKDDSIDNKVLTRSDKARGKSDNVPSEEVVKKMKNYWRQLLNAKLITQRKFDNLTKAERGGLSELDKAGFIKRQLVETRQITKHVAQILDSRMNTKYDENDKLIREVKVITLKSKLVSDFRKDFQFYKVREINNYHHAHDAYLNAVVGTALIKKYPKLESEFVYGDYKVYDVRKMIAKSEQEIGKATAKYFFYSNIMNFFKTEITLANGEIRKRPLIETNGETGEIVWDKGRDFATVRKVLSMPQVNIVKKTEVQTGGFSKESILPKRNSDKLIARKKDWDPKKYGGFDSPTVAYSVLVVAKVEKGKSKKLKSVKELLGITIMERSSFEKNPIDFLEAKGYKEVKKDLIIKLPKYSLFELENGRKRMLASAGELQKGNELALPSKYVNFLYLASHYEKLKGSPEDNEQKQLFVEQHKHYLDEIIEQISEFSKRVILADANLDKVLSAYNKHRDKPIREQAENIIHLFTLTNLGAPAAFKYFDTTIDRKRYTSTKEVLDATLIHQSITGLYETRIDLSQLGGDGGPAPGGSGGGGGTLNIEDEHRLHETSKEPDVSLGSTWLSDFPQAWAETGGMGLAVRQAPLIIPLKATSTPVSIKQYPMSQEARLGIKPHIQRLLDQGILVPCQSPWNTPLLPVKKPGTNDYRPVQDLREVNKRVEDIHPTVPNPYNLLSGLPPSHQWYTVLDLKDAFFCLRLHPTSQPLFAFEWRDPEMGISGQLTWTRLPQGFKNSPTLFNEALHRDLADFRIQHPDLILLQYVDDLLLAATSELDCQQGTRALLQTLGNLGYRASAKKAQICQKQVKYLGYLLKEGQRWLTEARKETVMGQPTPKTPRQLREFLGKAGFCRLFIPGFAEMAAPLYPLTKPGTLFNWGPDQQKAYQEIKQALLTAPALGLPDLTKPFELFVDEKQGYAKGVLTQKLGPWRRPVAYLSKKLDPVAAGWPPCLRMVAAIAVLTKDAGKLTMGQPLVILAPHAVEALVKQPPDRWLSNARMTHYQALLLDTDRVQFGPVVALNPATLLPLPEEGLQHNCLDILAEAHGTRPDLTDQPLPDADHTWYTDGSSLLQEGQRKAGAAVTTETEVIWAKALPAGTSAQRAELIALTQALKMAEGKKLNVYTDSRYAFATAHIHGEIYRRRGWLTSEGKEIKNKDEILALLKALFLPKRLSIIHCPGHQKGHSAEARGNRMADQAARKAAITETPDTSTLLAGKRTADGSEFEKRTADGSEFESPKKKAKVE

SEQ ID NO: 2834 - protein, 2090 aa, synthetic construct
MPAAKRVKLDGGDKKYSIGLDIGTNSVGWAVITDEYKVPSKKFKVLGNTDRHSIKKNLIGALLFDSGETAEATRLKRTARRRYTRRKNRICYLQEIFSNEMAKVDDSFFHRLEESFLVEEDKKHERHPIFGNIVDEVAYHEKYPTIYHLRKKLVDSTDKADLRLIYLALAHMIKFRGHFLIEGDLNPDNSDVDKLFIQLVQTYNQLFEENPINASGVDAKAILSARLSKSRRLENLIAQLPGEKKNGLFGNLIALSLGLTPNFKSNFDLAEDAKLQLSKDTYDDDLDNLLAQIGDQYADLFLAAKNLSDAILLSDILRVNTEITKAPLSASMIKRYDEHHQDLTLLKALVRQQLPEKYKEIFFDQSKNGYAGYIDGGASQEEFYKFIKPILEKMDGTEELLVKLNREDLLRKQRTFDNGSIPHQIHLGELHAILRRQEDFYPFLKDNREKIEKILTFRIPYYVGPLARGNSRFAWMTRKSEETITPWNFEEVVDKGASAQSFIERMTNFDKNLPNEKVLPKHSLLYEYFTVYNELTKVKYVTEGMRKPAFLSGEQKKAIVDLLFKTNRKVTVKQLKEDYFKKIECFDSVEISGVEDRFNASLGTYHDLLKIIKDKDFLDNEENEDILEDIVLTLTLFEDREMIEERLKTYAHLFDDKVMKQLKRRRYTGWGRLSRKLINGIRDKQSGKTILDFLKSDGFANRNFMQLIHDDSLTFKEDIQKAQVSGQGDSLHEHIANLAGSPAIKKGILQTVKVVDELVKVMGRHKPENIVIEMARENQTTQKGQKNSRERMKRIEEGIKELGSQILKEHPVENTQLQNEKLYLYYLQNGRDMYVDQELDINRLSDYDVDHIVPQSFLKDDSIDNKVLTRSDKARGKSDNVPSEEVVKKMKNYWRQLLNAKLITQRKFDNLTKAERGGLSELDKAGFIKRQLVETRQITKHVAQILDSRMNTKYDENDKLIREVKVITLKSKLVSDFRKDFQFYKVREINNYHHAHDAYLNAVVGTALIKKYPKLESEFVYGDYKVYDVRKMIAKSEQEIGKATAKYFFYSNIMNFFKTEITLANGEIRKRPLIETNGETGEIVWDKGRDFATVRKVLSMPQVNIVKKTEVQTGGFSKESILPKRNSDKLIARKKDWDPKKYGGFDSPTVAYSVLVVAKVEKGKSKKLKSVKELLGITIMERSSFEKNPIDFLEAKGYKEVKKDLIIKLPKYSLFELENGRKRMLASAGELQKGNELALPSKYVNFLYLASHYEKLKGSPEDNEQKQLFVEQHKHYLDEIIEQISEFSKRVILADANLDKVLSAYNKHRDKPIREQAENIIHLFTLTNLGAPAAFKYFDTTIDRKRYTSTKEVLDATLIHQSITGLYETRIDLSQLGGDGGGGGGGGGTLNIEDEHRLHETSKEPDVSLGSTWLSDFPQAWAETGGMGLAVRQAPLIIPLKATSTPVSIKQYPMSQEARLGIKPHIQRLLDQGILVPCQSPWNTPLLPVKKPGTNDYRPVQDLREVNKRVEDIHPTVPNPYNLLSGLPPSHQWYTVLDLKDAFFCLRLHPTSQPLFAFEWRDPEMGISGQLTWTRLPQGFKNSPTLFNEALHRDLADFRIQHPDLILLQYVDDLLLAATSELDCQQGTRALLQTLGNLGYRASAKKAQICQKQVKYLGYLLKEGQRWLTEARKETVMGQPTPKTPRQLREFLGKAGFCRLFIPGFAEMAAPLYPLTKPGTLFNWGPDQQKAYQEIKQALLTAPALGLPDLTKPFELFVDEKQGYAKGVLTQKLGPWRRPVAYLSKKLDPVAAGWPPCLRMVAAIAVLTKDAGKLTMGQPLVILAPHAVEALVKQPPDRWLSNARMTHYQALLLDTDRVQFGPVVALNPATLLPLPEEGLQHNCLDILAEAHGTRPDLTDQPLPDADHTWYTDGSSLLQEGQRKAGAAVTTETEVIWAKALPAGTSAQRAELIALTQALKMAEGKKLNVYTDSRYAFATAHIHGEIYRRRGWLTSEGKEIKNKDEILALLKALFLPKRLSIIHCPGHQKGHSAEARGNRMADQAARKAAITETPDTSTLLAGKRTADGSEFEKRTADGSEFESPKKKAKVE

SEQ ID NO: 2835 - protein, 2094 aa, synthetic construct
MPAAKRVKLDGGDKKYSIGLDIGTNSVGWAVITDEYKVPSKKFKVLGNTDRHSIKKNLIGALLFDSGETAEATRLKRTARRRYTRRKNRICYLQEIFSNEMAKVDDSFFHRLEESFLVEEDKKHERHPIFGNIVDEVAYHEKYPTIYHLRKKLVDSTDKADLRLIYLALAHMIKFRGHFLIEGDLNPDNSDVDKLFIQLVQTYNQLFEENPINASGVDAKAILSARLSKSRRLENLIAQLPGEKKNGLFGNLIALSLGLTPNFKSNFDLAEDAKLQLSKDTYDDDLDNLLAQIGDQYADLFLAAKNLSDAILLSDILRVNTEITKAPLSASMIKRYDEHHQDLTLLKALVRQQLPEKYKEIFFDQSKNGYAGYIDGGASQEEFYKFIKPILEKMDGTEELLVKLNREDLLRKQRTFDNGSIPHQIHLGELHAILRRQEDFYPFLKDNREKIEKILTFRIPYYVGPLARGNSRFAWMTRKSEETITPWNFEEVVDKGASAQSFIERMTNFDKNLPNEKVLPKHSLLYEYFTVYNELTKVKYVTEGMRKPAFLSGEQKKAIVDLLFKTNRKVTVKQLKEDYFKKIECFDSVEISGVEDRFNASLGTYHDLLKIIKDKDFLDNEENEDILEDIVLTLTLFEDREMIEERLKTYAHLFDDKVMKQLKRRRYTGWGRLSRKLINGIRDKQSGKTILDFLKSDGFANRNFMQLIHDDSLTFKEDIQKAQVSGQGDSLHEHIANLAGSPAIKKGILQTVKVVDELVKVMGRHKPENIVIEMARENQTTQKGQKNSRERMKRIEEGIKELGSQILKEHPVENTQLQNEKLYLYYLQNGRDMYVDQELDINRLSDYDVDHIVPQSFLKDDSIDNKVLTRSDKARGKSDNVPSEEVVKKMKNYWRQLLNAKLITQRKFDNLTKAERGGLSELDKAGFIKRQLVETRQITKHVAQILDSRMNTKYDENDKLIREVKVITLKSKLVSDFRKDFQFYKVREINNYHHAHDAYLNAVVGTALIKKYPKLESEFVYGDYKVYDVRKMIAKSEQEIGKATAKYFFYSNIMNFFKTEITLANGEIRKRPLIETNGETGEIVWDKGRDFATVRKVLSMPQVNIVKKTEVQTGGFSKESILPKRNSDKLIARKKDWDPKKYGGFDSPTVAYSVLVVAKVEKGKSKKLKSVKELLGITIMERSSFEKNPIDFLEAKGYKEVKKDLIIKLPKYSLFELENGRKRMLASAGELQKGNELALPSKYVNFLYLASHYEKLKGSPEDNEQKQLFVEQHKHYLDEIIEQISEFSKRVILADANLDKVLSAYNKHRDKPIREQAENIIHLFTLTNLGAPAAFKYFDTTIDRKRYTSTKEVLDATLIHQSITGLYETRIDLSQLGGDGGGSSPAPGGGGGTLNIEDEHRLHETSKEPDVSLGSTWLSDFPQAWAETGGMGLAVRQAPLIIPLKATSTPVSIKQYPMSQEARLGIKPHIQRLLDQGILVPCQSPWNTPLLPVKKPGTNDYRPVQDLREVNKRVEDIHPTVPNPYNLLSGLPPSHQWYTVLDLKDAFFCLRLHPTSQPLFAFEWRDPEMGISGQLTWTRLPQGFKNSPTLFNEALHRDLADFRIQHPDLILLQYVDDLLLAATSELDCQQGTRALLQTLGNLGYRASAKKAQICQKQVKYLGYLLKEGQRWLTEARKETVMGQPTPKTPRQLREFLGKAGFCRLFIPGFAEMAAPLYPLTKPGTLFNWGPDQQKAYQEIKQALLTAPALGLPDLTKPFELFVDEKQGYAKGVLTQKLGPWRRPVAYLSKKLDPVAAGWPPCLRMVAAIAVLTKDAGKLTMGQPLVILAPHAVEALVKQPPDRWLSNARMTHYQALLLDTDRVQFGPVVALNPATLLPLPEEGLQHNCLDILAEAHGTRPDLTDQPLPDADHTWYTDGSSLLQEGQRKAGAAVTTETEVIWAKALPAGTSAQRAELIALTQALKMAEGKKLNVYTDSRYAFATAHIHGEIYRRRGWLTSEGKEIKNKDEILALLKALFLPKRLSIIHCPGHQKGHSAEARGNRMADQAARKAAITETPDTSTLLAGKRTADGSEFEKRTADGSEFESPKKKAKVE

SEQ ID NO: 2836 - protein, 2100 aa, synthetic construct
MPAAKRVKLDGGDKKYSIGLDIGTNSVGWAVITDEYKVPSKKFKVLGNTDRHSIKKNLIGALLFDSGETAEATRLKRTARRRYTRRKNRICYLQEIFSNEMAKVDDSFFHRLEESFLVEEDKKHERHPIFGNIVDEVAYHEKYPTIYHLRKKLVDSTDKADLRLIYLALAHMIKFRGHFLIEGDLNPDNSDVDKLFIQLVQTYNQLFEENPINASGVDAKAILSARLSKSRRLENLIAQLPGEKKNGLFGNLIALSLGLTPNFKSNFDLAEDAKLQLSKDTYDDDLDNLLAQIGDQYADLFLAAKNLSDAILLSDILRVNTEITKAPLSASMIKRYDEHHQDLTLLKALVRQQLPEKYKEIFFDQSKNGYAGYIDGGASQEEFYKFIKPILEKMDGTEELLVKLNREDLLRKQRTFDNGSIPHQIHLGELHAILRRQEDFYPFLKDNREKIEKILTFRIPYYVGPLARGNSRFAWMTRKSEETITPWNFEEVVDKGASAQSFIERMTNFDKNLPNEKVLPKHSLLYEYFTVYNELTKVKYVTEGMRKPAFLSGEQKKAIVDLLFKTNRKVTVKQLKEDYFKKIECFDSVEISGVEDRFNASLGTYHDLLKIIKDKDFLDNEENEDILEDIVLTLTLFEDREMIEERLKTYAHLFDDKVMKQLKRRRYTGWGRLSRKLINGIRDKQSGKTILDFLKSDGFANRNFMQLIHDDSLTFKEDIQKAQVSGQGDSLHEHIANLAGSPAIKKGILQTVKVVDELVKVMGRHKPENIVIEMARENQTTQKGQKNSRERMKRIEEGIKELGSQILKEHPVENTQLQNEKLYLYYLQNGRDMYVDQELDINRLSDYDVDHIVPQSFLKDDSIDNKVLTRSDKARGKSDNVPSEEVVKKMKNYWRQLLNAKLITQRKFDNLTKAERGGLSELDKAGFIKRQLVETRQITKHVAQILDSRMNTKYDENDKLIREVKVITLKSKLVSDFRKDFQFYKVREINNYHHAHDAYLNAVVGTALIKKYPKLESEFVYGDYKVYDVRKMIAKSEQEIGKATAKYFFYSNIMNFFKTEITLANGEIRKRPLIETNGETGEIVWDKGRDFATVRKVLSMPQVNIVKKTEVQTGGFSKESILPKRNSDKLIARKKDWDPKKYGGFDSPTVAYSVLVVAKVEKGKSKKLKSVKELLGITIMERSSFEKNPIDFLEAKGYKEVKKDLIIKLPKYSLFELENGRKRMLASAGELQKGNELALPSKYVNFLYLASHYEKLKGSPEDNEQKQLFVEQHKHYLDEIIEQISEFSKRVILADANLDKVLSAYNKHRDKPIREQAENIIHLFTLTNLGAPAAFKYFDTTIDRKRYTSTKEVLDATLIHQSITGLYETRIDLSQLGGDGGGGGGSEAAAKGGGGSGGTLNIEDEHRLHETSKEPDVSLGSTWLSDFPQAWAETGGMGLAVRQAPLIIPLKATSTPVSIKQYPMSQEARLGIKPHIQRLLDQGILVPCQSPWNTPLLPVKKPGTNDYRPVQDLREVNKRVEDIHPTVPNPYNLLSGLPPSHQWYTVLDLKDAFFCLRLHPTSQPLFAFEWRDPEMGISGQLTWTRLPQGFKNSPTLFNEALHRDLADFRIQHPDLILLQYVDDLLLAATSELDCQQGTRALLQTLGNLGYRASAKKAQICQKQVKYLGYLLKEGQRWLTEARKETVMGQPTPKTPRQLREFLGKAGFCRLFIPGFAEMAAPLYPLTKPGTLFNWGPDQQKAYQEIKQALLTAPALGLPDLTKPFELFVDEKQGYAKGVLTQKLGPWRRPVAYLSKKLDPVAAGWPPCLRMVAAIAVLTKDAGKLTMGQPLVILAPHAVEALVKQPPDRWLSNARMTHYQALLLDTDRVQFGPVVALNPATLLPLPEEGLQHNCLDILAEAHGTRPDLTDQPLPDADHTWYTDGSSLLQEGQRKAGAAVTTETEVIWAKALPAGTSAQRAELIALTQALKMAEGKKLNVYTDSRYAFATAHIHGEIYRRRGWLTSEGKEIKNKDEILALLKALFLPKRLSIIHCPGHQKGHSAEARGNRMADQAARKAAITETPDTSTLLAGKRTADGSEFEKRTADGSEFESPKKKAKVE

SEQ ID NO: 2837 - protein, 2091 aa, synthetic construct
MPAAKRVKLDGGDKKYSIGLDIGTNSVGWAVITDEYKVPSKKFKVLGNTDRHSIKKNLIGALLFDSGETAEATRLKRTARRRYTRRKNRICYLQEIFSNEMAKVDDSFFHRLEESFLVEEDKKHERHPIFGNIVDEVAYHEKYPTIYHLRKKLVDSTDKADLRLIYLALAHMIKFRGHFLIEGDLNPDNSDVDKLFIQLVQTYNQLFEENPINASGVDAKAILSARLSKSRRLENLIAQLPGEKKNGLFGNLIALSLGLTPNFKSNFDLAEDAKLQLSKDTYDDDLDNLLAQIGDQYADLFLAAKNLSDAILLSDILRVNTEITKAPLSASMIKRYDEHHQDLTLLKALVRQQLPEKYKEIFFDQSKNGYAGYIDGGASQEEFYKFIKPILEKMDGTEELLVKLNREDLLRKQRTFDNGSIPHQIHLGELHAILRRQEDFYPFLKDNREKIEKILTFRIPYYVGPLARGNSRFAWMTRKSEETITPWNFEEVVDKGASAQSFIERMTNFDKNLPNEKVLPKHSLLYEYFTVYNELTKVKYVTEGMRKPAFLSGEQKKAIVDLLFKTNRKVTVKQLKEDYFKKIECFDSVEISGVEDRFNASLGTYHDLLKIIKDKDFLDNEENEDILEDIVLTLTLFEDREMIEERLKTYAHLFDDKVMKQLKRRRYTGWGRLSRKLINGIRDKQSGKTILDFLKSDGFANRNFMQLIHDDSLTFKEDIQKAQVSGQGDSLHEHIANLAGSPAIKKGILQTVKVVDELVKVMGRHKPENIVIEMARENQTTQKGQKNSRERMKRIEEGIKELGSQILKEHPVENTQLQNEKLYLYYLQNGRDMYVDQELDINRLSDYDVDHIVPQSFLKDDSIDNKVLTRSDKARGKSDNVPSEEVVKKMKNYWRQLLNAKLITQRKFDNLTKAERGGLSELDKAGFIKRQLVETRQITKHVAQILDSRMNTKYDENDKLIREVKVITLKSKLVSDFRKDFQFYKVREINNYHHAHDAYLNAVVGTALIKKYPKLESEFVYGDYKVYDVRKMIAKSEQEIGKATAKYFFYSNIMNFFKTEITLANGEIRKRPLIETNGETGEIVWDKGRDFATVRKVLSMPQVNIVKKTEVQTGGFSKESILPKRNSDKLIARKKDWDPKKYGGFDSPTVAYSVLVVAKVEKGKSKKLKSVKELLGITIMERSSFEKNPIDFLEAKGYKEVKKDLIIKLPKYSLFELENGRKRMLASAGELQKGNELALPSKYVNFLYLASHYEKLKGSPEDNEQKQLFVEQHKHYLDEIIEQISEFSKRVILADANLDKVLSAYNKHRDKPIREQAENIIHLFTLTNLGAPAAFKYFDTTIDRKRYTSTKEVLDATLIHQSITGLYETRIDLSQLGGDGGPAPGGGGGTLNIEDEHRLHETSKEPDVSLGSTWLSDFPQAWAETGGMGLAVRQAPLIIPLKATSTPVSIKQYPMSQEARLGIKPHIQRLLDQGILVPCQSPWNTPLLPVKKPGTNDYRPVQDLREVNKRVEDIHPTVPNPYNLLSGLPPSHQWYTVLDLKDAFFCLRLHPTSQPLFAFEWRDPEMGISGQLTWTRLPQGFKNSPTLFNEALHRDLADFRIQHPDLILLQYVDDLLLAATSELDCQQGTRALLQTLGNLGYRASAKKAQICQKQVKYLGYLLKEGQRWLTEARKETVMGQPTPKTPRQLREFLGKAGFCRLFIPGFAEMAAPLYPLTKPGTLFNWGPDQQKAYQEIKQALLTAPALGLPDLTKPFELFVDEKQGYAKGVLTQKLGPWRRPVAYLSKKLDPVAAGWPPCLRMVAAIAVLTKDAGKLTMGQPLVILAPHAVEALVKQPPDRWLSNARMTHYQALLLDTDRVQFGPVVALNPATLLPLPEEGLQHNCLDILAEAHGTRPDLTDQPLPDADHTWYTDGSSLLQEGQRKAGAAVTTETEVIWAKALPAGTSAQRAELIALTQALKMAEGKKLNVYTDSRYAFATAHIHGEIYRRRGWLTSEGKEIKNKDEILALLKALFLPKRLSIIHCPGHQKGHSAEARGNRMADQAARKAAITETPDTSTLLAGKRTADGSEFEKRTADGSEFESPKKKAKVE

SEQ ID NO: 2838 - protein, 2096 aa, synthetic construct
MPAAKRVKLDGGDKKYSIGLDIGTNSVGWAVITDEYKVPSKKFKVLGNTDRHSIKKNLIGALLFDSGETAEATRLKRTARRRYTRRKNRICYLQEIFSNEMAKVDDSFFHRLEESFLVEEDKKHERHPIFGNIVDEVAYHEKYPTIYHLRKKLVDSTDKADLRLIYLALAHMIKFRGHFLIEGDLNPDNSDVDKLFIQLVQTYNQLFEENPINASGVDAKAILSARLSKSRRLENLIAQLPGEKKNGLFGNLIALSLGLTPNFKSNFDLAEDAKLQLSKDTYDDDLDNLLAQIGDQYADLFLAAKNLSDAILLSDILRVNTEITKAPLSASMIKRYDEHHQDLTLLKALVRQQLPEKYKEIFFDQSKNGYAGYIDGGASQEEFYKFIKPILEKMDGTEELLVKLNREDLLRKQRTFDNGSIPHQIHLGELHAILRRQEDFYPFLKDNREKIEKILTFRIPYYVGPLARGNSRFAWMTRKSEETITPWNFEEVVDKGASAQSFIERMTNFDKNLPNEKVLPKHSLLYEYFTVYNELTKVKYVTEGMRKPAFLSGEQKKAIVDLLFKTNRKVTVKQLKEDYFKKIECFDSVEISGVEDRFNASLGTYHDLLKIIKDKDFLDNEENEDILEDIVLTLTLFEDREMIEERLKTYAHLFDDKVMKQLKRRRYTGWGRLSRKLINGIRDKQSGKTILDFLKSDGFANRNFMQLIHDDSLTFKEDIQKAQVSGQGDSLHEHIANLAGSPAIKKGILQTVKVVDELVKVMGRHKPENIVIEMARENQTTQKGQKNSRERMKRIEEGIKELGSQILKEHPVENTQLQNEKLYLYYLQNGRDMYVDQELDINRLSDYDVDHIVPQSFLKDDSIDNKVLTRSDKARGKSDNVPSEEVVKKMKNYWRQLLNAKLITQRKFDNLTKAERGGLSELDKAGFIKRQLVETRQITKHVAQILDSRMNTKYDENDKLIREVKVITLKSKLVSDFRKDFQFYKVREINNYHHAHDAYLNAVVGTALIKKYPKLESEFVYGDYKVYDVRKMIAKSEQEIGKATAKYFFYSNIMNFFKTEITLANGEIRKRPLIETNGETGEIVWDKGRDFATVRKVLSMPQVNIVKKTEVQTGGFSKESILPKRNSDKLIARKKDWDPKKYGGFDSPTVAYSVLVVAKVEKGKSKKLKSVKELLGITIMERSSFEKNPIDFLEAKGYKEVKKDLIIKLPKYSLFELENGRKRMLASAGELQKGNELALPSKYVNFLYLASHYEKLKGSPEDNEQKQLFVEQHKHYLDEIIEQISEFSKRVILADANLDKVLSAYNKHRDKPIREQAENIIHLFTLTNLGAPAAFKYFDTTIDRKRYTSTKEVLDATLIHQSITGLYETRIDLSQLGGDGGEAAAKPAPGGGGGTLNIEDEHRLHETSKEPDVSLGSTWLSDFPQAWAETGGMGLAVRQAPLIIPLKATSTPVSIKQYPMSQEARLGIKPHIQRLLDQGILVPCQSPWNTPLLPVKKPGTNDYRPVQDLREVNKRVEDIHPTVPNPYNLLSGLPPSHQWYTVLDLKDAFFCLRLHPTSQPLFAFEWRDPEMGISGQLTWTRLPQGFKNSPTLFNEALHRDLADFRIQHPDLILLQYVDDLLLAATSELDCQQGTRALLQTLGNLGYRASAKKAQICQKQVKYLGYLLKEGQRWLTEARKETVMGQPTPKTPRQLREFLGKAGFCRLFIPGFAEMAAPLYPLTKPGTLFNWGPDQQKAYQEIKQALLTAPALGLPDLTKPFELFVDEKQGYAKGVLTQKLGPWRRPVAYLSKKLDPVAAGWPPCLRMVAAIAVLTKDAGKLTMGQPLVILAPHAVEALVKQPPDRWLSNARMTHYQALLLDTDRVQFGPVVALNPATLLPLPEEGLQHNCLDILAEAHGTRPDLTDQPLPDADHTWYTDGSSLLQEGQRKAGAAVTTETEVIWAKALPAGTSAQRAELIALTQALKMAEGKKLNVYTDSRYAFATAHIHGEIYRRRGWLTSEGKEIKNKDEILALLKALFLPKRLSIIHCPGHQKGHSAEARGNRMADQAARKAAITETPDTSTLLAGKRTADGSEFEKRTADGSEFESPKKKAKVE

SEQ ID NO: 2839 - protein, 2096 aa, synthetic construct
MPAAKRVKLDGGDKKYSIGLDIGTNSVGWAVITDEYKVPSKKFKVLGNTDRHSIKKNLIGALLFDSGETAEATRLKRTARRRYTRRKNRICYLQEIFSNEMAKVDDSFFHRLEESFLVEEDKKHERHPIFGNIVDEVAYHEKYPTIYHLRKKLVDSTDKADLRLIYLALAHMIKFRGHFLIEGDLNPDNSDVDKLFIQLVQTYNQLFEENPINASGVDAKAILSARLSKSRRLENLIAQLPGEKKNGLFGNLIALSLGLTPNFKSNFDLAEDAKLQLSKDTYDDDLDNLLAQIGDQYADLFLAAKNLSDAILLSDILRVNTEITKAPLSASMIKRYDEHHQDLTLLKALVRQQLPEKYKEIFFDQSKNGYAGYIDGGASQEEFYKFIKPILEKMDGTEELLVKLNREDLLRKQRTFDNGSIPHQIHLGELHAILRRQEDFYPFLKDNREKIEKILTFRIPYYVGPLARGNSRFAWMTRKSEETITPWNFEEVVDKGASAQSFIERMTNFDKNLPNEKVLPKHSLLYEYFTVYNELTKVKYVTEGMRKPAFLSGEQKKAIVDLLFKTNRKVTVKQLKEDYFKKIECFDSVEISGVEDRFNASLGTYHDLLKIIKDKDFLDNEENEDILEDIVLTLTLFEDREMIEERLKTYAHLFDDKVMKQLKRRRYTGWGRLSRKLINGIRDKQSGKTILDFLKSDGFANRNFMQLIHDDSLTFKEDIQKAQVSGQGDSLHEHIANLAGSPAIKKGILQTVKVVDELVKVMGRHKPENIVIEMARENQTTQKGQKNSRERMKRIEEGIKELGSQILKEHPVENTQLQNEKLYLYYLQNGRDMYVDQELDINRLSDYDVDHIVPQSFLKDDSIDNKVLTRSDKARGKSDNVPSEEVVKKMKNYWRQLLNAKLITQRKFDNLTKAERGGLSELDKAGFIKRQLVETRQITKHVAQILDSRMNTKYDENDKLIREVKVITLKSKLVSDFRKDFQFYKVREINNYHHAHDAYLNAVVGTALIKKYPKLESEFVYGDYKVYDVRKMIAKSEQEIGKATAKYFFYSNIMNFFKTEITLANGEIRKRPLIETNGETGEIVWDKGRDFATVRKVLSMPQVNIVKKTEVQTGGFSKESILPKRNSDKLIARKKDWDPKKYGGFDSPTVAYSVLVVAKVEKGKSKKLKSVKELLGITIMERSSFEKNPIDFLEAKGYKEVKKDLIIKLPKYSLFELENGRKRMLASAGELQKGNELALPSKYVNFLYLASHYEKLKGSPEDNEQKQLFVEQHKHYLDEIIEQISEFSKRVILADANLDKVLSAYNKHRDKPIREQAENIIHLFTLTNLGAPAAFKYFDTTIDRKRYTSTKEVLDATLIHQSITGLYETRIDLSQLGGDGGGSSPAPEAAAKGGTLNIEDEHRLHETSKEPDVSLGSTWLSDFPQAWAETGGMGLAVRQAPLIIPLKATSTPVSIKQYPMSQEARLGIKPHIQRLLDQGILVPCQSPWNTPLLPVKKPGTNDYRPVQDLREVNKRVEDIHPTVPNPYNLLSGLPPSHQWYTVLDLKDAFFCLRLHPTSQPLFAFEWRDPEMGISGQLTWTRLPQGFKNSPTLFNEALHRDLADFRIQHPDLILLQYVDDLLLAATSELDCQQGTRALLQTLGNLGYRASAKKAQICQKQVKYLGYLLKEGQRWLTEARKETVMGQPTPKTPRQLREFLGKAGFCRLFIPGFAEMAAPLYPLTKPGTLFNWGPDQQKAYQEIKQALLTAPALGLPDLTKPFELFVDEKQGYAKGVLTQKLGPWRRPVAYLSKKLDPVAAGWPPCLRMVAAIAVLTKDAGKLTMGQPLVILAPHAVEALVKQPPDRWLSNARMTHYQALLLDTDRVQFGPVVALNPATLLPLPEEGLQHNCLDILAEAHGTRPDLTDQPLPDADHTWYTDGSSLLQEGQRKAGAAVTTETEVIWAKALPAGTSAQRAELIALTQALKMAEGKKLNVYTDSRYAFATAHIHGEIYRRRGWLTSEGKEIKNKDEILALLKALFLPKRLSIIHCPGHQKGHSAEARGNRMADQAARKAAITETPDTSTLLAGKRTADGSEFEKRTADGSEFESPKKKAKVE

SEQ ID NO: 2840 - protein, 2094 aa, synthetic construct
MPAAKRVKLDGGDKKYSIGLDIGTNSVGWAVITDEYKVPSKKFKVLGNTDRHSIKKNLIGALLFDSGETAEATRLKRTARRRYTRRKNRICYLQEIFSNEMAKVDDSFFHRLEESFLVEEDKKHERHPIFGNIVDEVAYHEKYPTIYHLRKKLVDSTDKADLRLIYLALAHMIKFRGHFLIEGDLNPDNSDVDKLFIQLVQTYNQLFEENPINASGVDAKAILSARLSKSRRLENLIAQLPGEKKNGLFGNLIALSLGLTPNFKSNFDLAEDAKLQLSKDTYDDDLDNLLAQIGDQYADLFLAAKNLSDAILLSDILRVNTEITKAPLSASMIKRYDEHHQDLTLLKALVRQQLPEKYKEIFFDQSKNGYAGYIDGGASQEEFYKFIKPILEKMDGTEELLVKLNREDLLRKQRTFDNGSIPHQIHLGELHAILRRQEDFYPFLKDNREKIEKILTFRIPYYVGPLARGNSRFAWMTRKSEETITPWNFEEVVDKGASAQSFIERMTNFDKNLPNEKVLPKHSLLYEYFTVYNELTKVKYVTEGMRKPAFLSGEQKKAIVDLLFKTNRKVTVKQLKEDYFKKIECFDSVEISGVEDRFNASLGTYHDLLKIIKDKDFLDNEENEDILEDIVLTLTLFEDREMIEERLKTYAHLFDDKVMKQLKRRRYTGWGRLSRKLINGIRDKQSGKTILDFLKSDGFANRNFMQLIHDDSLTFKEDIQKAQVSGQGDSLHEHIANLAGSPAIKKGILQTVKVVDELVKVMGRHKPENIVIEMARENQTTQKGQKNSRERMKRIEEGIKELGSQILKEHPVENTQLQNEKLYLYYLQNGRDMYVDQELDINRLSDYDVDHIVPQSFLKDDSIDNKVLTRSDKARGKSDNVPSEEVVKKMKNYWRQLLNAKLITQRKFDNLTKAERGGLSELDKAGFIKRQLVETRQITKHVAQILDSRMNTKYDENDKLIREVKVITLKSKLVSDFRKDFQFYKVREINNYHHAHDAYLNAVVGTALIKKYPKLESEFVYGDYKVYDVRKMIAKSEQEIGKATAKYFFYSNIMNFFKTEITLANGEIRKRPLIETNGETGEIVWDKGRDFATVRKVLSMPQVNIVKKTEVQTGGFSKESILPKRNSDKLIARKKDWDPKKYGGFDSPTVAYSVLVVAKVEKGKSKKLKSVKELLGITIMERSSFEKNPIDFLEAKGYKEVKKDLIIKLPKYSLFELENGRKRMLASAGELQKGNELALPSKYVNFLYLASHYEKLKGSPEDNEQKQLFVEQHKHYLDEIIEQISEFSKRVILADANLDKVLSAYNKHRDKPIREQAENIIHLFTLTNLGAPAAFKYFDTTIDRKRYTSTKEVLDATLIHQSITGLYETRIDLSQLGGDGGGGGGGSPAPGGTLNIEDEHRLHETSKEPDVSLGSTWLSDFPQAWAETGGMGLAVRQAPLIIPLKATSTPVSIKQYPMSQEARLGIKPHIQRLLDQGILVPCQSPWNTPLLPVKKPGTNDYRPVQDLREVNKRVEDIHPTVPNPYNLLSGLPPSHQWYTVLDLKDAFFCLRLHPTSQPLFAFEWRDPEMGISGQLTWTRLPQGFKNSPTLFNEALHRDLADFRIQHPDLILLQYVDDLLLAATSELDCQQGTRALLQTLGNLGYRASAKKAQICQKQVKYLGYLLKEGQRWLTEARKETVMGQPTPKTPRQLREFLGKAGFCRLFIPGFAEMAAPLYPLTKPGTLFNWGPDQQKAYQEIKQALLTAPALGLPDLTKPFELFVDEKQGYAKGVLTQKLGPWRRPVAYLSKKLDPVAAGWPPCLRMVAAIAVLTKDAGKLTMGQPLVILAPHAVEALVKQPPDRWLSNARMTHYQALLLDTDRVQFGPVVALNPATLLPLPEEGLQHNCLDILAEAHGTRPDLTDQPLPDADHTWYTDGSSLLQEGQRKAGAAVTTETEVIWAKALPAGTSAQRAELIALTQALKMAEGKKLNVYTDSRYAFATAHIHGEIYRRRGWLTSEGKEIKNKDEILALLKALFLPKRLSIIHCPGHQKGHSAEARGNRMADQAARKAAITETPDTSTLLAGKRTADGSEFEKRTADGSEFESPKKKAKVE

SEQ ID NO: 2841 - protein, 2094 aa, synthetic construct
MPAAKRVKLDGGDKKYSIGLDIGTNSVGWAVITDEYKVPSKKFKVLGNTDRHSIKKNLIGALLFDSGETAEATRLKRTARRRYTRRKNRICYLQEIFSNEMAKVDDSFFHRLEESFLVEEDKKHERHPIFGNIVDEVAYHEKYPTIYHLRKKLVDSTDKADLRLIYLALAHMIKFRGHFLIEGDLNPDNSDVDKLFIQLVQTYNQLFEENPINASGVDAKAILSARLSKSRRLENLIAQLPGEKKNGLFGNLIALSLGLTPNFKSNFDLAEDAKLQLSKDTYDDDLDNLLAQIGDQYADLFLAAKNLSDAILLSDILRVNTEITKAPLSASMIKRYDEHHQDLTLLKALVRQQLPEKYKEIFFDQSKNGYAGYIDGGASQEEFYKFIKPILEKMDGTEELLVKLNREDLLRKQRTFDNGSIPHQIHLGELHAILRRQEDFYPFLKDNREKIEKILTFRIPYYVGPLARGNSRFAWMTRKSEETITPWNFEEVVDKGASAQSFIERMTNFDKNLPNEKVLPKHSLLYEYFTVYNELTKVKYVTEGMRKPAFLSGEQKKAIVDLLFKTNRKVTVKQLKEDYFKKIECFDSVEISGVEDRFNASLGTYHDLLKIIKDKDFLDNEENEDILEDIVLTLTLFEDREMIEERLKTYAHLFDDKVMKQLKRRRYTGWGRLSRKLINGIRDKQSGKTILDFLKSDGFANRNFMQLIHDDSLTFKEDIQKAQVSGQGDSLHEHIANLAGSPAIKKGILQTVKVVDELVKVMGRHKPENIVIEMARENQTTQKGQKNSRERMKRIEEGIKELGSQILKEHPVENTQLQNEKLYLYYLQNGRDMYVDQELDINRLSDYDVDHIVPQSFLKDDSIDNKVLTRSDKARGKSDNVPSEEVVKKMKNYWRQLLNAKLITQRKFDNLTKAERGGLSELDKAGFIKRQLVETRQITKHVAQILDSRMNTKYDENDKLIREVKVITLKSKLVSDFRKDFQFYKVREINNYHHAHDAYLNAVVGTALIKKYPKLESEFVYGDYKVYDVRKMIAKSEQEIGKATAKYFFYSNIMNFFKTEITLANGEIRKRPLIETNGETGEIVWDKGRDFATVRKVLSMPQVNIVKKTEVQTGGFSKESILPKRNSDKLIARKKDWDPKKYGGFDSPTVAYSVLVVAKVEKGKSKKLKSVKELLGITIMERSSFEKNPIDFLEAKGYKEVKKDLIIKLPKYSLFELENGRKRMLASAGELQKGNELALPSKYVNFLYLASHYEKLKGSPEDNEQKQLFVEQHKHYLDEIIEQISEFSKRVILADANLDKVLSAYNKHRDKPIREQAENIIHLFTLTNLGAPAAFKYFDTTIDRKRYTSTKEVLDATLIHQSITGLYETRIDLSQLGGDGGGGGPAPGSSGGTLNIEDEHRLHETSKEPDVSLGSTWLSDFPQAWAETGGMGLAVRQAPLIIPLKATSTPVSIKQYPMSQEARLGIKPHIQRLLDQGILVPCQSPWNTPLLPVKKPGTNDYRPVQDLREVNKRVEDIHPTVPNPYNLLSGLPPSHQWYTVLDLKDAFFCLRLHPTSQPLFAFEWRDPEMGISGQLTWTRLPQGFKNSPTLFNEALHRDLADFRIQHPDLILLQYVDDLLLAATSELDCQQGTRALLQTLGNLGYRASAKKAQICQKQVKYLGYLLKEGQRWLTEARKETVMGQPTPKTPRQLREFLGKAGFCRLFIPGFAEMAAPLYPLTKPGTLFNWGPDQQKAYQEIKQALLTAPALGLPDLTKPFELFVDEKQGYAKGVLTQKLGPWRRPVAYLSKKLDPVAAGWPPCLRMVAAIAVLTKDAGKLTMGQPLVILAPHAVEALVKQPPDRWLSNARMTHYQALLLDTDRVQFGPVVALNPATLLPLPEEGLQHNCLDILAEAHGTRPDLTDQPLPDADHTWYTDGSSLLQEGQRKAGAAVTTETEVIWAKALPAGTSAQRAELIALTQALKMAEGKKLNVYTDSRYAFATAHIHGEIYRRRGWLTSEGKEIKNKDEILALLKALFLPKRLSIIHCPGHQKGHSAEARGNRMADQAARKAAITETPDTSTLLAGKRTADGSEFEKRTADGSEFESPKKKAKVE

SEQ ID NO: 2842 - protein, 2096 aa, synthetic construct
MPAAKRVKLDGGDKKYSIGLDIGTNSVGWAVITDEYKVPSKKFKVLGNTDRHSIKKNLIGALLFDSGETAEATRLKRTARRRYTRRKNRICYLQEIFSNEMAKVDDSFFHRLEESFLVEEDKKHERHPIFGNIVDEVAYHEKYPTIYHLRKKLVDSTDKADLRLIYLALAHMIKFRGHFLIEGDLNPDNSDVDKLFIQLVQTYNQLFEENPINASGVDAKAILSARLSKSRRLENLIAQLPGEKKNGLFGNLIALSLGLTPNFKSNFDLAEDAKLQLSKDTYDDDLDNLLAQIGDQYADLFLAAKNLSDAILLSDILRVNTEITKAPLSASMIKRYDEHHQDLTLLKALVRQQLPEKYKEIFFDQSKNGYAGYIDGGASQEEFYKFIKPILEKMDGTEELLVKLNREDLLRKQRTFDNGSIPHQIHLGELHAILRRQEDFYPFLKDNREKIEKILTFRIPYYVGPLARGNSRFAWMTRKSEETITPWNFEEVVDKGASAQSFIERMTNFDKNLPNEKVLPKHSLLYEYFTVYNELTKVKYVTEGMRKPAFLSGEQKKAIVDLLFKTNRKVTVKQLKEDYFKKIECFDSVEISGVEDRFNASLGTYHDLLKIIKDKDFLDNEENEDILEDIVLTLTLFEDREMIEERLKTYAHLFDDKVMKQLKRRRYTGWGRLSRKLINGIRDKQSGKTILDFLKSDGFANRNFMQLIHDDSLTFKEDIQKAQVSGQGDSLHEHIANLAGSPAIKKGILQTVKVVDELVKVMGRHKPENIVIEMARENQTTQKGQKNSRERMKRIEEGIKELGSQILKEHPVENTQLQNEKLYLYYLQNGRDMYVDQELDINRLSDYDVDHIVPQSFLKDDSIDNKVLTRSDKARGKSDNVPSEEVVKKMKNYWRQLLNAKLITQRKFDNLTKAERGGLSELDKAGFIKRQLVETRQITKHVAQILDSRMNTKYDENDKLIREVKVITLKSKLVSDFRKDFQFYKVREINNYHHAHDAYLNAVVGTALIKKYPKLESEFVYGDYKVYDVRKMIAKSEQEIGKATAKYFFYSNIMNFFKTEITLANGEIRKRPLIETNGETGEIVWDKGRDFATVRKVLSMPQVNIVKKTEVQTGGFSKESILPKRNSDKLIARKKDWDPKKYGGFDSPTVAYSVLVVAKVEKGKSKKLKSVKELLGITIMERSSFEKNPIDFLEAKGYKEVKKDLIIKLPKYSLFELENGRKRMLASAGELQKGNELALPSKYVNFLYLASHYEKLKGSPEDNEQKQLFVEQHKHYLDEIIEQISEFSKRVILADANLDKVLSAYNKHRDKPIREQAENIIHLFTLTNLGAPAAFKYFDTTIDRKRYTSTKEVLDATLIHQSITGLYETRIDLSQLGGDGGGGSGSSEAAAKGGTLNIEDEHRLHETSKEPDVSLGSTWLSDFPQAWAETGGMGLAVRQAPLIIPLKATSTPVSIKQYPMSQEARLGIKPHIQRLLDQGILVPCQSPWNTPLLPVKKPGTNDYRPVQDLREVNKRVEDIHPTVPNPYNLLSGLPPSHQWYTVLDLKDAFFCLRLHPTSQPLFAFEWRDPEMGISGQLTWTRLPQGFKNSPTLFNEALHRDLADFRIQHPDLILLQYVDDLLLAATSELDCQQGTRALLQTLGNLGYRASAKKAQICQKQVKYLGYLLKEGQRWLTEARKETVMGQPTPKTPRQLREFLGKAGFCRLFIPGFAEMAAPLYPLTKPGTLFNWGPDQQKAYQEIKQALLTAPALGLPDLTKPFELFVDEKQGYAKGVLTQKLGPWRRPVAYLSKKLDPVAAGWPPCLRMVAAIAVLTKDAGKLTMGQPLVILAPHAVEALVKQPPDRWLSNARMTHYQALLLDTDRVQFGPVVALNPATLLPLPEEGLQHNCLDILAEAHGTRPDLTDQPLPDADHTWYTDGSSLLQEGQRKAGAAVTTETEVIWAKALPAGTSAQRAELIALTQALKMAEGKKLNVYTDSRYAFATAHIHGEIYRRRGWLTSEGKEIKNKDEILALLKALFLPKRLSIIHCPGHQKGHSAEARGNRMADQAARKAAITETPDTSTLLAGKRTADGSEFEKRTADGSEFESPKKKAKVE

SEQ ID NO: 2843 - protein, 2096 aa, synthetic construct
MPAAKRVKLDGGDKKYSIGLDIGTNSVGWAVITDEYKVPSKKFKVLGNTDRHSIKKNLIGALLFDSGETAEATRLKRTARRRYTRRKNRICYLQEIFSNEMAKVDDSFFHRLEESFLVEEDKKHERHPIFGNIVDEVAYHEKYPTIYHLRKKLVDSTDKADLRLIYLALAHMIKFRGHFLIEGDLNPDNSDVDKLFIQLVQTYNQLFEENPINASGVDAKAILSARLSKSRRLENLIAQLPGEKKNGLFGNLIALSLGLTPNFKSNFDLAEDAKLQLSKDTYDDDLDNLLAQIGDQYADLFLAAKNLSDAILLSDILRVNTEITKAPLSASMIKRYDEHHQDLTLLKALVRQQLPEKYKEIFFDQSKNGYAGYIDGGASQEEFYKFIKPILEKMDGTEELLVKLNREDLLRKQRTFDNGSIPHQIHLGELHAILRRQEDFYPFLKDNREKIEKILTFRIPYYVGPLARGNSRFAWMTRKSEETITPWNFEEVVDKGASAQSFIERMTNFDKNLPNEKVLPKHSLLYEYFTVYNELTKVKYVTEGMRKPAFLSGEQKKAIVDLLFKTNRKVTVKQLKEDYFKKIECFDSVEISGVEDRFNASLGTYHDLLKIIKDKDFLDNEENEDILEDIVLTLTLFEDREMIEERLKTYAHLFDDKVMKQLKRRRYTGWGRLSRKLINGIRDKQSGKTILDFLKSDGFANRNFMQLIHDDSLTFKEDIQKAQVSGQGDSLHEHIANLAGSPAIKKGILQTVKVVDELVKVMGRHKPENIVIEMARENQTTQKGQKNSRERMKRIEEGIKELGSQILKEHPVENTQLQNEKLYLYYLQNGRDMYVDQELDINRLSDYDVDHIVPQSFLKDDSIDNKVLTRSDKARGKSDNVPSEEVVKKMKNYWRQLLNAKLITQRKFDNLTKAERGGLSELDKAGFIKRQLVETRQITKHVAQILDSRMNTKYDENDKLIREVKVITLKSKLVSDFRKDFQFYKVREINNYHHAHDAYLNAVVGTALIKKYPKLESEFVYGDYKVYDVRKMIAKSEQEIGKATAKYFFYSNIMNFFKTEITLANGEIRKRPLIETNGETGEIVWDKGRDFATVRKVLSMPQVNIVKKTEVQTGGFSKESILPKRNSDKLIARKKDWDPKKYGGFDSPTVAYSVLVVAKVEKGKSKKLKSVKELLGITIMERSSFEKNPIDFLEAKGYKEVKKDLIIKLPKYSLFELENGRKRMLASAGELQKGNELALPSKYVNFLYLASHYEKLKGSPEDNEQKQLFVEQHKHYLDEIIEQISEFSKRVILADANLDKVLSAYNKHRDKPIREQAENIIHLFTLTNLGAPAAFKYFDTTIDRKRYTSTKEVLDATLIHQSITGLYETRIDLSQLGGDGGEAAAKGGGPAPGGTLNIEDEHRLHETSKEPDVSLGSTWLSDFPQAWAETGGMGLAVRQAPLIIPLKATSTPVSIKQYPMSQEARLGIKPHIQRLLDQGILVPCQSPWNTPLLPVKKPGTNDYRPVQDLREVNKRVEDIHPTVPNPYNLLSGLPPSHQWYTVLDLKDAFFCLRLHPTSQPLFAFEWRDPEMGISGQLTWTRLPQGFKNSPTLFNEALHRDLADFRIQHPDLILLQYVDDLLLAATSELDCQQGTRALLQTLGNLGYRASAKKAQICQKQVKYLGYLLKEGQRWLTEARKETVMGQPTPKTPRQLREFLGKAGFCRLFIPGFAEMAAPLYPLTKPGTLFNWGPDQQKAYQEIKQALLTAPALGLPDLTKPFELFVDEKQGYAKGVLTQKLGPWRRPVAYLSKKLDPVAAGWPPCLRMVAAIAVLTKDAGKLTMGQPLVILAPHAVEALVKQPPDRWLSNARMTHYQALLLDTDRVQFGPVVALNPATLLPLPEEGLQHNCLDILAEAHGTRPDLTDQPLPDADHTWYTDGSSLLQEGQRKAGAAVTTETEVIWAKALPAGTSAQRAELIALTQALKMAEGKKLNVYTDSRYAFATAHIHGEIYRRRGWLTSEGKEIKNKDEILALLKALFLPKRLSIIHCPGHQKGHSAEARGNRMADQAARKAAITETPDTSTLLAGKRTADGSEFEKRTADGSEFESPKKKAKVE

SEQ ID NO: 2844 - protein, 2105 aa, synthetic construct
MPAAKRVKLDGGDKKYSIGLDIGTNSVGWAVITDEYKVPSKKFKVLGNTDRHSIKKNLIGALLFDSGETAEATRLKRTARRRYTRRKNRICYLQEIFSNEMAKVDDSFFHRLEESFLVEEDKKHERHPIFGNIVDEVAYHEKYPTIYHLRKKLVDSTDKADLRLIYLALAHMIKFRGHFLIEGDLNPDNSDVDKLFIQLVQTYNQLFEENPINASGVDAKAILSARLSKSRRLENLIAQLPGEKKNGLFGNLIALSLGLTPNFKSNFDLAEDAKLQLSKDTYDDDLDNLLAQIGDQYADLFLAAKNLSDAILLSDILRVNTEITKAPLSASMIKRYDEHHQDLTLLKALVRQQLPEKYKEIFFDQSKNGYAGYIDGGASQEEFYKFIKPILEKMDGTEELLVKLNREDLLRKQRTFDNGSIPHQIHLGELHAILRRQEDFYPFLKDNREKIEKILTFRIPYYVGPLARGNSRFAWMTRKSEETITPWNFEEVVDKGASAQSFIERMTNFDKNLPNEKVLPKHSLLYEYFTVYNELTKVKYVTEGMRKPAFLSGEQKKAIVDLLFKTNRKVTVKQLKEDYFKKIECFDSVEISGVEDRFNASLGTYHDLLKIIKDKDFLDNEENEDILEDIVLTLTLFEDREMIEERLKTYAHLFDDKVMKQLKRRRYTGWGRLSRKLINGIRDKQSGKTILDFLKSDGFANRNFMQLIHDDSLTFKEDIQKAQVSGQGDSLHEHIANLAGSPAIKKGILQTVKVVDELVKVMGRHKPENIVIEMARENQTTQKGQKNSRERMKRIEEGIKELGSQILKEHPVENTQLQNEKLYLYYLQNGRDMYVDQELDINRLSDYDVDHIVPQSFLKDDSIDNKVLTRSDKARGKSDNVPSEEVVKKMKNYWRQLLNAKLITQRKFDNLTKAERGGLSELDKAGFIKRQLVETRQITKHVAQILDSRMNTKYDENDKLIREVKVITLKSKLVSDFRKDFQFYKVREINNYHHAHDAYLNAVVGTALIKKYPKLESEFVYGDYKVYDVRKMIAKSEQEIGKATAKYFFYSNIMNFFKTEITLANGEIRKRPLIETNGETGEIVWDKGRDFATVRKVLSMPQVNIVKKTEVQTGGFSKESILPKRNSDKLIARKKDWDPKKYGGFDSPTVAYSVLVVAKVEKGKSKKLKSVKELLGITIMERSSFEKNPIDFLEAKGYKEVKKDLIIKLPKYSLFELENGRKRMLASAGELQKGNELALPSKYVNFLYLASHYEKLKGSPEDNEQKQLFVEQHKHYLDEIIEQISEFSKRVILADANLDKVLSAYNKHRDKPIREQAENIIHLFTLTNLGAPAAFKYFDTTIDRKRYTSTKEVLDATLIHQSITGLYETRIDLSQLGGDGGEAAAKEAAAKEAAAKEAAAKGGTLNIEDEHRLHETSKEPDVSLGSTWLSDFPQAWAETGGMGLAVRQAPLIIPLKATSTPVSIKQYPMSQEARLGIKPHIQRLLDQGILVPCQSPWNTPLLPVKKPGTNDYRPVQDLREVNKRVEDIHPTVPNPYNLLSGLPPSHQWYTVLDLKDAFFCLRLHPTSQPLFAFEWRDPEMGISGQLTWTRLPQGFKNSPTLFNEALHRDLADFRIQHPDLILLQYVDDLLLAATSELDCQQGTRALLQTLGNLGYRASAKKAQICQKQVKYLGYLLKEGQRWLTEARKETVMGQPTPKTPRQLREFLGKAGFCRLFIPGFAEMAAPLYPLTKPGTLFNWGPDQQKAYQEIKQALLTAPALGLPDLTKPFELFVDEKQGYAKGVLTQKLGPWRRPVAYLSKKLDPVAAGWPPCLRMVAAIAVLTKDAGKLTMGQPLVILAPHAVEALVKQPPDRWLSNARMTHYQALLLDTDRVQFGPVVALNPATLLPLPEEGLQHNCLDILAEAHGTRPDLTDQPLPDADHTWYTDGSSLLQEGQRKAGAAVTTETEVIWAKALPAGTSAQRAELIALTQALKMAEGKKLNVYTDSRYAFATAHIHGEIYRRRGWLTSEGKEIKNKDEILALLKALFLPKRLSIIHCPGHQKGHSAEARGNRMADQAARKAAITETPDTSTLLAGKRTADGSEFEKRTADGSEFESPKKKAKVE

SEQ ID NO: 2845 - protein, 2095 aa, synthetic construct
MPAAKRVKLDGGDKKYSIGLDIGTNSVGWAVITDEYKVPSKKFKVLGNTDRHSIKKNLIGALLFDSGETAEATRLKRTARRRYTRRKNRICYLQEIFSNEMAKVDDSFFHRLEESFLVEEDKKHERHPIFGNIVDEVAYHEKYPTIYHLRKKLVDSTDKADLRLIYLALAHMIKFRGHFLIEGDLNPDNSDVDKLFIQLVQTYNQLFEENPINASGVDAKAILSARLSKSRRLENLIAQLPGEKKNGLFGNLIALSLGLTPNFKSNFDLAEDAKLQLSKDTYDDDLDNLLAQIGDQYADLFLAAKNLSDAILLSDILRVNTEITKAPLSASMIKRYDEHHQDLTLLKALVRQQLPEKYKEIFFDQSKNGYAGYIDGGASQEEFYKFIKPILEKMDGTEELLVKLNREDLLRKQRTFDNGSIPHQIHLGELHAILRRQEDFYPFLKDNREKIEKILTFRIPYYVGPLARGNSRFAWMTRKSEETITPWNFEEVVDKGASAQSFIERMTNFDKNLPNEKVLPKHSLLYEYFTVYNELTKVKYVTEGMRKPAFLSGEQKKAIVDLLFKTNRKVTVKQLKEDYFKKIECFDSVEISGVEDRFNASLGTYHDLLKIIKDKDFLDNEENEDILEDIVLTLTLFEDREMIEERLKTYAHLFDDKVMKQLKRRRYTGWGRLSRKLINGIRDKQSGKTILDFLKSDGFANRNFMQLIHDDSLTFKEDIQKAQVSGQGDSLHEHIANLAGSPAIKKGILQTVKVVDELVKVMGRHKPENIVIEMARENQTTQKGQKNSRERMKRIEEGIKELGSQILKEHPVENTQLQNEKLYLYYLQNGRDMYVDQELDINRLSDYDVDHIVPQSFLKDDSIDNKVLTRSDKARGKSDNVPSEEVVKKMKNYWRQLLNAKLITQRKFDNLTKAERGGLSELDKAGFIKRQLVETRQITKHVAQILDSRMNTKYDENDKLIREVKVITLKSKLVSDFRKDFQFYKVREINNYHHAHDAYLNAVVGTALIKKYPKLESEFVYGDYKVYDVRKMIAKSEQEIGKATAKYFFYSNIMNFFKTEITLANGEIRKRPLIETNGETGEIVWDKGRDFATVRKVLSMPQVNIVKKTEVQTGGFSKESILPKRNSDKLIARKKDWDPKKYGGFDSPTVAYSVLVVAKVEKGKSKKLKSVKELLGITIMERSSFEKNPIDFLEAKGYKEVKKDLIIKLPKYSLFELENGRKRMLASAGELQKGNELALPSKYVNFLYLASHYEKLKGSPEDNEQKQLFVEQHKHYLDEIIEQISEFSKRVILADANLDKVLSAYNKHRDKPIREQAENIIHLFTLTNLGAPAAFKYFDTTIDRKRYTSTKEVLDATLIHQSITGLYETRIDLSQLGGDGGEAAAKEAAAKGGTLNIEDEHRLHETSKEPDVSLGSTWLSDFPQAWAETGGMGLAVRQAPLIIPLKATSTPVSIKQYPMSQEARLGIKPHIQRLLDQGILVPCQSPWNTPLLPVKKPGTNDYRPVQDLREVNKRVEDIHPTVPNPYNLLSGLPPSHQWYTVLDLKDAFFCLRLHPTSQPLFAFEWRDPEMGISGQLTWTRLPQGFKNSPTLFNEALHRDLADFRIQHPDLILLQYVDDLLLAATSELDCQQGTRALLQTLGNLGYRASAKKAQICQKQVKYLGYLLKEGQRWLTEARKETVMGQPTPKTPRQLREFLGKAGFCRLFIPGFAEMAAPLYPLTKPGTLFNWGPDQQKAYQEIKQALLTAPALGLPDLTKPFELFVDEKQGYAKGVLTQKLGPWRRPVAYLSKKLDPVAAGWPPCLRMVAAIAVLTKDAGKLTMGQPLVILAPHAVEALVKQPPDRWLSNARMTHYQALLLDTDRVQFGPVVALNPATLLPLPEEGLQHNCLDILAEAHGTRPDLTDQPLPDADHTWYTDGSSLLQEGQRKAGAAVTTETEVIWAKALPAGTSAQRAELIALTQALKMAEGKKLNVYTDSRYAFATAHIHGEIYRRRGWLTSEGKEIKNKDEILALLKALFLPKRLSIIHCPGHQKGHSAEARGNRMADQAARKAAITETPDTSTLLAGKRTADGSEFEKRTADGSEFESPKKKAKVE

SEQ ID NO: 2846 - protein, 2094 aa, synthetic construct
MPAAKRVKLDGGDKKYSIGLDIGTNSVGWAVITDEYKVPSKKFKVLGNTDRHSIKKNLIGALLFDSGETAEATRLKRTARRRYTRRKNRICYLQEIFSNEMAKVDDSFFHRLEESFLVEEDKKHERHPIFGNIVDEVAYHEKYPTIYHLRKKLVDSTDKADLRLIYLALAHMIKFRGHFLIEGDLNPDNSDVDKLFIQLVQTYNQLFEENPINASGVDAKAILSARLSKSRRLENLIAQLPGEKKNGLFGNLIALSLGLTPNFKSNFDLAEDAKLQLSKDTYDDDLDNLLAQIGDQYADLFLAAKNLSDAILLSDILRVNTEITKAPLSASMIKRYDEHHQDLTLLKALVRQQLPEKYKEIFFDQSKNGYAGYIDGGASQEEFYKFIKPILEKMDGTEELLVKLNREDLLRKQRTFDNGSIPHQIHLGELHAILRRQEDFYPFLKDNREKIEKILTFRIPYYVGPLARGNSRFAWMTRKSEETITPWNFEEVVDKGASAQSFIERMTNFDKNLPNEKVLPKHSLLYEYFTVYNELTKVKYVTEGMRKPAFLSGEQKKAIVDLLFKTNRKVTVKQLKEDYFKKIECFDSVEISGVEDRFNASLGTYHDLLKIIKDKDFLDNEENEDILEDIVLTLTLFEDREMIEERLKTYAHLFDDKVMKQLKRRRYTGWGRLSRKLINGIRDKQSGKTILDFLKSDGFANRNFMQLIHDDSLTFKEDIQKAQVSGQGDSLHEHIANLAGSPAIKKGILQTVKVVDELVKVMGRHKPENIVIEMARENQTTQKGQKNSRERMKRIEEGIKELGSQILKEHPVENTQLQNEKLYLYYLQNGRDMYVDQELDINRLSDYDVDHIVPQSFLKDDSIDNKVLTRSDKARGKSDNVPSEEVVKKMKNYWRQLLNAKLITQRKFDNLTKAERGGLSELDKAGFIKRQLVETRQITKHVAQILDSRMNTKYDENDKLIREVKVITLKSKLVSDFRKDFQFYKVREINNYHHAHDAYLNAVVGTALIKKYPKLESEFVYGDYKVYDVRKMIAKSEQEIGKATAKYFFYSNIMNFFKTEITLANGEIRKRPLIETNGETGEIVWDKGRDFATVRKVLSMPQVNIVKKTEVQTGGFSKESILPKRNSDKLIARKKDWDPKKYGGFDSPTVAYSVLVVAKVEKGKSKKLKSVKELLGITIMERSSFEKNPIDFLEAKGYKEVKKDLIIKLPKYSLFELENGRKRMLASAGELQKGNELALPSKYVNFLYLASHYEKLKGSPEDNEQKQLFVEQHKHYLDEIIEQISEFSKRVILADANLDKVLSAYNKHRDKPIREQAENIIHLFTLTNLGAPAAFKYFDTTIDRKRYTSTKEVLDATLIHQSITGLYETRIDLSQLGGDGGGGGGGSGSSGGTLNIEDEHRLHETSKEPDVSLGSTWLSDFPQAWAETGGMGLAVRQAPLIIPLKATSTPVSIKQYPMSQEARLGIKPHIQRLLDQGILVPCQSPWNTPLLPVKKPGTNDYRPVQDLREVNKRVEDIHPTVPNPYNLLSGLPPSHQWYTVLDLKDAFFCLRLHPTSQPLFAFEWRDPEMGISGQLTWTRLPQGFKNSPTLFNEALHRDLADFRIQHPDLILLQYVDDLLLAATSELDCQQGTRALLQTLGNLGYRASAKKAQICQKQVKYLGYLLKEGQRWLTEARKETVMGQPTPKTPRQLREFLGKAGFCRLFIPGFAEMAAPLYPLTKPGTLFNWGPDQQKAYQEIKQALLTAPALGLPDLTKPFELFVDEKQGYAKGVLTQKLGPWRRPVAYLSKKLDPVAAGWPPCLRMVAAIAVLTKDAGKLTMGQPLVILAPHAVEALVKQPPDRWLSNARMTHYQALLLDTDRVQFGPVVALNPATLLPLPEEGLQHNCLDILAEAHGTRPDLTDQPLPDADHTWYTDGSSLLQEGQRKAGAAVTTETEVIWAKALPAGTSAQRAELIALTQALKMAEGKKLNVYTDSRYAFATAHIHGEIYRRRGWLTSEGKEIKNKDEILALLKALFLPKRLSIIHCPGHQKGHSAEARGNRMADQAARKAAITETPDTSTLLAGKRTADGSEFEKRTADGSEFESPKKKAKVE

SEQ ID NO: 2847 - protein, 2094 aa, synthetic construct
MPAAKRVKLDGGDKKYSIGLDIGTNSVGWAVITDEYKVPSKKFKVLGNTDRHSIKKNLIGALLFDSGETAEATRLKRTARRRYTRRKNRICYLQEIFSNEMAKVDDSFFHRLEESFLVEEDKKHERHPIFGNIVDEVAYHEKYPTIYHLRKKLVDSTDKADLRLIYLALAHMIKFRGHFLIEGDLNPDNSDVDKLFIQLVQTYNQLFEENPINASGVDAKAILSARLSKSRRLENLIAQLPGEKKNGLFGNLIALSLGLTPNFKSNFDLAEDAKLQLSKDTYDDDLDNLLAQIGDQYADLFLAAKNLSDAILLSDILRVNTEITKAPLSASMIKRYDEHHQDLTLLKALVRQQLPEKYKEIFFDQSKNGYAGYIDGGASQEEFYKFIKPILEKMDGTEELLVKLNREDLLRKQRTFDNGSIPHQIHLGELHAILRRQEDFYPFLKDNREKIEKILTFRIPYYVGPLARGNSRFAWMTRKSEETITPWNFEEVVDKGASAQSFIERMTNFDKNLPNEKVLPKHSLLYEYFTVYNELTKVKYVTEGMRKPAFLSGEQKKAIVDLLFKTNRKVTVKQLKEDYFKKIECFDSVEISGVEDRFNASLGTYHDLLKIIKDKDFLDNEENEDILEDIVLTLTLFEDREMIEERLKTYAHLFDDKVMKQLKRRRYTGWGRLSRKLINGIRDKQSGKTILDFLKSDGFANRNFMQLIHDDSLTFKEDIQKAQVSGQGDSLHEHIANLAGSPAIKKGILQTVKVVDELVKVMGRHKPENIVIEMARENQTTQKGQKNSRERMKRIEEGIKELGSQILKEHPVENTQLQNEKLYLYYLQNGRDMYVDQELDINRLSDYDVDHIVPQSFLKDDSIDNKVLTRSDKARGKSDNVPSEEVVKKMKNYWRQLLNAKLITQRKFDNLTKAERGGLSELDKAGFIKRQLVETRQITKHVAQILDSRMNTKYDENDKLIREVKVITLKSKLVSDFRKDFQFYKVREINNYHHAHDAYLNAVVGTALIKKYPKLESEFVYGDYKVYDVRKMIAKSEQEIGKATAKYFFYSNIMNFFKTEITLANGEIRKRPLIETNGETGEIVWDKGRDFATVRKVLSMPQVNIVKKTEVQTGGFSKESILPKRNSDKLIARKKDWDPKKYGGFDSPTVAYSVLVVAKVEKGKSKKLKSVKELLGITIMERSSFEKNPIDFLEAKGYKEVKKDLIIKLPKYSLFELENGRKRMLASAGELQKGNELALPSKYVNFLYLASHYEKLKGSPEDNEQKQLFVEQHKHYLDEIIEQISEFSKRVILADANLDKVLSAYNKHRDKPIREQAENIIHLFTLTNLGAPAAFKYFDTTIDRKRYTSTKEVLDATLIHQSITGLYETRIDLSQLGGDGGPAPGSSGGGGGTLNIEDEHRLHETSKEPDVSLGSTWLSDFPQAWAETGGMGLAVRQAPLIIPLKATSTPVSIKQYPMSQEARLGIKPHIQRLLDQGILVPCQSPWNTPLLPVKKPGTNDYRPVQDLREVNKRVEDIHPTVPNPYNLLSGLPPSHQWYTVLDLKDAFFCLRLHPTSQPLFAFEWRDPEMGISGQLTWTRLPQGFKNSPTLFNEALHRDLADFRIQHPDLILLQYVDDLLLAATSELDCQQGTRALLQTLGNLGYRASAKKAQICQKQVKYLGYLLKEGQRWLTEARKETVMGQPTPKTPRQLREFLGKAGFCRLFIPGFAEMAAPLYPLTKPGTLFNWGPDQQKAYQEIKQALLTAPALGLPDLTKPFELFVDEKQGYAKGVLTQKLGPWRRPVAYLSKKLDPVAAGWPPCLRMVAAIAVLTKDAGKLTMGQPLVILAPHAVEALVKQPPDRWLSNARMTHYQALLLDTDRVQFGPVVALNPATLLPLPEEGLQHNCLDILAEAHGTRPDLTDQPLPDADHTWYTDGSSLLQEGQRKAGAAVTTETEVIWAKALPAGTSAQRAELIALTQALKMAEGKKLNVYTDSRYAFATAHIHGEIYRRRGWLTSEGKEIKNKDEILALLKALFLPKRLSIIHCPGHQKGHSAEARGNRMADQAARKAAITETPDTSTLLAGKRTADGSEFEKRTADGSEFESPKKKAKVE

SEQ ID NO: 2848 - protein, 2094 aa, synthetic construct
MPAAKRVKLDGGDKKYSIGLDIGTNSVGWAVITDEYKVPSKKFKVLGNTDRHSIKKNLIGALLFDSGETAEATRLKRTARRRYTRRKNRICYLQEIFSNEMAKVDDSFFHRLEESFLVEEDKKHERHPIFGNIVDEVAYHEKYPTIYHLRKKLVDSTDKADLRLIYLALAHMIKFRGHFLIEGDLNPDNSDVDKLFIQLVQTYNQLFEENPINASGVDAKAILSARLSKSRRLENLIAQLPGEKKNGLFGNLIALSLGLTPNFKSNFDLAEDAKLQLSKDTYDDDLDNLLAQIGDQYADLFLAAKNLSDAILLSDILRVNTEITKAPLSASMIKRYDEHHQDLTLLKALVRQQLPEKYKEIFFDQSKNGYAGYIDGGASQEEFYKFIKPILEKMDGTEELLVKLNREDLLRKQRTFDNGSIPHQIHLGELHAILRRQEDFYPFLKDNREKIEKILTFRIPYYVGPLARGNSRFAWMTRKSEETITPWNFEEVVDKGASAQSFIERMTNFDKNLPNEKVLPKHSLLYEYFTVYNELTKVKYVTEGMRKPAFLSGEQKKAIVDLLFKTNRKVTVKQLKEDYFKKIECFDSVEISGVEDRFNASLGTYHDLLKIIKDKDFLDNEENEDILEDIVLTLTLFEDREMIEERLKTYAHLFDDKVMKQLKRRRYTGWGRLSRKLINGIRDKQSGKTILDFLKSDGFANRNFMQLIHDDSLTFKEDIQKAQVSGQGDSLHEHIANLAGSPAIKKGILQTVKVVDELVKVMGRHKPENIVIEMARENQTTQKGQKNSRERMKRIEEGIKELGSQILKEHPVENTQLQNEKLYLYYLQNGRDMYVDQELDINRLSDYDVDHIVPQSFLKDDSIDNKVLTRSDKARGKSDNVPSEEVVKKMKNYWRQLLNAKLITQRKFDNLTKAERGGLSELDKAGFIKRQLVETRQITKHVAQILDSRMNTKYDENDKLIREVKVITLKSKLVSDFRKDFQFYKVREINNYHHAHDAYLNAVVGTALIKKYPKLESEFVYGDYKVYDVRKMIAKSEQEIGKATAKYFFYSNIMNFFKTEITLANGEIRKRPLIETNGETGEIVWDKGRDFATVRKVLSMPQVNIVKKTEVQTGGFSKESILPKRNSDKLIARKKDWDPKKYGGFDSPTVAYSVLVVAKVEKGKSKKLKSVKELLGITIMERSSFEKNPIDFLEAKGYKEVKKDLIIKLPKYSLFELENGRKRMLASAGELQKGNELALPSKYVNFLYLASHYEKLKGSPEDNEQKQLFVEQHKHYLDEIIEQISEFSKRVILADANLDKVLSAYNKHRDKPIREQAENIIHLFTLTNLGAPAAFKYFDTTIDRKRYTSTKEVLDATLIHQSITGLYETRIDLSQLGGDGGGGGGSSPAPGGTLNIEDEHRLHETSKEPDVSLGSTWLSDFPQAWAETGGMGLAVRQAPLIIPLKATSTPVSIKQYPMSQEARLGIKPHIQRLLDQGILVPCQSPWNTPLLPVKKPGTNDYRPVQDLREVNKRVEDIHPTVPNPYNLLSGLPPSHQWYTVLDLKDAFFCLRLHPTSQPLFAFEWRDPEMGISGQLTWTRLPQGFKNSPTLFNEALHRDLADFRIQHPDLILLQYVDDLLLAATSELDCQQGTRALLQTLGNLGYRASAKKAQICQKQVKYLGYLLKEGQRWLTEARKETVMGQPTPKTPRQLREFLGKAGFCRLFIPGFAEMAAPLYPLTKPGTLFNWGPDQQKAYQEIKQALLTAPALGLPDLTKPFELFVDEKQGYAKGVLTQKLGPWRRPVAYLSKKLDPVAAGWPPCLRMVAAIAVLTKDAGKLTMGQPLVILAPHAVEALVKQPPDRWLSNARMTHYQALLLDTDRVQFGPVVALNPATLLPLPEEGLQHNCLDILAEAHGTRPDLTDQPLPDADHTWYTDGSSLLQEGQRKAGAAVTTETEVIWAKALPAGTSAQRAELIALTQALKMAEGKKLNVYTDSRYAFATAHIHGEIYRRRGWLTSEGKEIKNKDEILALLKALFLPKRLSIIHCPGHQKGHSAEARGNRMADQAARKAAITETPDTSTLLAGKRTADGSEFEKRTADGSEFESPKKKAKVE

SEQ ID NO: 2849 - protein, 2093 aa, synthetic construct
MPAAKRVKLDGGDKKYSIGLDIGTNSVGWAVITDEYKVPSKKFKVLGNTDRHSIKKNLIGALLFDSGETAEATRLKRTARRRYTRRKNRICYLQEIFSNEMAKVDDSFFHRLEESFLVEEDKKHERHPIFGNIVDEVAYHEKYPTIYHLRKKLVDSTDKADLRLIYLALAHMIKFRGHFLIEGDLNPDNSDVDKLFIQLVQTYNQLFEENPINASGVDAKAILSARLSKSRRLENLIAQLPGEKKNGLFGNLIALSLGLTPNFKSNFDLAEDAKLQLSKDTYDDDLDNLLAQIGDQYADLFLAAKNLSDAILLSDILRVNTEITKAPLSASMIKRYDEHHQDLTLLKALVRQQLPEKYKEIFFDQSKNGYAGYIDGGASQEEFYKFIKPILEKMDGTEELLVKLNREDLLRKQRTFDNGSIPHQIHLGELHAILRRQEDFYPFLKDNREKIEKILTFRIPYYVGPLARGNSRFAWMTRKSEETITPWNFEEVVDKGASAQSFIERMTNFDKNLPNEKVLPKHSLLYEYFTVYNELTKVKYVTEGMRKPAFLSGEQKKAIVDLLFKTNRKVTVKQLKEDYFKKIECFDSVEISGVEDRFNASLGTYHDLLKIIKDKDFLDNEENEDILEDIVLTLTLFEDREMIEERLKTYAHLFDDKVMKQLKRRRYTGWGRLSRKLINGIRDKQSGKTILDFLKSDGFANRNFMQLIHDDSLTFKEDIQKAQVSGQGDSLHEHIANLAGSPAIKKGILQTVKVVDELVKVMGRHKPENIVIEMARENQTTQKGQKNSRERMKRIEEGIKELGSQILKEHPVENTQLQNEKLYLYYLQNGRDMYVDQELDINRLSDYDVDHIVPQSFLKDDSIDNKVLTRSDKARGKSDNVPSEEVVKKMKNYWRQLLNAKLITQRKFDNLTKAERGGLSELDKAGFIKRQLVETRQITKHVAQILDSRMNTKYDENDKLIREVKVITLKSKLVSDFRKDFQFYKVREINNYHHAHDAYLNAVVGTALIKKYPKLESEFVYGDYKVYDVRKMIAKSEQEIGKATAKYFFYSNIMNFFKTEITLANGEIRKRPLIETNGETGEIVWDKGRDFATVRKVLSMPQVNIVKKTEVQTGGFSKESILPKRNSDKLIARKKDWDPKKYGGFDSPTVAYSVLVVAKVEKGKSKKLKSVKELLGITIMERSSFEKNPIDFLEAKGYKEVKKDLIIKLPKYSLFELENGRKRMLASAGELQKGNELALPSKYVNFLYLASHYEKLKGSPEDNEQKQLFVEQHKHYLDEIIEQISEFSKRVILADANLDKVLSAYNKHRDKPIREQAENIIHLFTLTNLGAPAAFKYFDTTIDRKRYTSTKEVLDATLIHQSITGLYETRIDLSQLGGDGGGGSEAAAKGGTLNIEDEHRLHETSKEPDVSLGSTWLSDFPQAWAETGGMGLAVRQAPLIIPLKATSTPVSIKQYPMSQEARLGIKPHIQRLLDQGILVPCQSPWNTPLLPVKKPGTNDYRPVQDLREVNKRVEDIHPTVPNPYNLLSGLPPSHQWYTVLDLKDAFFCLRLHPTSQPLFAFEWRDPEMGISGQLTWTRLPQGFKNSPTLFNEALHRDLADFRIQHPDLILLQYVDDLLLAATSELDCQQGTRALLQTLGNLGYRASAKKAQICQKQVKYLGYLLKEGQRWLTEARKETVMGQPTPKTPRQLREFLGKAGFCRLFIPGFAEMAAPLYPLTKPGTLFNWGPDQQKAYQEIKQALLTAPALGLPDLTKPFELFVDEKQGYAKGVLTQKLGPWRRPVAYLSKKLDPVAAGWPPCLRMVAAIAVLTKDAGKLTMGQPLVILAPHAVEALVKQPPDRWLSNARMTHYQALLLDTDRVQFGPVVALNPATLLPLPEEGLQHNCLDILAEAHGTRPDLTDQPLPDADHTWYTDGSSLLQEGQRKAGAAVTTETEVIWAKALPAGTSAQRAELIALTQALKMAEGKKLNVYTDSRYAFATAHIHGEIYRRRGWLTSEGKEIKNKDEILALLKALFLPKRLSIIHCPGHQKGHSAEARGNRMADQAARKAAITETPDTSTLLAGKRTADGSEFEKRTADGSEFESPKKKAKVE

SEQ ID NO: 2850 - protein, 2093 aa, synthetic construct
MPAAKRVKLDGGDKKYSIGLDIGTNSVGWAVITDEYKVPSKKFKVLGNTDRHSIKKNLIGALLFDSGETAEATRLKRTARRRYTRRKNRICYLQEIFSNEMAKVDDSFFHRLEESFLVEEDKKHERHPIFGNIVDEVAYHEKYPTIYHLRKKLVDSTDKADLRLIYLALAHMIKFRGHFLIEGDLNPDNSDVDKLFIQLVQTYNQLFEENPINASGVDAKAILSARLSKSRRLENLIAQLPGEKKNGLFGNLIALSLGLTPNFKSNFDLAEDAKLQLSKDTYDDDLDNLLAQIGDQYADLFLAAKNLSDAILLSDILRVNTEITKAPLSASMIKRYDEHHQDLTLLKALVRQQLPEKYKEIFFDQSKNGYAGYIDGGASQEEFYKFIKPILEKMDGTEELLVKLNREDLLRKQRTFDNGSIPHQIHLGELHAILRRQEDFYPFLKDNREKIEKILTFRIPYYVGPLARGNSRFAWMTRKSEETITPWNFEEVVDKGASAQSFIERMTNFDKNLPNEKVLPKHSLLYEYFTVYNELTKVKYVTEGMRKPAFLSGEQKKAIVDLLFKTNRKVTVKQLKEDYFKKIECFDSVEISGVEDRFNASLGTYHDLLKIIKDKDFLDNEENEDILEDIVLTLTLFEDREMIEERLKTYAHLFDDKVMKQLKRRRYTGWGRLSRKLINGIRDKQSGKTILDFLKSDGFANRNFMQLIHDDSLTFKEDIQKAQVSGQGDSLHEHIANLAGSPAIKKGILQTVKVVDELVKVMGRHKPENIVIEMARENQTTQKGQKNSRERMKRIEEGIKELGSQILKEHPVENTQLQNEKLYLYYLQNGRDMYVDQELDINRLSDYDVDHIVPQSFLKDDSIDNKVLTRSDKARGKSDNVPSEEVVKKMKNYWRQLLNAKLITQRKFDNLTKAERGGLSELDKAGFIKRQLVETRQITKHVAQILDSRMNTKYDENDKLIREVKVITLKSKLVSDFRKDFQFYKVREINNYHHAHDAYLNAVVGTALIKKYPKLESEFVYGDYKVYDVRKMIAKSEQEIGKATAKYFFYSNIMNFFKTEITLANGEIRKRPLIETNGETGEIVWDKGRDFATVRKVLSMPQVNIVKKTEVQTGGFSKESILPKRNSDKLIARKKDWDPKKYGGFDSPTVAYSVLVVAKVEKGKSKKLKSVKELLGITIMERSSFEKNPIDFLEAKGYKEVKKDLIIKLPKYSLFELENGRKRMLASAGELQKGNELALPSKYVNFLYLASHYEKLKGSPEDNEQKQLFVEQHKHYLDEIIEQISEFSKRVILADANLDKVLSAYNKHRDKPIREQAENIIHLFTLTNLGAPAAFKYFDTTIDRKRYTSTKEVLDATLIHQSITGLYETRIDLSQLGGDGGEAAAKPAPGGTLNIEDEHRLHETSKEPDVSLGSTWLSDFPQAWAETGGMGLAVRQAPLIIPLKATSTPVSIKQYPMSQEARLGIKPHIQRLLDQGILVPCQSPWNTPLLPVKKPGTNDYRPVQDLREVNKRVEDIHPTVPNPYNLLSGLPPSHQWYTVLDLKDAFFCLRLHPTSQPLFAFEWRDPEMGISGQLTWTRLPQGFKNSPTLFNEALHRDLADFRIQHPDLILLQYVDDLLLAATSELDCQQGTRALLQTLGNLGYRASAKKAQICQKQVKYLGYLLKEGQRWLTEARKETVMGQPTPKTPRQLREFLGKAGFCRLFIPGFAEMAAPLYPLTKPGTLFNWGPDQQKAYQEIKQALLTAPALGLPDLTKPFELFVDEKQGYAKGVLTQKLGPWRRPVAYLSKKLDPVAAGWPPCLRMVAAIAVLTKDAGKLTMGQPLVILAPHAVEALVKQPPDRWLSNARMTHYQALLLDTDRVQFGPVVALNPATLLPLPEEGLQHNCLDILAEAHGTRPDLTDQPLPDADHTWYTDGSSLLQEGQRKAGAAVTTETEVIWAKALPAGTSAQRAELIALTQALKMAEGKKLNVYTDSRYAFATAHIHGEIYRRRGWLTSEGKEIKNKDEILALLKALFLPKRLSIIHCPGHQKGHSAEARGNRMADQAARKAAITETPDTSTLLAGKRTADGSEFEKRTADGSEFESPKKKAKVE

SEQ ID NO: 2851 - protein, 2096 aa, synthetic construct
MPAAKRVKLDGGDKKYSIGLDIGTNSVGWAVITDEYKVPSKKFKVLGNTDRHSIKKNLIGALLFDSGETAEATRLKRTARRRYTRRKNRICYLQEIFSNEMAKVDDSFFHRLEESFLVEEDKKHERHPIFGNIVDEVAYHEKYPTIYHLRKKLVDSTDKADLRLIYLALAHMIKFRGHFLIEGDLNPDNSDVDKLFIQLVQTYNQLFEENPINASGVDAKAILSARLSKSRRLENLIAQLPGEKKNGLFGNLIALSLGLTPNFKSNFDLAEDAKLQLSKDTYDDDLDNLLAQIGDQYADLFLAAKNLSDAILLSDILRVNTEITKAPLSASMIKRYDEHHQDLTLLKALVRQQLPEKYKEIFFDQSKNGYAGYIDGGASQEEFYKFIKPILEKMDGTEELLVKLNREDLLRKQRTFDNGSIPHQIHLGELHAILRRQEDFYPFLKDNREKIEKILTFRIPYYVGPLARGNSRFAWMTRKSEETITPWNFEEVVDKGASAQSFIERMTNFDKNLPNEKVLPKHSLLYEYFTVYNELTKVKYVTEGMRKPAFLSGEQKKAIVDLLFKTNRKVTVKQLKEDYFKKIECFDSVEISGVEDRFNASLGTYHDLLKIIKDKDFLDNEENEDILEDIVLTLTLFEDREMIEERLKTYAHLFDDKVMKQLKRRRYTGWGRLSRKLINGIRDKQSGKTILDFLKSDGFANRNFMQLIHDDSLTFKEDIQKAQVSGQGDSLHEHIANLAGSPAIKKGILQTVKVVDELVKVMGRHKPENIVIEMARENQTTQKGQKNSRERMKRIEEGIKELGSQILKEHPVENTQLQNEKLYLYYLQNGRDMYVDQELDINRLSDYDVDHIVPQSFLKDDSIDNKVLTRSDKARGKSDNVPSEEVVKKMKNYWRQLLNAKLITQRKFDNLTKAERGGLSELDKAGFIKRQLVETRQITKHVAQILDSRMNTKYDENDKLIREVKVITLKSKLVSDFRKDFQFYKVREINNYHHAHDAYLNAVVGTALIKKYPKLESEFVYGDYKVYDVRKMIAKSEQEIGKATAKYFFYSNIMNFFKTEITLANGEIRKRPLIETNGETGEIVWDKGRDFATVRKVLSMPQVNIVKKTEVQTGGFSKESILPKRNSDKLIARKKDWDPKKYGGFDSPTVAYSVLVVAKVEKGKSKKLKSVKELLGITIMERSSFEKNPIDFLEAKGYKEVKKDLIIKLPKYSLFELENGRKRMLASAGELQKGNELALPSKYVNFLYLASHYEKLKGSPEDNEQKQLFVEQHKHYLDEIIEQISEFSKRVILADANLDKVLSAYNKHRDKPIREQAENIIHLFTLTNLGAPAAFKYFDTTIDRKRYTSTKEVLDATLIHQSITGLYETRIDLSQLGGDGGPAPAPAPAPAPGGTLNIEDEHRLHETSKEPDVSLGSTWLSDFPQAWAETGGMGLAVRQAPLIIPLKATSTPVSIKQYPMSQEARLGIKPHIQRLLDQGILVPCQSPWNTPLLPVKKPGTNDYRPVQDLREVNKRVEDIHPTVPNPYNLLSGLPPSHQWYTVLDLKDAFFCLRLHPTSQPLFAFEWRDPEMGISGQLTWTRLPQGFKNSPTLFNEALHRDLADFRIQHPDLILLQYVDDLLLAATSELDCQQGTRALLQTLGNLGYRASAKKAQICQKQVKYLGYLLKEGQRWLTEARKETVMGQPTPKTPRQLREFLGKAGFCRLFIPGFAEMAAPLYPLTKPGTLFNWGPDQQKAYQEIKQALLTAPALGLPDLTKPFELFVDEKQGYAKGVLTQKLGPWRRPVAYLSKKLDPVAAGWPPCLRMVAAIAVLTKDAGKLTMGQPLVILAPHAVEALVKQPPDRWLSNARMTHYQALLLDTDRVQFGPVVALNPATLLPLPEEGLQHNCLDILAEAHGTRPDLTDQPLPDADHTWYTDGSSLLQEGQRKAGAAVTTETEVIWAKALPAGTSAQRAELIALTQALKMAEGKKLNVYTDSRYAFATAHIHGEIYRRRGWLTSEGKEIKNKDEILALLKALFLPKRLSIIHCPGHQKGHSAEARGNRMADQAARKAAITETPDTSTLLAGKRTADGSEFEKRTADGSEFESPKKKAKVE

SEQ ID NO: 2852 - protein, 2094 aa, synthetic construct
MPAAKRVKLDGGDKKYSIGLDIGTNSVGWAVITDEYKVPSKKFKVLGNTDRHSIKKNLIGALLFDSGETAEATRLKRTARRRYTRRKNRICYLQEIFSNEMAKVDDSFFHRLEESFLVEEDKKHERHPIFGNIVDEVAYHEKYPTIYHLRKKLVDSTDKADLRLIYLALAHMIKFRGHFLIEGDLNPDNSDVDKLFIQLVQTYNQLFEENPINASGVDAKAILSARLSKSRRLENLIAQLPGEKKNGLFGNLIALSLGLTPNFKSNFDLAEDAKLQLSKDTYDDDLDNLLAQIGDQYADLFLAAKNLSDAILLSDILRVNTEITKAPLSASMIKRYDEHHQDLTLLKALVRQQLPEKYKEIFFDQSKNGYAGYIDGGASQEEFYKFIKPILEKMDGTEELLVKLNREDLLRKQRTFDNGSIPHQIHLGELHAILRRQEDFYPFLKDNREKIEKILTFRIPYYVGPLARGNSRFAWMTRKSEETITPWNFEEVVDKGASAQSFIERMTNFDKNLPNEKVLPKHSLLYEYFTVYNELTKVKYVTEGMRKPAFLSGEQKKAIVDLLFKTNRKVTVKQLKEDYFKKIECFDSVEISGVEDRFNASLGTYHDLLKIIKDKDFLDNEENEDILEDIVLTLTLFEDREMIEERLKTYAHLFDDKVMKQLKRRRYTGWGRLSRKLINGIRDKQSGKTILDFLKSDGFANRNFMQLIHDDSLTFKEDIQKAQVSGQGDSLHEHIANLAGSPAIKKGILQTVKVVDELVKVMGRHKPENIVIEMARENQTTQKGQKNSRERMKRIEEGIKELGSQILKEHPVENTQLQNEKLYLYYLQNGRDMYVDQELDINRLSDYDVDHIVPQSFLKDDSIDNKVLTRSDKARGKSDNVPSEEVVKKMKNYWRQLLNAKLITQRKFDNLTKAERGGLSELDKAGFIKRQLVETRQITKHVAQILDSRMNTKYDENDKLIREVKVITLKSKLVSDFRKDFQFYKVREINNYHHAHDAYLNAVVGTALIKKYPKLESEFVYGDYKVYDVRKMIAKSEQEIGKATAKYFFYSNIMNFFKTEITLANGEIRKRPLIETNGETGEIVWDKGRDFATVRKVLSMPQVNIVKKTEVQTGGFSKESILPKRNSDKLIARKKDWDPKKYGGFDSPTVAYSVLVVAKVEKGKSKKLKSVKELLGITIMERSSFEKNPIDFLEAKGYKEVKKDLIIKLPKYSLFELENGRKRMLASAGELQKGNELALPSKYVNFLYLASHYEKLKGSPEDNEQKQLFVEQHKHYLDEIIEQISEFSKRVILADANLDKVLSAYNKHRDKPIREQAENIIHLFTLTNLGAPAAFKYFDTTIDRKRYTSTKEVLDATLIHQSITGLYETRIDLSQLGGDGGGGSPAPGSSGGTLNIEDEHRLHETSKEPDVSLGSTWLSDFPQAWAETGGMGLAVRQAPLIIPLKATSTPVSIKQYPMSQEARLGIKPHIQRLLDQGILVPCQSPWNTPLLPVKKPGTNDYRPVQDLREVNKRVEDIHPTVPNPYNLLSGLPPSHQWYTVLDLKDAFFCLRLHPTSQPLFAFEWRDPEMGISGQLTWTRLPQGFKNSPTLFNEALHRDLADFRIQHPDLILLQYVDDLLLAATSELDCQQGTRALLQTLGNLGYRASAKKAQICQKQVKYLGYLLKEGQRWLTEARKETVMGQPTPKTPRQLREFLGKAGFCRLFIPGFAEMAAPLYPLTKPGTLFNWGPDQQKAYQEIKQALLTAPALGLPDLTKPFELFVDEKQGYAKGVLTQKLGPWRRPVAYLSKKLDPVAAGWPPCLRMVAAIAVLTKDAGKLTMGQPLVILAPHAVEALVKQPPDRWLSNARMTHYQALLLDTDRVQFGPVVALNPATLLPLPEEGLQHNCLDILAEAHGTRPDLTDQPLPDADHTWYTDGSSLLQEGQRKAGAAVTTETEVIWAKALPAGTSAQRAELIALTQALKMAEGKKLNVYTDSRYAFATAHIHGEIYRRRGWLTSEGKEIKNKDEILALLKALFLPKRLSIIHCPGHQKGHSAEARGNRMADQAARKAAITETPDTSTLLAGKRTADGSEFEKRTADGSEFESPKKKAKVE

SEQ ID NO: 2853 - protein, 2091 aa, synthetic construct
MPAAKRVKLDGGDKKYSIGLDIGTNSVGWAVITDEYKVPSKKFKVLGNTDRHSIKKNLIGALLFDSGETAEATRLKRTARRRYTRRKNRICYLQEIFSNEMAKVDDSFFHRLEESFLVEEDKKHERHPIFGNIVDEVAYHEKYPTIYHLRKKLVDSTDKADLRLIYLALAHMIKFRGHFLIEGDLNPDNSDVDKLFIQLVQTYNQLFEENPINASGVDAKAILSARLSKSRRLENLIAQLPGEKKNGLFGNLIALSLGLTPNFKSNFDLAEDAKLQLSKDTYDDDLDNLLAQIGDQYADLFLAAKNLSDAILLSDILRVNTEITKAPLSASMIKRYDEHHQDLTLLKALVRQQLPEKYKEIFFDQSKNGYAGYIDGGASQEEFYKFIKPILEKMDGTEELLVKLNREDLLRKQRTFDNGSIPHQIHLGELHAILRRQEDFYPFLKDNREKIEKILTFRIPYYVGPLARGNSRFAWMTRKSEETITPWNFEEVVDKGASAQSFIERMTNFDKNLPNEKVLPKHSLLYEYFTVYNELTKVKYVTEGMRKPAFLSGEQKKAIVDLLFKTNRKVTVKQLKEDYFKKIECFDSVEISGVEDRFNASLGTYHDLLKIIKDKDFLDNEENEDILEDIVLTLTLFEDREMIEERLKTYAHLFDDKVMKQLKRRRYTGWGRLSRKLINGIRDKQSGKTILDFLKSDGFANRNFMQLIHDDSLTFKEDIQKAQVSGQGDSLHEHIANLAGSPAIKKGILQTVKVVDELVKVMGRHKPENIVIEMARENQTTQKGQKNSRERMKRIEEGIKELGSQILKEHPVENTQLQNEKLYLYYLQNGRDMYVDQELDINRLSDYDVDHIVPQSFLKDDSIDNKVLTRSDKARGKSDNVPSEEVVKKMKNYWRQLLNAKLITQRKFDNLTKAERGGLSELDKAGFIKRQLVETRQITKHVAQILDSRMNTKYDENDKLIREVKVITLKSKLVSDFRKDFQFYKVREINNYHHAHDAYLNAVVGTALIKKYPKLESEFVYGDYKVYDVRKMIAKSEQEIGKATAKYFFYSNIMNFFKTEITLANGEIRKRPLIETNGETGEIVWDKGRDFATVRKVLSMPQVNIVKKTEVQTGGFSKESILPKRNSDKLIARKKDWDPKKYGGFDSPTVAYSVLVVAKVEKGKSKKLKSVKELLGITIMERSSFEKNPIDFLEAKGYKEVKKDLIIKLPKYSLFELENGRKRMLASAGELQKGNELALPSKYVNFLYLASHYEKLKGSPEDNEQKQLFVEQHKHYLDEIIEQISEFSKRVILADANLDKVLSAYNKHRDKPIREQAENIIHLFTLTNLGAPAAFKYFDTTIDRKRYTSTKEVLDATLIHQSITGLYETRIDLSQLGGDGGGGSGGSGGTLNIEDEHRLHETSKEPDVSLGSTWLSDFPQAWAETGGMGLAVRQAPLIIPLKATSTPVSIKQYPMSQEARLGIKPHIQRLLDQGILVPCQSPWNTPLLPVKKPGTNDYRPVQDLREVNKRVEDIHPTVPNPYNLLSGLPPSHQWYTVLDLKDAFFCLRLHPTSQPLFAFEWRDPEMGISGQLTWTRLPQGFKNSPTLFNEALHRDLADFRIQHPDLILLQYVDDLLLAATSELDCQQGTRALLQTLGNLGYRASAKKAQICQKQVKYLGYLLKEGQRWLTEARKETVMGQPTPKTPRQLREFLGKAGFCRLFIPGFAEMAAPLYPLTKPGTLFNWGPDQQKAYQEIKQALLTAPALGLPDLTKPFELFVDEKQGYAKGVLTQKLGPWRRPVAYLSKKLDPVAAGWPPCLRMVAAIAVLTKDAGKLTMGQPLVILAPHAVEALVKQPPDRWLSNARMTHYQALLLDTDRVQFGPVVALNPATLLPLPEEGLQHNCLDILAEAHGTRPDLTDQPLPDADHTWYTDGSSLLQEGQRKAGAAVTTETEVIWAKALPAGTSAQRAELIALTQALKMAEGKKLNVYTDSRYAFATAHIHGEIYRRRGWLTSEGKEIKNKDEILALLKALFLPKRLSIIHCPGHQKGHSAEARGNRMADQAARKAAITETPDTSTLLAGKRTADGSEFEKRTADGSEFESPKKKAKVE

SEQ ID NO: 2854 - protein, 2094 aa, synthetic construct
MPAAKRVKLDGGDKKYSIGLDIGTNSVGWAVITDEYKVPSKKFKVLGNTDRHSIKKNLIGALLFDSGETAEATRLKRTARRRYTRRKNRICYLQEIFSNEMAKVDDSFFHRLEESFLVEEDKKHERHPIFGNIVDEVAYHEKYPTIYHLRKKLVDSTDKADLRLIYLALAHMIKFRGHFLIEGDLNPDNSDVDKLFIQLVQTYNQLFEENPINASGVDAKAILSARLSKSRRLENLIAQLPGEKKNGLFGNLIALSLGLTPNFKSNFDLAEDAKLQLSKDTYDDDLDNLLAQIGDQYADLFLAAKNLSDAILLSDILRVNTEITKAPLSASMIKRYDEHHQDLTLLKALVRQQLPEKYKEIFFDQSKNGYAGYIDGGASQEEFYKFIKPILEKMDGTEELLVKLNREDLLRKQRTFDNGSIPHQIHLGELHAILRRQEDFYPFLKDNREKIEKILTFRIPYYVGPLARGNSRFAWMTRKSEETITPWNFEEVVDKGASAQSFIERMTNFDKNLPNEKVLPKHSLLYEYFTVYNELTKVKYVTEGMRKPAFLSGEQKKAIVDLLFKTNRKVTVKQLKEDYFKKIECFDSVEISGVEDRFNASLGTYHDLLKIIKDKDFLDNEENEDILEDIVLTLTLFEDREMIEERLKTYAHLFDDKVMKQLKRRRYTGWGRLSRKLINGIRDKQSGKTILDFLKSDGFANRNFMQLIHDDSLTFKEDIQKAQVSGQGDSLHEHIANLAGSPAIKKGILQTVKVVDELVKVMGRHKPENIVIEMARENQTTQKGQKNSRERMKRIEEGIKELGSQILKEHPVENTQLQNEKLYLYYLQNGRDMYVDQELDINRLSDYDVDHIVPQSFLKDDSIDNKVLTRSDKARGKSDNVPSEEVVKKMKNYWRQLLNAKLITQRKFDNLTKAERGGLSELDKAGFIKRQLVETRQITKHVAQILDSRMNTKYDENDKLIREVKVITLKSKLVSDFRKDFQFYKVREINNYHHAHDAYLNAVVGTALIKKYPKLESEFVYGDYKVYDVRKMIAKSEQEIGKATAKYFFYSNIMNFFKTEITLANGEIRKRPLIETNGETGEIVWDKGRDFATVRKVLSMPQVNIVKKTEVQTGGFSKESILPKRNSDKLIARKKDWDPKKYGGFDSPTVAYSVLVVAKVEKGKSKKLKSVKELLGITIMERSSFEKNPIDFLEAKGYKEVKKDLIIKLPKYSLFELENGRKRMLASAGELQKGNELALPSKYVNFLYLASHYEKLKGSPEDNEQKQLFVEQHKHYLDEIIEQISEFSKRVILADANLDKVLSAYNKHRDKPIREQAENIIHLFTLTNLGAPAAFKYFDTTIDRKRYTSTKEVLDATLIHQSITGLYETRIDLSQLGGDGGGGGGSSGGSGGTLNIEDEHRLHETSKEPDVSLGSTWLSDFPQAWAETGGMGLAVRQAPLIIPLKATSTPVSIKQYPMSQEARLGIKPHIQRLLDQGILVPCQSPWNTPLLPVKKPGTNDYRPVQDLREVNKRVEDIHPTVPNPYNLLSGLPPSHQWYTVLDLKDAFFCLRLHPTSQPLFAFEWRDPEMGISGQLTWTRLPQGFKNSPTLFNEALHRDLADFRIQHPDLILLQYVDDLLLAATSELDCQQGTRALLQTLGNLGYRASAKKAQICQKQVKYLGYLLKEGQRWLTEARKETVMGQPTPKTPRQLREFLGKAGFCRLFIPGFAEMAAPLYPLTKPGTLFNWGPDQQKAYQEIKQALLTAPALGLPDLTKPFELFVDEKQGYAKGVLTQKLGPWRRPVAYLSKKLDPVAAGWPPCLRMVAAIAVLTKDAGKLTMGQPLVILAPHAVEALVKQPPDRWLSNARMTHYQALLLDTDRVQFGPVVALNPATLLPLPEEGLQHNCLDILAEAHGTRPDLTDQPLPDADHTWYTDGSSLLQEGQRKAGAAVTTETEVIWAKALPAGTSAQRAELIALTQALKMAEGKKLNVYTDSRYAFATAHIHGEIYRRRGWLTSEGKEIKNKDEILALLKALFLPKRLSIIHCPGHQKGHSAEARGNRMADQAARKAAITETPDTSTLLAGKRTADGSEFEKRTADGSEFESPKKKAKVE

SEQ ID NO: 2855 - protein, 2091 aa, synthetic construct
MPAAKRVKLDGGDKKYSIGLDIGTNSVGWAVITDEYKVPSKKFKVLGNTDRHSIKKNLIGALLFDSGETAEATRLKRTARRRYTRRKNRICYLQEIFSNEMAKVDDSFFHRLEESFLVEEDKKHERHPIFGNIVDEVAYHEKYPTIYHLRKKLVDSTDKADLRLIYLALAHMIKFRGHFLIEGDLNPDNSDVDKLFIQLVQTYNQLFEENPINASGVDAKAILSARLSKSRRLENLIAQLPGEKKNGLFGNLIALSLGLTPNFKSNFDLAEDAKLQLSKDTYDDDLDNLLAQIGDQYADLFLAAKNLSDAILLSDILRVNTEITKAPLSASMIKRYDEHHQDLTLLKALVRQQLPEKYKEIFFDQSKNGYAGYIDGGASQEEFYKFIKPILEKMDGTEELLVKLNREDLLRKQRTFDNGSIPHQIHLGELHAILRRQEDFYPFLKDNREKIEKILTFRIPYYVGPLARGNSRFAWMTRKSEETITPWNFEEVVDKGASAQSFIERMTNFDKNLPNEKVLPKHSLLYEYFTVYNELTKVKYVTEGMRKPAFLSGEQKKAIVDLLFKTNRKVTVKQLKEDYFKKIECFDSVEISGVEDRFNASLGTYHDLLKIIKDKDFLDNEENEDILEDIVLTLTLFEDREMIEERLKTYAHLFDDKVMKQLKRRRYTGWGRLSRKLINGIRDKQSGKTILDFLKSDGFANRNFMQLIHDDSLTFKEDIQKAQVSGQGDSLHEHIANLAGSPAIKKGILQTVKVVDELVKVMGRHKPENIVIEMARENQTTQKGQKNSRERMKRIEEGIKELGSQILKEHPVENTQLQNEKLYLYYLQNGRDMYVDQELDINRLSDYDVDHIVPQSFLKDDSIDNKVLTRSDKARGKSDNVPSEEVVKKMKNYWRQLLNAKLITQRKFDNLTKAERGGLSELDKAGFIKRQLVETRQITKHVAQILDSRMNTKYDENDKLIREVKVITLKSKLVSDFRKDFQFYKVREINNYHHAHDAYLNAVVGTALIKKYPKLESEFVYGDYKVYDVRKMIAKSEQEIGKATAKYFFYSNIMNFFKTEITLANGEIRKRPLIETNGETGEIVWDKGRDFATVRKVLSMPQVNIVKKTEVQTGGFSKESILPKRNSDKLIARKKDWDPKKYGGFDSPTVAYSVLVVAKVEKGKSKKLKSVKELLGITIMERSSFEKNPIDFLEAKGYKEVKKDLIIKLPKYSLFELENGRKRMLASAGELQKGNELALPSKYVNFLYLASHYEKLKGSPEDNEQKQLFVEQHKHYLDEIIEQISEFSKRVILADANLDKVLSAYNKHRDKPIREQAENIIHLFTLTNLGAPAAFKYFDTTIDRKRYTSTKEVLDATLIHQSITGLYETRIDLSQLGGDGGGSSGGSGGTLNIEDEHRLHETSKEPDVSLGSTWLSDFPQAWAETGGMGLAVRQAPLIIPLKATSTPVSIKQYPMSQEARLGIKPHIQRLLDQGILVPCQSPWNTPLLPVKKPGTNDYRPVQDLREVNKRVEDIHPTVPNPYNLLSGLPPSHQWYTVLDLKDAFFCLRLHPTSQPLFAFEWRDPEMGISGQLTWTRLPQGFKNSPTLFNEALHRDLADFRIQHPDLILLQYVDDLLLAATSELDCQQGTRALLQTLGNLGYRASAKKAQICQKQVKYLGYLLKEGQRWLTEARKETVMGQPTPKTPRQLREFLGKAGFCRLFIPGFAEMAAPLYPLTKPGTLFNWGPDQQKAYQEIKQALLTAPALGLPDLTKPFELFVDEKQGYAKGVLTQKLGPWRRPVAYLSKKLDPVAAGWPPCLRMVAAIAVLTKDAGKLTMGQPLVILAPHAVEALVKQPPDRWLSNARMTHYQALLLDTDRVQFGPVVALNPATLLPLPEEGLQHNCLDILAEAHGTRPDLTDQPLPDADHTWYTDGSSLLQEGQRKAGAAVTTETEVIWAKALPAGTSAQRAELIALTQALKMAEGKKLNVYTDSRYAFATAHIHGEIYRRRGWLTSEGKEIKNKDEILALLKALFLPKRLSIIHCPGHQKGHSAEARGNRMADQAARKAAITETPDTSTLLAGKRTADGSEFEKRTADGSEFESPKKKAKVE

SEQ ID NO: 2856 - protein, 2093 aa, synthetic construct
MPAAKRVKLDGGDKKYSIGLDIGTNSVGWAVITDEYKVPSKKFKVLGNTDRHSIKKNLIGALLFDSGETAEATRLKRTARRRYTRRKNRICYLQEIFSNEMAKVDDSFFHRLEESFLVEEDKKHERHPIFGNIVDEVAYHEKYPTIYHLRKKLVDSTDKADLRLIYLALAHMIKFRGHFLIEGDLNPDNSDVDKLFIQLVQTYNQLFEENPINASGVDAKAILSARLSKSRRLENLIAQLPGEKKNGLFGNLIALSLGLTPNFKSNFDLAEDAKLQLSKDTYDDDLDNLLAQIGDQYADLFLAAKNLSDAILLSDILRVNTEITKAPLSASMIKRYDEHHQDLTLLKALVRQQLPEKYKEIFFDQSKNGYAGYIDGGASQEEFYKFIKPILEKMDGTEELLVKLNREDLLRKQRTFDNGSIPHQIHLGELHAILRRQEDFYPFLKDNREKIEKILTFRIPYYVGPLARGNSRFAWMTRKSEETITPWNFEEVVDKGASAQSFIERMTNFDKNLPNEKVLPKHSLLYEYFTVYNELTKVKYVTEGMRKPAFLSGEQKKAIVDLLFKTNRKVTVKQLKEDYFKKIECFDSVEISGVEDRFNASLGTYHDLLKIIKDKDFLDNEENEDILEDIVLTLTLFEDREMIEERLKTYAHLFDDKVMKQLKRRRYTGWGRLSRKLINGIRDKQSGKTILDFLKSDGFANRNFMQLIHDDSLTFKEDIQKAQVSGQGDSLHEHIANLAGSPAIKKGILQTVKVVDELVKVMGRHKPENIVIEMARENQTTQKGQKNSRERMKRIEEGIKELGSQILKEHPVENTQLQNEKLYLYYLQNGRDMYVDQELDINRLSDYDVDHIVPQSFLKDDSIDNKVLTRSDKARGKSDNVPSEEVVKKMKNYWRQLLNAKLITQRKFDNLTKAERGGLSELDKAGFIKRQLVETRQITKHVAQILDSRMNTKYDENDKLIREVKVITLKSKLVSDFRKDFQFYKVREINNYHHAHDAYLNAVVGTALIKKYPKLESEFVYGDYKVYDVRKMIAKSEQEIGKATAKYFFYSNIMNFFKTEITLANGEIRKRPLIETNGETGEIVWDKGRDFATVRKVLSMPQVNIVKKTEVQTGGFSKESILPKRNSDKLIARKKDWDPKKYGGFDSPTVAYSVLVVAKVEKGKSKKLKSVKELLGITIMERSSFEKNPIDFLEAKGYKEVKKDLIIKLPKYSLFELENGRKRMLASAGELQKGNELALPSKYVNFLYLASHYEKLKGSPEDNEQKQLFVEQHKHYLDEIIEQISEFSKRVILADANLDKVLSAYNKHRDKPIREQAENIIHLFTLTNLGAPAAFKYFDTTIDRKRYTSTKEVLDATLIHQSITGLYETRIDLSQLGGDGGGGGEAAAKGGTLNIEDEHRLHETSKEPDVSLGSTWLSDFPQAWAETGGMGLAVRQAPLIIPLKATSTPVSIKQYPMSQEARLGIKPHIQRLLDQGILVPCQSPWNTPLLPVKKPGTNDYRPVQDLREVNKRVEDIHPTVPNPYNLLSGLPPSHQWYTVLDLKDAFFCLRLHPTSQPLFAFEWRDPEMGISGQLTWTRLPQGFKNSPTLFNEALHRDLADFRIQHPDLILLQYVDDLLLAATSELDCQQGTRALLQTLGNLGYRASAKKAQICQKQVKYLGYLLKEGQRWLTEARKETVMGQPTPKTPRQLREFLGKAGFCRLFIPGFAEMAAPLYPLTKPGTLFNWGPDQQKAYQEIKQALLTAPALGLPDLTKPFELFVDEKQGYAKGVLTQKLGPWRRPVAYLSKKLDPVAAGWPPCLRMVAAIAVLTKDAGKLTMGQPLVILAPHAVEALVKQPPDRWLSNARMTHYQALLLDTDRVQFGPVVALNPATLLPLPEEGLQHNCLDILAEAHGTRPDLTDQPLPDADHTWYTDGSSLLQEGQRKAGAAVTTETEVIWAKALPAGTSAQRAELIALTQALKMAEGKKLNVYTDSRYAFATAHIHGEIYRRRGWLTSEGKEIKNKDEILALLKALFLPKRLSIIHCPGHQKGHSAEARGNRMADQAARKAAITETPDTSTLLAGKRTADGSEFEKRTADGSEFESPKKKAKVE

SEQ ID NO: 2857 - protein, 2096 aa, synthetic construct
MPAAKRVKLDGGDKKYSIGLDIGTNSVGWAVITDEYKVPSKKFKVLGNTDRHSIKKNLIGALLFDSGETAEATRLKRTARRRYTRRKNRICYLQEIFSNEMAKVDDSFFHRLEESFLVEEDKKHERHPIFGNIVDEVAYHEKYPTIYHLRKKLVDSTDKADLRLIYLALAHMIKFRGHFLIEGDLNPDNSDVDKLFIQLVQTYNQLFEENPINASGVDAKAILSARLSKSRRLENLIAQLPGEKKNGLFGNLIALSLGLTPNFKSNFDLAEDAKLQLSKDTYDDDLDNLLAQIGDQYADLFLAAKNLSDAILLSDILRVNTEITKAPLSASMIKRYDEHHQDLTLLKALVRQQLPEKYKEIFFDQSKNGYAGYIDGGASQEEFYKFIKPILEKMDGTEELLVKLNREDLLRKQRTFDNGSIPHQIHLGELHAILRRQEDFYPFLKDNREKIEKILTFRIPYYVGPLARGNSRFAWMTRKSEETITPWNFEEVVDKGASAQSFIERMTNFDKNLPNEKVLPKHSLLYEYFTVYNELTKVKYVTEGMRKPAFLSGEQKKAIVDLLFKTNRKVTVKQLKEDYFKKIECFDSVEISGVEDRFNASLGTYHDLLKIIKDKDFLDNEENEDILEDIVLTLTLFEDREMIEERLKTYAHLFDDKVMKQLKRRRYTGWGRLSRKLINGIRDKQSGKTILDFLKSDGFANRNFMQLIHDDSLTFKEDIQKAQVSGQGDSLHEHIANLAGSPAIKKGILQTVKVVDELVKVMGRHKPENIVIEMARENQTTQKGQKNSRERMKRIEEGIKELGSQILKEHPVENTQLQNEKLYLYYLQNGRDMYVDQELDINRLSDYDVDHIVPQSFLKDDSIDNKVLTRSDKARGKSDNVPSEEVVKKMKNYWRQLLNAKLITQRKFDNLTKAERGGLSELDKAGFIKRQLVETRQITKHVAQILDSRMNTKYDENDKLIREVKVITLKSKLVSDFRKDFQFYKVREINNYHHAHDAYLNAVVGTALIKKYPKLESEFVYGDYKVYDVRKMIAKSEQEIGKATAKYFFYSNIMNFFKTEITLANGEIRKRPLIETNGETGEIVWDKGRDFATVRKVLSMPQVNIVKKTEVQTGGFSKESILPKRNSDKLIARKKDWDPKKYGGFDSPTVAYSVLVVAKVEKGKSKKLKSVKELLGITIMERSSFEKNPIDFLEAKGYKEVKKDLIIKLPKYSLFELENGRKRMLASAGELQKGNELALPSKYVNFLYLASHYEKLKGSPEDNEQKQLFVEQHKHYLDEIIEQISEFSKRVILADANLDKVLSAYNKHRDKPIREQAENIIHLFTLTNLGAPAAFKYFDTTIDRKRYTSTKEVLDATLIHQSITGLYETRIDLSQLGGDGGGGSEAAAKPAPGGTLNIEDEHRLHETSKEPDVSLGSTWLSDFPQAWAETGGMGLAVRQAPLIIPLKATSTPVSIKQYPMSQEARLGIKPHIQRLLDQGILVPCQSPWNTPLLPVKKPGTNDYRPVQDLREVNKRVEDIHPTVPNPYNLLSGLPPSHQWYTVLDLKDAFFCLRLHPTSQPLFAFEWRDPEMGISGQLTWTRLPQGFKNSPTLFNEALHRDLADFRIQHPDLILLQYVDDLLLAATSELDCQQGTRALLQTLGNLGYRASAKKAQICQKQVKYLGYLLKEGQRWLTEARKETVMGQPTPKTPRQLREFLGKAGFCRLFIPGFAEMAAPLYPLTKPGTLFNWGPDQQKAYQEIKQALLTAPALGLPDLTKPFELFVDEKQGYAKGVLTQKLGPWRRPVAYLSKKLDPVAAGWPPCLRMVAAIAVLTKDAGKLTMGQPLVILAPHAVEALVKQPPDRWLSNARMTHYQALLLDTDRVQFGPVVALNPATLLPLPEEGLQHNCLDILAEAHGTRPDLTDQPLPDADHTWYTDGSSLLQEGQRKAGAAVTTETEVIWAKALPAGTSAQRAELIALTQALKMAEGKKLNVYTDSRYAFATAHIHGEIYRRRGWLTSEGKEIKNKDEILALLKALFLPKRLSIIHCPGHQKGHSAEARGNRMADQAARKAAITETPDTSTLLAGKRTADGSEFEKRTADGSEFESPKKKAKVE

SEQ ID NO: 2858 - protein, 2101 aa, synthetic construct
MPAAKRVKLDGGDKKYSIGLDIGTNSVGWAVITDEYKVPSKKFKVLGNTDRHSIKKNLIGALLFDSGETAEATRLKRTARRRYTRRKNRICYLQEIFSNEMAKVDDSFFHRLEESFLVEEDKKHERHPIFGNIVDEVAYHEKYPTIYHLRKKLVDSTDKADLRLIYLALAHMIKFRGHFLIEGDLNPDNSDVDKLFIQLVQTYNQLFEENPINASGVDAKAILSARLSKSRRLENLIAQLPGEKKNGLFGNLIALSLGLTPNFKSNFDLAEDAKLQLSKDTYDDDLDNLLAQIGDQYADLFLAAKNLSDAILLSDILRVNTEITKAPLSASMIKRYDEHHQDLTLLKALVRQQLPEKYKEIFFDQSKNGYAGYIDGGASQEEFYKFIKPILEKMDGTEELLVKLNREDLLRKQRTFDNGSIPHQIHLGELHAILRRQEDFYPFLKDNREKIEKILTFRIPYYVGPLARGNSRFAWMTRKSEETITPWNFEEVVDKGASAQSFIERMTNFDKNLPNEKVLPKHSLLYEYFTVYNELTKVKYVTEGMRKPAFLSGEQKKAIVDLLFKTNRKVTVKQLKEDYFKKIECFDSVEISGVEDRFNASLGTYHDLLKIIKDKDFLDNEENEDILEDIVLTLTLFEDREMIEERLKTYAHLFDDKVMKQLKRRRYTGWGRLSRKLINGIRDKQSGKTILDFLKSDGFANRNFMQLIHDDSLTFKEDIQKAQVSGQGDSLHEHIANLAGSPAIKKGILQTVKVVDELVKVMGRHKPENIVIEMARENQTTQKGQKNSRERMKRIEEGIKELGSQILKEHPVENTQLQNEKLYLYYLQNGRDMYVDQELDINRLSDYDVDHIVPQSFLKDDSIDNKVLTRSDKARGKSDNVPSEEVVKKMKNYWRQLLNAKLITQRKFDNLTKAERGGLSELDKAGFIKRQLVETRQITKHVAQILDSRMNTKYDENDKLIREVKVITLKSKLVSDFRKDFQFYKVREINNYHHAHDAYLNAVVGTALIKKYPKLESEFVYGDYKVYDVRKMIAKSEQEIGKATAKYFFYSNIMNFFKTEITLANGEIRKRPLIETNGETGEIVWDKGRDFATVRKVLSMPQVNIVKKTEVQTGGFSKESILPKRNSDKLIARKKDWDPKKYGGFDSPTVAYSVLVVAKVEKGKSKKLKSVKELLGITIMERSSFEKNPIDFLEAKGYKEVKKDLIIKLPKYSLFELENGRKRMLASAGELQKGNELALPSKYVNFLYLASHYEKLKGSPEDNEQKQLFVEQHKHYLDEIIEQISEFSKRVILADANLDKVLSAYNKHRDKPIREQAENIIHLFTLTNLGAPAAFKYFDTTIDRKRYTSTKEVLDATLIHQSITGLYETRIDLSQLGGDGGSGSETPGTSESATPESGGTLNIEDEHRLHETSKEPDVSLGSTWLSDFPQAWAETGGMGLAVRQAPLIIPLKATSTPVSIKQYPMSQEARLGIKPHIQRLLDQGILVPCQSPWNTPLLPVKKPGTNDYRPVQDLREVNKRVEDIHPTVPNPYNLLSGLPPSHQWYTVLDLKDAFFCLRLHPTSQPLFAFEWRDPEMGISGQLTWTRLPQGFKNSPTLFNEALHRDLADFRIQHPDLILLQYVDDLLLAATSELDCQQGTRALLQTLGNLGYRASAKKAQICQKQVKYLGYLLKEGQRWLTEARKETVMGQPTPKTPRQLREFLGKAGFCRLFIPGFAEMAAPLYPLTKPGTLFNWGPDQQKAYQEIKQALLTAPALGLPDLTKPFELFVDEKQGYAKGVLTQKLGPWRRPVAYLSKKLDPVAAGWPPCLRMVAAIAVLTKDAGKLTMGQPLVILAPHAVEALVKQPPDRWLSNARMTHYQALLLDTDRVQFGPVVALNPATLLPLPEEGLQHNCLDILAEAHGTRPDLTDQPLPDADHTWYTDGSSLLQEGQRKAGAAVTTETEVIWAKALPAGTSAQRAELIALTQALKMAEGKKLNVYTDSRYAFATAHIHGEIYRRRGWLTSEGKEIKNKDEILALLKALFLPKRLSIIHCPGHQKGHSAEARGNRMADQAARKAAITETPDTSTLLAGKRTADGSEFEKRTADGSEFESPKKKAKVE

SEQ ID NO: 2859 - protein, 2094 aa, synthetic construct
MPAAKRVKLDGGDKKYSIGLDIGTNSVGWAVITDEYKVPSKKFKVLGNTDRHSIKKNLIGALLFDSGETAEATRLKRTARRRYTRRKNRICYLQEIFSNEMAKVDDSFFHRLEESFLVEEDKKHERHPIFGNIVDEVAYHEKYPTIYHLRKKLVDSTDKADLRLIYLALAHMIKFRGHFLIEGDLNPDNSDVDKLFIQLVQTYNQLFEENPINASGVDAKAILSARLSKSRRLENLIAQLPGEKKNGLFGNLIALSLGLTPNFKSNFDLAEDAKLQLSKDTYDDDLDNLLAQIGDQYADLFLAAKNLSDAILLSDILRVNTEITKAPLSASMIKRYDEHHQDLTLLKALVRQQLPEKYKEIFFDQSKNGYAGYIDGGASQEEFYKFIKPILEKMDGTEELLVKLNREDLLRKQRTFDNGSIPHQIHLGELHAILRRQEDFYPFLKDNREKIEKILTFRIPYYVGPLARGNSRFAWMTRKSEETITPWNFEEVVDKGASAQSFIERMTNFDKNLPNEKVLPKHSLLYEYFTVYNELTKVKYVTEGMRKPAFLSGEQKKAIVDLLFKTNRKVTVKQLKEDYFKKIECFDSVEISGVEDRFNASLGTYHDLLKIIKDKDFLDNEENEDILEDIVLTLTLFEDREMIEERLKTYAHLFDDKVMKQLKRRRYTGWGRLSRKLINGIRDKQSGKTILDFLKSDGFANRNFMQLIHDDSLTFKEDIQKAQVSGQGDSLHEHIANLAGSPAIKKGILQTVKVVDELVKVMGRHKPENIVIEMARENQTTQKGQKNSRERMKRIEEGIKELGSQILKEHPVENTQLQNEKLYLYYLQNGRDMYVDQELDINRLSDYDVDHIVPQSFLKDDSIDNKVLTRSDKARGKSDNVPSEEVVKKMKNYWRQLLNAKLITQRKFDNLTKAERGGLSELDKAGFIKRQLVETRQITKHVAQILDSRMNTKYDENDKLIREVKVITLKSKLVSDFRKDFQFYKVREINNYHHAHDAYLNAVVGTALIKKYPKLESEFVYGDYKVYDVRKMIAKSEQEIGKATAKYFFYSNIMNFFKTEITLANGEIRKRPLIETNGETGEIVWDKGRDFATVRKVLSMPQVNIVKKTEVQTGGFSKESILPKRNSDKLIARKKDWDPKKYGGFDSPTVAYSVLVVAKVEKGKSKKLKSVKELLGITIMERSSFEKNPIDFLEAKGYKEVKKDLIIKLPKYSLFELENGRKRMLASAGELQKGNELALPSKYVNFLYLASHYEKLKGSPEDNEQKQLFVEQHKHYLDEIIEQISEFSKRVILADANLDKVLSAYNKHRDKPIREQAENIIHLFTLTNLGAPAAFKYFDTTIDRKRYTSTKEVLDATLIHQSITGLYETRIDLSQLGGDGGGSSGGSGGGGGTLNIEDEHRLHETSKEPDVSLGSTWLSDFPQAWAETGGMGLAVRQAPLIIPLKATSTPVSIKQYPMSQEARLGIKPHIQRLLDQGILVPCQSPWNTPLLPVKKPGTNDYRPVQDLREVNKRVEDIHPTVPNPYNLLSGLPPSHQWYTVLDLKDAFFCLRLHPTSQPLFAFEWRDPEMGISGQLTWTRLPQGFKNSPTLFNEALHRDLADFRIQHPDLILLQYVDDLLLAATSELDCQQGTRALLQTLGNLGYRASAKKAQICQKQVKYLGYLLKEGQRWLTEARKETVMGQPTPKTPRQLREFLGKAGFCRLFIPGFAEMAAPLYPLTKPGTLFNWGPDQQKAYQEIKQALLTAPALGLPDLTKPFELFVDEKQGYAKGVLTQKLGPWRRPVAYLSKKLDPVAAGWPPCLRMVAAIAVLTKDAGKLTMGQPLVILAPHAVEALVKQPPDRWLSNARMTHYQALLLDTDRVQFGPVVALNPATLLPLPEEGLQHNCLDILAEAHGTRPDLTDQPLPDADHTWYTDGSSLLQEGQRKAGAAVTTETEVIWAKALPAGTSAQRAELIALTQALKMAEGKKLNVYTDSRYAFATAHIHGEIYRRRGWLTSEGKEIKNKDEILALLKALFLPKRLSIIHCPGHQKGHSAEARGNRMADQAARKAAITETPDTSTLLAGKRTADGSEFEKRTADGSEFESPKKKAKVE

SEQ ID NO: 2860 - protein, 2096 aa, synthetic construct
MPAAKRVKLDGGDKKYSIGLDIGTNSVGWAVITDEYKVPSKKFKVLGNTDRHSIKKNLIGALLFDSGETAEATRLKRTARRRYTRRKNRICYLQEIFSNEMAKVDDSFFHRLEESFLVEEDKKHERHPIFGNIVDEVAYHEKYPTIYHLRKKLVDSTDKADLRLIYLALAHMIKFRGHFLIEGDLNPDNSDVDKLFIQLVQTYNQLFEENPINASGVDAKAILSARLSKSRRLENLIAQLPGEKKNGLFGNLIALSLGLTPNFKSNFDLAEDAKLQLSKDTYDDDLDNLLAQIGDQYADLFLAAKNLSDAILLSDILRVNTEITKAPLSASMIKRYDEHHQDLTLLKALVRQQLPEKYKEIFFDQSKNGYAGYIDGGASQEEFYKFIKPILEKMDGTEELLVKLNREDLLRKQRTFDNGSIPHQIHLGELHAILRRQEDFYPFLKDNREKIEKILTFRIPYYVGPLARGNSRFAWMTRKSEETITPWNFEEVVDKGASAQSFIERMTNFDKNLPNEKVLPKHSLLYEYFTVYNELTKVKYVTEGMRKPAFLSGEQKKAIVDLLFKTNRKVTVKQLKEDYFKKIECFDSVEISGVEDRFNASLGTYHDLLKIIKDKDFLDNEENEDILEDIVLTLTLFEDREMIEERLKTYAHLFDDKVMKQLKRRRYTGWGRLSRKLINGIRDKQSGKTILDFLKSDGFANRNFMQLIHDDSLTFKEDIQKAQVSGQGDSLHEHIANLAGSPAIKKGILQTVKVVDELVKVMGRHKPENIVIEMARENQTTQKGQKNSRERMKRIEEGIKELGSQILKEHPVENTQLQNEKLYLYYLQNGRDMYVDQELDINRLSDYDVDHIVPQSFLKDDSIDNKVLTRSDKARGKSDNVPSEEVVKKMKNYWRQLLNAKLITQRKFDNLTKAERGGLSELDKAGFIKRQLVETRQITKHVAQILDSRMNTKYDENDKLIREVKVITLKSKLVSDFRKDFQFYKVREINNYHHAHDAYLNAVVGTALIKKYPKLESEFVYGDYKVYDVRKMIAKSEQEIGKATAKYFFYSNIMNFFKTEITLANGEIRKRPLIETNGETGEIVWDKGRDFATVRKVLSMPQVNIVKKTEVQTGGFSKESILPKRNSDKLIARKKDWDPKKYGGFDSPTVAYSVLVVAKVEKGKSKKLKSVKELLGITIMERSSFEKNPIDFLEAKGYKEVKKDLIIKLPKYSLFELENGRKRMLASAGELQKGNELALPSKYVNFLYLASHYEKLKGSPEDNEQKQLFVEQHKHYLDEIIEQISEFSKRVILADANLDKVLSAYNKHRDKPIREQAENIIHLFTLTNLGAPAAFKYFDTTIDRKRYTSTKEVLDATLIHQSITGLYETRIDLSQLGGDGGGSSGGSEAAAKGGTLNIEDEHRLHETSKEPDVSLGSTWLSDFPQAWAETGGMGLAVRQAPLIIPLKATSTPVSIKQYPMSQEARLGIKPHIQRLLDQGILVPCQSPWNTPLLPVKKPGTNDYRPVQDLREVNKRVEDIHPTVPNPYNLLSGLPPSHQWYTVLDLKDAFFCLRLHPTSQPLFAFEWRDPEMGISGQLTWTRLPQGFKNSPTLFNEALHRDLADFRIQHPDLILLQYVDDLLLAATSELDCQQGTRALLQTLGNLGYRASAKKAQICQKQVKYLGYLLKEGQRWLTEARKETVMGQPTPKTPRQLREFLGKAGFCRLFIPGFAEMAAPLYPLTKPGTLFNWGPDQQKAYQEIKQALLTAPALGLPDLTKPFELFVDEKQGYAKGVLTQKLGPWRRPVAYLSKKLDPVAAGWPPCLRMVAAIAVLTKDAGKLTMGQPLVILAPHAVEALVKQPPDRWLSNARMTHYQALLLDTDRVQFGPVVALNPATLLPLPEEGLQHNCLDILAEAHGTRPDLTDQPLPDADHTWYTDGSSLLQEGQRKAGAAVTTETEVIWAKALPAGTSAQRAELIALTQALKMAEGKKLNVYTDSRYAFATAHIHGEIYRRRGWLTSEGKEIKNKDEILALLKALFLPKRLSIIHCPGHQKGHSAEARGNRMADQAARKAAITETPDTSTLLAGKRTADGSEFEKRTADGSEFESPKKKAKVE

SEQ ID NO: 2861 - protein, 2091 aa, synthetic construct
MPAAKRVKLDGGDKKYSIGLDIGTNSVGWAVITDEYKVPSKKFKVLGNTDRHSIKKNLIGALLFDSGETAEATRLKRTARRRYTRRKNRICYLQEIFSNEMAKVDDSFFHRLEESFLVEEDKKHERHPIFGNIVDEVAYHEKYPTIYHLRKKLVDSTDKADLRLIYLALAHMIKFRGHFLIEGDLNPDNSDVDKLFIQLVQTYNQLFEENPINASGVDAKAILSARLSKSRRLENLIAQLPGEKKNGLFGNLIALSLGLTPNFKSNFDLAEDAKLQLSKDTYDDDLDNLLAQIGDQYADLFLAAKNLSDAILLSDILRVNTEITKAPLSASMIKRYDEHHQDLTLLKALVRQQLPEKYKEIFFDQSKNGYAGYIDGGASQEEFYKFIKPILEKMDGTEELLVKLNREDLLRKQRTFDNGSIPHQIHLGELHAILRRQEDFYPFLKDNREKIEKILTFRIPYYVGPLARGNSRFAWMTRKSEETITPWNFEEVVDKGASAQSFIERMTNFDKNLPNEKVLPKHSLLYEYFTVYNELTKVKYVTEGMRKPAFLSGEQKKAIVDLLFKTNRKVTVKQLKEDYFKKIECFDSVEISGVEDRFNASLGTYHDLLKIIKDKDFLDNEENEDILEDIVLTLTLFEDREMIEERLKTYAHLFDDKVMKQLKRRRYTGWGRLSRKLINGIRDKQSGKTILDFLKSDGFANRNFMQLIHDDSLTFKEDIQKAQVSGQGDSLHEHIANLAGSPAIKKGILQTVKVVDELVKVMGRHKPENIVIEMARENQTTQKGQKNSRERMKRIEEGIKELGSQILKEHPVENTQLQNEKLYLYYLQNGRDMYVDQELDINRLSDYDVDHIVPQSFLKDDSIDNKVLTRSDKARGKSDNVPSEEVVKKMKNYWRQLLNAKLITQRKFDNLTKAERGGLSELDKAGFIKRQLVETRQITKHVAQILDSRMNTKYDENDKLIREVKVITLKSKLVSDFRKDFQFYKVREINNYHHAHDAYLNAVVGTALIKKYPKLESEFVYGDYKVYDVRKMIAKSEQEIGKATAKYFFYSNIMNFFKTEITLANGEIRKRPLIETNGETGEIVWDKGRDFATVRKVLSMPQVNIVKKTEVQTGGFSKESILPKRNSDKLIARKKDWDPKKYGGFDSPTVAYSVLVVAKVEKGKSKKLKSVKELLGITIMERSSFEKNPIDFLEAKGYKEVKKDLIIKLPKYSLFELENGRKRMLASAGELQKGNELALPSKYVNFLYLASHYEKLKGSPEDNEQKQLFVEQHKHYLDEIIEQISEFSKRVILADANLDKVLSAYNKHRDKPIREQAENIIHLFTLTNLGAPAAFKYFDTTIDRKRYTSTKEVLDATLIHQSITGLYETRIDLSQLGGDGGGGSGGGGGTLNIEDEHRLHETSKEPDVSLGSTWLSDFPQAWAETGGMGLAVRQAPLIIPLKATSTPVSIKQYPMSQEARLGIKPHIQRLLDQGILVPCQSPWNTPLLPVKKPGTNDYRPVQDLREVNKRVEDIHPTVPNPYNLLSGLPPSHQWYTVLDLKDAFFCLRLHPTSQPLFAFEWRDPEMGISGQLTWTRLPQGFKNSPTLFNEALHRDLADFRIQHPDLILLQYVDDLLLAATSELDCQQGTRALLQTLGNLGYRASAKKAQICQKQVKYLGYLLKEGQRWLTEARKETVMGQPTPKTPRQLREFLGKAGFCRLFIPGFAEMAAPLYPLTKPGTLFNWGPDQQKAYQEIKQALLTAPALGLPDLTKPFELFVDEKQGYAKGVLTQKLGPWRRPVAYLSKKLDPVAAGWPPCLRMVAAIAVLTKDAGKLTMGQPLVILAPHAVEALVKQPPDRWLSNARMTHYQALLLDTDRVQFGPVVALNPATLLPLPEEGLQHNCLDILAEAHGTRPDLTDQPLPDADHTWYTDGSSLLQEGQRKAGAAVTTETEVIWAKALPAGTSAQRAELIALTQALKMAEGKKLNVYTDSRYAFATAHIHGEIYRRRGWLTSEGKEIKNKDEILALLKALFLPKRLSIIHCPGHQKGHSAEARGNRMADQAARKAAITETPDTSTLLAGKRTADGSEFEKRTADGSEFESPKKKAKVE

SEQ ID NO: 2862 - protein, 2116 aa, synthetic construct; identical to SEQ ID NO: 2637

SEQ ID NO: 2863 - protein, 2116 aa, synthetic construct
MPAAKRVKLDGGDKKYSIGLDIGTNSVGWAVITDEYKVPSKKFKVLGNTDRHSIKKNLIGALLFDSGETAEATRLKRTARRRYTRRKNRICYLQEIFSNEMAKVDDSFFHRLEESFLVEEDKKHERHPIFGNIVDEVAYHEKYPTIYHLRKKLVDSTDKADLRLIYLALAHMIKFRGHFLIEGDLNPDNSDVDKLFIQLVQTYNQLFEENPINASGVDAKAILSARLSKSRRLENLIAQLPGEKKNGLFGNLIALSLGLTPNFKSNFDLAEDAKLQLSKDTYDDDLDNLLAQIGDQYADLFLAAKNLSDAILLSDILRVNTEITKAPLSASMIKRYDEHHQDLTLLKALVRQQLPEKYKEIFFDQSKNGYAGYIDGGASQEEFYKFIKPILEKMDGTEELLVKLNREDLLRKQRTFDNGSIPHQIHLGELHAILRRQEDFYPFLKDNREKIEKILTFRIPYYVGPLARGNSRFAWMTRKSEETITPWNFEEVVDKGASAQSFIERMTNFDKNLPNEKVLPKHSLLYEYFTVYNELTKVKYVTEGMRKPAFLSGEQKKAIVDLLFKTNRKVTVKQLKEDYFKKIECFDSVEISGVEDRFNASLGTYHDLLKIIKDKDFLDNEENEDILEDIVLTLTLFEDREMIEERLKTYAHLFDDKVMKQLKRRRYTGWGRLSRKLINGIRDKQSGKTILDFLKSDGFANRNFMQLIHDDSLTFKEDIQKAQVSGQGDSLHEHIANLAGSPAIKKGILQTVKVVDELVKVMGRHKPENIVIEMARENQTTQKGQKNSRERMKRIEEGIKELGSQILKEHPVENTQLQNEKLYLYYLQNGRDMYVDQELDINRLSDYDVDHIVPQSFLKDDSIDNKVLTRSDKARGKSDNVPSEEVVKKMKNYWRQLLNAKLITQRKFDNLTKAERGGLSELDKAGFIKRQLVETRQITKHVAQILDSRMNTKYDENDKLIREVKVITLKSKLVSDFRKDFQFYKVREINNYHHAHDAYLNAVVGTALIKKYPKLESEFVYGDYKVYDVRKMIAKSEQEIGKATAKYFFYSNIMNFFKTEITLANGEIRKRPLIETNGETGEIVWDKGRDFATVRKVLSMPQVNIVKKTEVQTGGFSKESILPKRNSDKLIARKKDWDPKKYGGFDSPTVAYSVLVVAKVEKGKSKKLKSVKELLGITIMERSSFEKNPIDFLEAKGYKEVKKDLIIKLPKYSLFELENGRKRMLASAGELQKGNELALPSKYVNFLYLASHYEKLKGSPEDNEQKQLFVEQHKHYLDEIIEQISEFSKRVILADANLDKVLSAYNKHRDKPIREQAENIIHLFTLTNLGAPAAFKYFDTTIDRKRYTSTKEVLDATLIHQSITGLYETRIDLSQLGGDGGEAAAKGGGGGSGGTLNIEDEYRLHETSKEPDVSLGSTWLSDFPQAWAETGGMGLAVRQAPLIIPLKATSTPVSIKQYPMSQEARLGIKPHIQRLLDQGILVPCQSPWNTPLLPVKKPGTNDYRPVQDLREVNKRVEDIHPTVPNPYNLLSGLPPSHQWYTVLDLKDAFFCLRLHPTSQPLFAFEWRDPEMGISGQLTWTRLPQGFKNSPTLFNEALHRDLADFRIQHPDLILLQYVDDLLLAATSELDCQQGTRALLQTLGNLGYRASAKKAQICQKQVKYLGYLLKEGQRWLTEARKETVMGQPTPKTPRQLREFLGKAGFCRLFIPGFAEMAAPLYPLTKPGTLFNWGPDQQKAYQEIKQALLTAPALGLPDLTKPFELFVDEKQGYAKGVLTQKLGPWRRPVAYLSKKLDPVAAGWPPCLRMVAAIAVLTKDAGKLTMGQPLVILAPHAVEALVKQPPDRWLSNARMTHYQALLLDTDRVQFGPVVALNPATLLPLPEEGLQHNCLDILAEAHGTRPDLTDQPLPDADHTWYTDGSSLLQEGQRKAGAAVTTETEVIWAKALPAGTSAQRAELIALTQALKMAEGKKLNVYTDSRYAFATAHIHGEIYRRRGWLTSEGKEIKNKDEILALLKALFLPKRLSIIHCPGHQKGHSAEARGNRMADQAARKAAITETPDTSTLLIENSSPSGGSKRTADGSEFEAGKRTADGSEFEKRTADGSEFESPKKKAKVE

SEQ ID NO: 2864 - protein, 2108 aa, synthetic construct; identical to SEQ ID NO: 2655

SEQ ID NO: 2865 - protein, 2108 aa, synthetic construct; identical to SEQ ID NO: 2624

SEQ ID NO: 2866 - protein, 2116 aa, synthetic construct; identical to SEQ ID NO: 2692

SEQ ID NO: 2867 - protein, 2117 aa, synthetic construct; identical to SEQ ID NO: 2665

SEQ ID NO: 2868 - protein, 2118 aa, synthetic construct
MPAAKRVKLDGGDKKYSIGLDIGTNSVGWAVITDEYKVPSKKFKVLGNTDRHSIKKNLIGALLFDSGETAEATRLKRTARRRYTRRKNRICYLQEIFSNEMAKVDDSFFHRLEESFLVEEDKKHERHPIFGNIVDEVAYHEKYPTIYHLRKKLVDSTDKADLRLIYLALAHMIKFRGHFLIEGDLNPDNSDVDKLFIQLVQTYNQLFEENPINASGVDAKAILSARLSKSRRLENLIAQLPGEKKNGLFGNLIALSLGLTPNFKSNFDLAEDAKLQLSKDTYDDDLDNLLAQIGDQYADLFLAAKNLSDAILLSDILRVNTEITKAPLSASMIKRYDEHHQDLTLLKALVRQQLPEKYKEIFFDQSKNGYAGYIDGGASQEEFYKFIKPILEKMDGTEELLVKLNREDLLRKQRTFDNGSIPHQIHLGELHAILRRQEDFYPFLKDNREKIEKILTFRIPYYVGPLARGNSRFAWMTRKSEETITPWNFEEVVDKGASAQSFIERMTNFDKNLPNEKVLPKHSLLYEYFTVYNELTKVKYVTEGMRKPAFLSGEQKKAIVDLLFKTNRKVTVKQLKEDYFKKIECFDSVEISGVEDRFNASLGTYHDLLKIIKDKDFLDNEENEDILEDIVLTLTLFEDREMIEERLKTYAHLFDDKVMKQLKRRRYTGWGRLSRKLINGIRDKQSGKTILDFLKSDGFANRNFMQLIHDDSLTFKEDIQKAQVSGQGDSLHEHIANLAGSPAIKKGILQTVKVVDELVKVMGRHKPENIVIEMARENQTTQKGQKNSRERMKRIEEGIKELGSQILKEHPVENTQLQNEKLYLYYLQNGRDMYVDQELDINRLSDYDVDHIVPQSFLKDDSIDNKVLTRSDKARGKSDNVPSEEVVKKMKNYWRQLLNAKLITQRKFDNLTKAERGGLSELDKAGFIKRQLVETRQITKHVAQILDSRMNTKYDENDKLIREVKVITLKSKLVSDFRKDFQFYKVREINNYHHAHDAYLNAVVGTALIKKYPKLESEFVYGDYKVYDVRKMIAKSEQEIGKATAKYFFYSNIMNFFKTEITLANGEIRKRPLIETNGETGEIVWDKGRDFATVRKVLSMPQVNIVKKTEVQTGGFSKESILPKRNSDKLIARKKDWDPKKYGGFDSPTVAYSVLVVAKVEKGKSKKLKSVKELLGITIMERSSFEKNPIDFLEAKGYKEVKKDLIIKLPKYSLFELENGRKRMLASAGELQKGNELALPSKYVNFLYLASHYEKLKGSPEDNEQKQLFVEQHKHYLDEIIEQISEFSKRVILADANLDKVLSAYNKHRDKPIREQAENIIHLFTLTNLGAPAAFKYFDTTIDRKRYTSTKEVLDATLIHQSITGLYETRIDLSQLGGDGGPAPAPAPAPAPAPGGTLNIEDEYRLHETSKEPDVSLGSTWLSDFPQAWAETGGMGLAVRQAPLIIPLKATSTPVSIKQYPMSQEARLGIKPHIQRLLDQGILVPCQSPWNTPLLPVKKPGTNDYRPVQDLREVNKRVEDIHPTVPNPYNLLSGLPPSHQWYTVLDLKDAFFCLRLHPTSQPLFAFEWRDPEMGISGQLTWTRLPQGFKNSPTLFNEALHRDLADFRIQHPDLILLQYVDDLLLAATSELDCQQGTRALLQTLGNLGYRASAKKAQICQKQVKYLGYLLKEGQRWLTEARKETVMGQPTPKTPRQLREFLGKAGFCRLFIPGFAEMAAPLYPLTKPGTLFNWGPDQQKAYQEIKQALLTAPALGLPDLTKPFELFVDEKQGYAKGVLTQKLGPWRRPVAYLSKKLDPVAAGWPPCLRMVAAIAVLTKDAGKLTMGQPLVILAPHAVEALVKQPPDRWLSNARMTHYQALLLDTDRVQFGPVVALNPATLLPLPEEGLQHNCLDILAEAHGTRPDLTDQPLPDADHTWYTDGSSLLQEGQRKAGAAVTTETEVIWAKALPAGTSAQRAELIALTQALKMAEGKKLNVYTDSRYAFATAHIHGEIYRRRGWLTSEGKEIKNKDEILALLKALFLPKRLSIIHCPGHQKGHSAEARGNRMADQAARKAAITETPDTSTLLIENSSPSGGSKRTADGSEFEAGKRTADGSEFEKRTADGSEFESPKKKAKVE

SEQ ID NO: 2869 - protein, 2114 aa, synthetic construct
MPAAKRVKLDGGDKKYSIGLDIGTNSVGWAVITDEYKVPSKKFKVLGNTDRHSIKKNLIGALLFDSGETAEATRLKRTARRRYTRRKNRICYLQEIFSNEMAKVDDSFFHRLEESFLVEEDKKHERHPIFGNIVDEVAYHEKYPTIYHLRKKLVDSTDKADLRLIYLALAHMIKFRGHFLIEGDLNPDNSDVDKLFIQLVQTYNQLFEENPINASGVDAKAILSARLSKSRRLENLIAQLPGEKKNGLFGNLIALSLGLTPNFKSNFDLAEDAKLQLSKDTYDDDLDNLLAQIGDQYADLFLAAKNLSDAILLSDILRVNTEITKAPLSASMIKRYDEHHQDLTLLKALVRQQLPEKYKEIFFDQSKNGYAGYIDGGASQEEFYKFIKPILEKMDGTEELLVKLNREDLLRKQRTFDNGSIPHQIHLGELHAILRRQEDFYPFLKDNREKIEKILTFRIPYYVGPLARGNSRFAWMTRKSEETITPWNFEEVVDKGASAQSFIERMTNFDKNLPNEKVLPKHSLLYEYFTVYNELTKVKYVTEGMRKPAFLSGEQKKAIVDLLFKTNRKVTVKQLKEDYFKKIECFDSVEISGVEDRFNASLGTYHDLLKIIKDKDFLDNEENEDILEDIVLTLTLFEDREMIEERLKTYAHLFDDKVMKQLKRRRYTGWGRLSRKLINGIRDKQSGKTILDFLKSDGFANRNFMQLIHDDSLTFKEDIQKAQVSGQGDSLHEHIANLAGSPAIKKGILQTVKVVDELVKVMGRHKPENIVIEMARENQTTQKGQKNSRERMKRIEEGIKELGSQILKEHPVENTQLQNEKLYLYYLQNGRDMYVDQELDINRLSDYDVDHIVPQSFLKDDSIDNKVLTRSDKARGKSDNVPSEEVVKKMKNYWRQLLNAKLITQRKFDNLTKAERGGLSELDKAGFIKRQLVETRQITKHVAQILDSRMNTKYDENDKLIREVKVITLKSKLVSDFRKDFQFYKVREINNYHHAHDAYLNAVVGTALIKKYPKLESEFVYGDYKVYDVRKMIAKSEQEIGKATAKYFFYSNIMNFFKTEITLANGEIRKRPLIETNGETGEIVWDKGRDFATVRKVLSMPQVNIVKKTEVQTGGFSKESILPKRNSDKLIARKKDWDPKKYGGFDSPTVAYSVLVVAKVEKGKSKKLKSVKELLGITIMERSSFEKNPIDFLEAKGYKEVKKDLIIKLPKYSLFELENGRKRMLASAGELQKGNELALPSKYVNFLYLASHYEKLKGSPEDNEQKQLFVEQHKHYLDEIIEQISEFSKRVILADANLDKVLSAYNKHRDKPIREQAENIIHLFTLTNLGAPAAFKYFDTTIDRKRYTSTKEVLDATLIHQSITGLYETRIDLSQLGGDGGPAPGGGGSSGGTLNIEDEYRLHETSKEPDVSLGSTWLSDFPQAWAETGGMGLAVRQAPLIIPLKATSTPVSIKQYPMSQEARLGIKPHIQRLLDQGILVPCQSPWNTPLLPVKKPGTNDYRPVQDLREVNKRVEDIHPTVPNPYNLLSGLPPSHQWYTVLDLKDAFFCLRLHPTSQPLFAFEWRDPEMGISGQLTWTRLPQGFKNSPTLFNEALHRDLADFRIQHPDLILLQYVDDLLLAATSELDCQQGTRALLQTLGNLGYRASAKKAQICQKQVKYLGYLLKEGQRWLTEARKETVMGQPTPKTPRQLREFLGKAGFCRLFIPGFAEMAAPLYPLTKPGTLFNWGPDQQKAYQEIKQALLTAPALGLPDLTKPFELFVDEKQGYAKGVLTQKLGPWRRPVAYLSKKLDPVAAGWPPCLRMVAAIAVLTKDAGKLTMGQPLVILAPHAVEALVKQPPDRWLSNARMTHYQALLLDTDRVQFGPVVALNPATLLPLPEEGLQHNCLDILAEAHGTRPDLTDQPLPDADHTWYTDGSSLLQEGQRKAGAAVTTETEVIWAKALPAGTSAQRAELIALTQALKMAEGKKLNVYTDSRYAFATAHIHGEIYRRRGWLTSEGKEIKNKDEILALLKALFLPKRLSIIHCPGHQKGHSAEARGNRMADQAARKAAITETPDTSTLLIENSSPSGGSKRTADGSEFEAGKRTADGSEFEKRTADGSEFESPKKKAKVE

SEQ ID NO: 2870 - protein, 2116 aa, synthetic construct; identical to SEQ ID NO: 2677

SEQ ID NO: 2871 - protein, 2111 aa, synthetic construct; identical to SEQ ID NO: 2676

SEQ ID NO: 2872 - protein, 2116 aa, synthetic construct
MPAAKRVKLDGGDKKYSIGLDIGTNSVGWAVITDEYKVPSKKFKVLGNTDRHSIKKNLIGALLFDSGETAEATRLKRTARRRYTRRKNRICYLQEIFSNEMAKVDDSFFHRLEESFLVEEDKKHERHPIFGNIVDEVAYHEKYPTIYHLRKKLVDSTDKADLRLIYLALAHMIKFRGHFLIEGDLNPDNSDVDKLFIQLVQTYNQLFEENPINASGVDAKAILSARLSKSRRLENLIAQLPGEKKNGLFGNLIALSLGLTPNFKSNFDLAEDAKLQLSKDTYDDDLDNLLAQIGDQYADLFLAAKNLSDAILLSDILRVNTEITKAPLSASMIKRYDEHHQDLTLLKALVRQQLPEKYKEIFFDQSKNGYAGYIDGGASQEEFYKFIKPILEKMDGTEELLVKLNREDLLRKQRTFDNGSIPHQIHLGELHAILRRQEDFYPFLKDNREKIEKILTFRIPYYVGPLARGNSRFAWMTRKSEETITPWNFEEVVDKGASAQSFIERMTNFDKNLPNEKVLPKHSLLYEYFTVYNELTKVKYVTEGMRKPAFLSGEQKKAIVDLLFKTNRKVTVKQLKEDYFKKIECFDSVEISGVEDRFNASLGTYHDLLKIIKDKDFLDNEENEDILEDIVLTLTLFEDREMIEERLKTYAHLFDDKVMKQLKRRRYTGWGRLSRKLINGIRDKQSGKTILDFLKSDGFANRNFMQLIHDDSLTFKEDIQKAQVSGQGDSLHEHIANLAGSPAIKKGILQTVKVVDELVKVMGRHKPENIVIEMARENQTTQKGQKNSRERMKRIEEGIKELGSQILKEHPVENTQLQNEKLYLYYLQNGRDMYVDQELDINRLSDYDVDHIVPQSFLKDDSIDNKVLTRSDKARGKSDNVPSEEVVKKMKNYWRQLLNAKLITQRKFDNLTKAERGGLSELDKAGFIKRQLVETRQITKHVAQILDSRMNTKYDENDKLIREVKVITLKSKLVSDFRKDFQFYKVREINNYHHAHDAYLNAVVGTALIKKYPKLESEFVYGDYKVYDVRKMIAKSEQEIGKATAKYFFYSNIMNFFKTEITLANGEIRKRPLIETNGETGEIVWDKGRDFATVRKVLSMPQVNIVKKTEVQTGGFSKESILPKRNSDKLIARKKDWDPKKYGGFDSPTVAYSVLVVAKVEKGKSKKLKSVKELLGITIMERSSFEKNPIDFLEAKGYKEVKKDLIIKLPKYSLFELENGRKRMLASAGELQKGNELALPSKYVNFLYLASHYEKLKGSPEDNEQKQLFVEQHKHYLDEIIEQISEFSKRVILADANLDKVLSAYNKHRDKPIREQAENIIHLFTLTNLGAPAAFKYFDTTIDRKRYTSTKEVLDATLIHQSITGLYETRIDLSQLGGDGGPAPGGGEAAAKGGTLNIEDEYRLHETSKEPDVSLGSTWLSDFPQAWAETGGMGLAVRQAPLIIPLKATSTPVSIKQYPMSQEARLGIKPHIQRLLDQGILVPCQSPWNTPLLPVKKPGTNDYRPVQDLREVNKRVEDIHPTVPNPYNLLSGLPPSHQWYTVLDLKDAFFCLRLHPTSQPLFAFEWRDPEMGISGQLTWTRLPQGFKNSPTLFNEALHRDLADFRIQHPDLILLQYVDDLLLAATSELDCQQGTRALLQTLGNLGYRASAKKAQICQKQVKYLGYLLKEGQRWLTEARKETVMGQPTPKTPRQLREFLGKAGFCRLFIPGFAEMAAPLYPLTKPGTLFNWGPDQQKAYQEIKQALLTAPALGLPDLTKPFELFVDEKQGYAKGVLTQKLGPWRRPVAYLSKKLDPVAAGWPPCLRMVAAIAVLTKDAGKLTMGQPLVILAPHAVEALVKQPPDRWLSNARMTHYQALLLDTDRVQFGPVVALNPATLLPLPEEGLQHNCLDILAEAHGTRPDLTDQPLPDADHTWYTDGSSLLQEGQRKAGAAVTTETEVIWAKALPAGTSAQRAELIALTQALKMAEGKKLNVYTDSRYAFATAHIHGEIYRRRGWLTSEGKEIKNKDEILALLKALFLPKRLSIIHCPGHQKGHSAEARGNRMADQAARKAAITETPDTSTLLIENSSPSGGSKRTADGSEFEAGKRTADGSEFEKRTADGSEFESPKKKAKVE

SEQ ID NO: 2873 - protein, 2116 aa, synthetic construct; identical to SEQ ID NO: 2651

SEQ ID NO: 2874 - protein, 2116 aa, synthetic construct; identical to SEQ ID NO: 2638

SEQ ID NO: 2875 - protein, 2114 aa, synthetic construct; identical to SEQ ID NO: 2685

SEQ ID NO: 2876 - protein, 2114 aa, synthetic construct; identical to SEQ ID NO: 2698

SEQ ID NO: 2877 - protein, 2120 aa, synthetic construct; identical to SEQ ID NO: 2627

SEQ ID NO: 2878 - protein, 2114 aa, synthetic construct; identical to SEQ ID NO: 2649

SEQ ID NO: 2879 - protein, 2116 aa, synthetic construct
MPAAKRVKLDGGDKKYSIGLDIGTNSVGWAVITDEYKVPSKKFKVLGNTDRHSIKKNLIGALLFDSGETAEATRLKRTARRRYTRRKNRICYLQEIFSNEMAKVDDSFFHRLEESFLVEEDKKHERHPIFGNIVDEVAYHEKYPTIYHLRKKLVDSTDKADLRLIYLALAHMIKFRGHFLIEGDLNPDNSDVDKLFIQLVQTYNQLFEENPINASGVDAKAILSARLSKSRRLENLIAQLPGEKKNGLFGNLIALSLGLTPNFKSNFDLAEDAKLQLSKDTYDDDLDNLLAQIGDQYADLFLAAKNLSDAILLSDILRVNTEITKAPLSASMIKRYDEHHQDLTLLKALVRQQLPEKYKEIFFDQSKNGYAGYIDGGASQEEFYKFIKPILEKMDGTEELLVKLNREDLLRKQRTFDNGSIPHQIHLGELHAILRRQEDFYPFLKDNREKIEKILTFRIPYYVGPLARGNSRFAWMTRKSEETITPWNFEEVVDKGASAQSFIERMTNFDKNLPNEKVLPKHSLLYEYFTVYNELTKVKYVTEGMRKPAFLSGEQKKAIVDLLFKTNRKVTVKQLKEDYFKKIECFDSVEISGVEDRFNASLGTYHDLLKIIKDKDFLDNEENEDILEDIVLTLTLFEDREMIEERLKTYAHLFDDKVMKQLKRRRYTGWGRLSRKLINGIRDKQSGKTILDFLKSDGFANRNFMQLIHDDSLTFKEDIQKAQVSGQGDSLHEHIANLAGSPAIKKGILQTVKVVDELVKVMGRHKPENIVIEMARENQTTQKGQKNSRERMKRIEEGIKELGSQILKEHPVENTQLQNEKLYLYYLQNGRDMYVDQELDINRLSDYDVDHIVPQSFLKDDSIDNKVLTRSDKARGKSDNVPSEEVVKKMKNYWRQLLNAKLITQRKFDNLTKAERGGLSELDKAGFIKRQLVETRQITKHVAQILDSRMNTKYDENDKLIREVKVITLKSKLVSDFRKDFQFYKVREINNYHHAHDAYLNAVVGTALIKKYPKLESEFVYGDYKVYDVRKMIAKSEQEIGKATAKYFFYSNIMNFFKTEITLANGEIRKRPLIETNGETGEIVWDKGRDFATVRKVLSMPQVNIVKKTEVQTGGFSKESILPKRNSDKLIARKKDWDPKKYGGFDSPTVAYSVLVVAKVEKGKSKKLKSVKELLGITIMERSSFEKNPIDFLEAKGYKEVKKDLIIKLPKYSLFELENGRKRMLASAGELQKGNELALPSKYVNFLYLASHYEKLKGSPEDNEQKQLFVEQHKHYLDEIIEQISEFSKRVILADANLDKVLSAYNKHRDKPIREQAENIIHLFTLTNLGAPAAFKYFDTTIDRKRYTSTKEVLDATLIHQSITGLYETRIDLSQLGGDGGGGGEAAAKPAPGGTLNIEDEYRLHETSKEPDVSLGSTWLSDFPQAWAETGGMGLAVRQAPLIIPLKATSTPVSIKQYPMSQEARLGIKPHIQRLLDQGILVPCQSPWNTPLLPVKKPGTNDYRPVQDLREVNKRVEDIHPTVPNPYNLLSGLPPSHQWYTVLDLKDAFFCLRLHPTSQPLFAFEWRDPEMGISGQLTWTRLPQGFKNSPTLFNEALHRDLADFRIQHPDLILLQYVDDLLLAATSELDCQQGTRALLQTLGNLGYRASAKKAQICQKQVKYLGYLLKEGQRWLTEARKETVMGQPTPKTPRQLREFLGKAGFCRLFIPGFAEMAAPLYPLTKPGTLFNWGPDQQKAYQEIKQALLTAPALGLPDLTKPFELFVDEKQGYAKGVLTQKLGPWRRPVAYLSKKLDPVAAGWPPCLRMVAAIAVLTKDAGKLTMGQPLVILAPHAVEALVKQPPDRWLSNARMTHYQALLLDTDRVQFGPVVALNPATLLPLPEEGLQHNCLDILAEAHGTRPDLTDQPLPDADHTWYTDGSSLLQEGQRKAGAAVTTETEVIWAKALPAGTSAQRAELIALTQALKMAEGKKLNVYTDSRYAFATAHIHGEIYRRRGWLTSEGKEIKNKDEILALLKALFLPKRLSIIHCPGHQKGHSAEARGNRMADQAARKAAITETPDTSTLLIENSSPSGGSKRTADGSEFEAGKRTADGSEFEKRTADGSEFESPKKKAKVE

SEQ ID NO: 2880 - protein, 2130 aa, synthetic construct; identical to SEQ ID NO: 2678

SEQ ID NO: 2881 - protein, 2110 aa, synthetic construct; identical to SEQ ID NO: 2620

SEQ ID NO: 2882 - protein, 2117 aa, synthetic construct; identical to SEQ ID NO: 2687

SEQ ID NO: 2883 - protein, 2113 aa, synthetic construct
MPAAKRVKLDGGDKKYSIGLDIGTNSVGWAVITDEYKVPSKKFKVLGNTDRHSIKKNLIGALLFDSGETAEATRLKRTARRRYTRRKNRICYLQEIFSNEMAKVDDSFFHRLEESFLVEEDKKHERHPIFGNIVDEVAYHEKYPTIYHLRKKLVDSTDKADLRLIYLALAHMIKFRGHFLIEGDLNPDNSDVDKLFIQLVQTYNQLFEENPINASGVDAKAILSARLSKSRRLENLIAQLPGEKKNGLFGNLIALSLGLTPNFKSNFDLAEDAKLQLSKDTYDDDLDNLLAQIGDQYADLFLAAKNLSDAILLSDILRVNTEITKAPLSASMIKRYDEHHQDLTLLKALVRQQLPEKYKEIFFDQSKNGYAGYIDGGASQEEFYKFIKPILEKMDGTEELLVKLNREDLLRKQRTFDNGSIPHQIHLGELHAILRRQEDFYPFLKDNREKIEKILTFRIPYYVGPLARGNSRFAWMTRKSEETITPWNFEEVVDKGASAQSFIERMTNFDKNLPNEKVLPKHSLLYEYFTVYNELTKVKYVTEGMRKPAFLSGEQKKAIVDLLFKTNRKVTVKQLKEDYFKKIECFDSVEISGVEDRFNASLGTYHDLLKIIKDKDFLDNEENEDILEDIVLTLTLFEDREMIEERLKTYAHLFDDKVMKQLKRRRYTGWGRLSRKLINGIRDKQSGKTILDFLKSDGFANRNFMQLIHDDSLTFKEDIQKAQVSGQGDSLHEHIANLAGSPAIKKGILQTVKVVDELVKVMGRHKPENIVIEMARENQTTQKGQKNSRERMKRIEEGIKELGSQILKEHPVENTQLQNEKLYLYYLQNGRDMYVDQELDINRLSDYDVDHIVPQSFLKDDSIDNKVLTRSDKARGKSDNVPSEEVVKKMKNYWRQLLNAKLITQRKFDNLTKAERGGLSELDKAGFIKRQLVETRQITKHVAQILDSRMNTKYDENDKLIREVKVITLKSKLVSDFRKDFQFYKVREINNYHHAHDAYLNAVVGTALIKKYPKLESEFVYGDYKVYDVRKMIAKSEQEIGKATAKYFFYSNIMNFFKTEITLANGEIRKRPLIETNGETGEIVWDKGRDFATVRKVLSMPQVNIVKKTEVQTGGFSKESILPKRNSDKLIARKKDWDPKKYGGFDSPTVAYSVLVVAKVEKGKSKKLKSVKELLGITIMERSSFEKNPIDFLEAKGYKEVKKDLIIKLPKYSLFELENGRKRMLASAGELQKGNELALPSKYVNFLYLASHYEKLKGSPEDNEQKQLFVEQHKHYLDEIIEQISEFSKRVILADANLDKVLSAYNKHRDKPIREQAENIIHLFTLTNLGAPAAFKYFDTTIDRKRYTSTKEVLDATLIHQSITGLYETRIDLSQLGGDGGPAPEAAAKGGTLNIEDEYRLHETSKEPDVSLGSTWLSDFPQAWAETGGMGLAVRQAPLIIPLKATSTPVSIKQYPMSQEARLGIKPHIQRLLDQGILVPCQSPWNTPLLPVKKPGTNDYRPVQDLREVNKRVEDIHPTVPNPYNLLSGLPPSHQWYTVLDLKDAFFCLRLHPTSQPLFAFEWRDPEMGISGQLTWTRLPQGFKNSPTLFNEALHRDLADFRIQHPDLILLQYVDDLLLAATSELDCQQGTRALLQTLGNLGYRASAKKAQICQKQVKYLGYLLKEGQRWLTEARKETVMGQPTPKTPRQLREFLGKAGFCRLFIPGFAEMAAPLYPLTKPGTLFNWGPDQQKAYQEIKQALLTAPALGLPDLTKPFELFVDEKQGYAKGVLTQKLGPWRRPVAYLSKKLDPVAAGWPPCLRMVAAIAVLTKDAGKLTMGQPLVILAPHAVEALVKQPPDRWLSNARMTHYQALLLDTDRVQFGPVVALNPATLLPLPEEGLQHNCLDILAEAHGTRPDLTDQPLPDADHTWYTDGSSLLQEGQRKAGAAVTTETEVIWAKALPAGTSAQRAELIALTQALKMAEGKKLNVYTDSRYAFATAHIHGEIYRRRGWLTSEGKEIKNKDEILALLKALFLPKRLSIIHCPGHQKGHSAEARGNRMADQAARKAAITETPDTSTLLIENSSPSGGSKRTADGSEFEAGKRTADGSEFEKRTADGSEFESPKKKAKVE

SEQ ID NO: 2884 - protein, 2116 aa, synthetic construct; identical to SEQ ID NO: 2674

SEQ ID NO: 2885 - protein, 2116 aa, synthetic construct; identical to SEQ ID NO: 2688

SEQ ID NO: 2886 - protein, 2111 aa, synthetic construct; identical to SEQ ID NO: 2653

SEQ ID NO: 2887 - protein, 2115 aa, synthetic construct; identical to SEQ ID NO: 2647

SEQ ID NO: 2888 - protein, 2125 aa, synthetic construct; identical to SEQ ID NO: 2610

SEQ ID NO: 2889 - protein, 2116 aa, synthetic construct; identical to SEQ ID NO: 2683

SEQ ID NO: 2890 - protein, 2114 aa, synthetic construct; identical to SEQ ID NO: 2633

SEQ ID NO: 2891 - protein, 2116 aa, synthetic construct; identical to SEQ ID NO: 2641

SEQ ID NO: 2892 - protein, 2138 aa, synthetic construct
MPAAKRVKLDGGDKKYSIGLDIGTNSVGWAVITDEYKVPSKKFKVLGNTDRHSIKKNLIGALLFDSGETAEATRLKRTARRRYTRRKNRICYLQEIFSNEMAKVDDSFFHRLEESFLVEEDKKHERHPIFGNIVDEVAYHEKYPTIYHLRKKLVDSTDKADLRLIYLALAHMIKFRGHFLIEGDLNPDNSDVDKLFIQLVQTYNQLFEENPINASGVDAKAILSARLSKSRRLENLIAQLPGEKKNGLFGNLIALSLGLTPNFKSNFDLAEDAKLQLSKDTYDDDLDNLLAQIGDQYADLFLAAKNLSDAILLSDILRVNTEITKAPLSASMIKRYDEHHQDLTLLKALVRQQLPEKYKEIFFDQSKNGYAGYIDGGASQEEFYKFIKPILEKMDGTEELLVKLNREDLLRKQRTFDNGSIPHQIHLGELHAILRRQEDFYPFLKDNREKIEKILTFRIPYYVGPLARGNSRFAWMTRKSEETITPWNFEEVVDKGASAQSFIERMTNFDKNLPNEKVLPKHSLLYEYFTVYNELTKVKYVTEGMRKPAFLSGEQKKAIVDLLFKTNRKVTVKQLKEDYFKKIECFDSVEISGVEDRFNASLGTYHDLLKIIKDKDFLDNEENEDILEDIVLTLTLFEDREMIEERLKTYAHLFDDKVMKQLKRRRYTGWGRLSRKLINGIRDKQSGKTILDFLKSDGFANRNFMQLIHDDSLTFKEDIQKAQVSGQGDSLHEHIANLAGSPAIKKGILQTVKVVDELVKVMGRHKPENIVIEMARENQTTQKGQKNSRERMKRIEEGIKELGSQILKEHPVENTQLQNEKLYLYYLQNGRDMYVDQELDINRLSDYDVDHIVPQSFLKDDSIDNKVLTRSDKARGKSDNVPSEEVVKKMKNYWRQLLNAKLITQRKFDNLTKAERGGLSELDKAGFIKRQLVETRQITKHVAQILDSRMNTKYDENDKLIREVKVITLKSKLVSDFRKDFQFYKVREINNYHHAHDAYLNAVVGTALIKKYPKLESEFVYGDYKVYDVRKMIAKSEQEIGKATAKYFFYSNIMNFFKTEITLANGEIRKRPLIETNGETGEIVWDKGRDFATVRKVLSMPQVNIVKKTEVQTGGFSKESILPKRNSDKLIARKKDWDPKKYGGFDSPTVAYSVLVVAKVEKGKSKKLKSVKELLGITIMERSSFEKNPIDFLEAKGYKEVKKDLIIKLPKYSLFELENGRKRMLASAGELQKGNELALPSKYVNFLYLASHYEKLKGSPEDNEQKQLFVEQHKHYLDEIIEQISEFSKRVILADANLDKVLSAYNKHRDKPIREQAENIIHLFTLTNLGAPAAFKYFDTTIDRKRYTSTKEVLDATLIHQSITGLYETRIDLSQLGGDGGSGGSSGGSSGSETPGTSESATPESSGGSSGGSSGGTLNIEDEYRLHETSKEPDVSLGSTWLSDFPQAWAETGGMGLAVRQAPLIIPLKATSTPVSIKQYPMSQEARLGIKPHIQRLLDQGILVPCQSPWNTPLLPVKKPGTNDYRPVQDLREVNKRVEDIHPTVPNPYNLLSGLPPSHQWYTVLDLKDAFFCLRLHPTSQPLFAFEWRDPEMGISGQLTWTRLPQGFKNSPTLFNEALHRDLADFRIQHPDLILLQYVDDLLLAATSELDCQQGTRALLQTLGNLGYRASAKKAQICQKQVKYLGYLLKEGQRWLTEARKETVMGQPTPKTPRQLREFLGKAGFCRLFIPGFAEMAAPLYPLTKPGTLFNWGPDQQKAYQEIKQALLTAPALGLPDLTKPFELFVDEKQGYAKGVLTQKLGPWRRPVAYLSKKLDPVAAGWPPCLRMVAAIAVLTKDAGKLTMGQPLVILAPHAVEALVKQPPDRWLSNARMTHYQALLLDTDRVQFGPVVALNPATLLPLPEEGLQHNCLDILAEAHGTRPDLTDQPLPDADHTWYTDGSSLLQEGQRKAGAAVTTETEVIWAKALPAGTSAQRAELIALTQALKMAEGKKLNVYTDSRYAFATAHIHGEIYRRRGWLTSEGKEIKNKDEILALLKALFLPKRLSIIHCPGHQKGHSAEARGNRMADQAARKAAITETPDTSTLLIENSSPSGGSKRTADGSEFEAGKRTADGSEFEKRTADGSEFESPKKKAKVE

SEQ ID NO: 2893 - protein, 2116 aa, synthetic construct; identical to SEQ ID NO: 2701

SEQ ID NO: 2894 - protein, 2114 aa, synthetic construct; identical to SEQ ID NO: 2684

SEQ ID NO: 2895 - protein, 2114 aa, synthetic construct; identical to SEQ ID NO: 2622

SEQ ID NO: 2896 - protein, 2116 aa, synthetic construct; identical to SEQ ID NO: 2645

SEQ ID NO: 2897 - protein, 2116 aa, synthetic construct; identical to SEQ ID NO: 2658

SEQ ID NO: 2898 - protein, 2114 aa, synthetic construct; identical to SEQ ID NO: 2670

SEQ ID NO: 2899 - protein, 2110 aa, synthetic construct
MPAAKRVKLDGGDKKYSIGLDIGTNSVGWAVITDEYKVPSKKFKVLGNTDRHSIKKNLIGALLFDSGETAEATRLKRTARRRYTRRKNRICYLQEIFSNEMAKVDDSFFHRLEESFLVEEDKKHERHPIFGNIVDEVAYHEKYPTIYHLRKKLVDSTDKADLRLIYLALAHMIKFRGHFLIEGDLNPDNSDVDKLFIQLVQTYNQLFEENPINASGVDAKAILSARLSKSRRLENLIAQLPGEKKNGLFGNLIALSLGLTPNFKSNFDLAEDAKLQLSKDTYDDDLDNLLAQIGDQYADLFLAAKNLSDAILLSDILRVNTEITKAPLSASMIKRYDEHHQDLTLLKALVRQQLPEKYKEIFFDQSKNGYAGYIDGGASQEEFYKFIKPILEKMDGTEELLVKLNREDLLRKQRTFDNGSIPHQIHLGELHAILRRQEDFYPFLKDNREKIEKILTFRIPYYVGPLARGNSRFAWMTRKSEETITPWNFEEVVDKGASAQSFIERMTNFDKNLPNEKVLPKHSLLYEYFTVYNELTKVKYVTEGMRKPAFLSGEQKKAIVDLLFKTNRKVTVKQLKEDYFKKIECFDSVEISGVEDRFNASLGTYHDLLKIIKDKDFLDNEENEDILEDIVLTLTLFEDREMIEERLKTYAHLFDDKVMKQLKRRRYTGWGRLSRKLINGIRDKQSGKTILDFLKSDGFANRNFMQLIHDDSLTFKEDIQKAQVSGQGDSLHEHIANLAGSPAIKKGILQTVKVVDELVKVMGRHKPENIVIEMARENQTTQKGQKNSRERMKRIEEGIKELGSQILKEHPVENTQLQNEKLYLYYLQNGRDMYVDQELDINRLSDYDVDHIVPQSFLKDDSIDNKVLTRSDKARGKSDNVPSEEVVKKMKNYWRQLLNAKLITQRKFDNLTKAERGGLSELDKAGFIKRQLVETRQITKHVAQILDSRMNTKYDENDKLIREVKVITLKSKLVSDFRKDFQFYKVREINNYHHAHDAYLNAVVGTALIKKYPKLESEFVYGDYKVYDVRKMIAKSEQEIGKATAKYFFYSNIMNFFKTEITLANGEIRKRPLIETNGETGEIVWDKGRDFATVRKVLSMPQVNIVKKTEVQTGGFSKESILPKRNSDKLIARKKDWDPKKYGGFDSPTVAYSVLVVAKVEKGKSKKLKSVKELLGITIMERSSFEKNPIDFLEAKGYKEVKKDLIIKLPKYSLFELENGRKRMLASAGELQKGNELALPSKYVNFLYLASHYEKLKGSPEDNEQKQLFVEQHKHYLDEIIEQISEFSKRVILADANLDKVLSAYNKHRDKPIREQAENIIHLFTLTNLGAPAAFKYFDTTIDRKRYTSTKEVLDATLIHQSITGLYETRIDLSQLGGDGGGGGGGGGTLNIEDEYRLHETSKEPDVSLGSTWLSDFPQAWAETGGMGLAVRQAPLIIPLKATSTPVSIKQYPMSQEARLGIKPHIQRLLDQGILVPCQSPWNTPLLPVKKPGTNDYRPVQDLREVNKRVEDIHPTVPNPYNLLSGLPPSHQWYTVLDLKDAFFCLRLHPTSQPLFAFEWRDPEMGISGQLTWTRLPQGFKNSPTLFNEALHRDLADFRIQHPDLILLQYVDDLLLAATSELDCQQGTRALLQTLGNLGYRASAKKAQICQKQVKYLGYLLKEGQRWLTEARKETVMGQPTPKTPRQLREFLGKAGFCRLFIPGFAEMAAPLYPLTKPGTLFNWGPDQQKAYQEIKQALLTAPALGLPDLTKPFELFVDEKQGYAKGVLTQKLGPWRRPVAYLSKKLDPVAAGWPPCLRMVAAIAVLTKDAGKLTMGQPLVILAPHAVEALVKQPPDRWLSNARMTHYQALLLDTDRVQFGPVVALNPATLLPLPEEGLQHNCLDILAEAHGTRPDLTDQPLPDADHTWYTDGSSLLQEGQRKAGAAVTTETEVIWAKALPAGTSAQRAELIALTQALKMAEGKKLNVYTDSRYAFATAHIHGEIYRRRGWLTSEGKEIKNKDEILALLKALFLPKRLSIIHCPGHQKGHSAEARGNRMADQAARKAAITETPDTSTLLIENSSPSGGSKRTADGSEFEAGKRTADGSEFEKRTADGSEFESPKKKAKVE

SEQ ID NO: 2900 - protein, 2120 aa, synthetic construct; identical to SEQ ID NO: 2662

SEQ ID NO: 2901 - protein, 2116 aa, synthetic construct; identical to SEQ ID NO: 2629

SEQ ID NO: 2902 - protein, 2117 aa, synthetic construct; identical to SEQ ID NO: 2696

SEQ ID NO: 2903 - protein, 2114 aa, synthetic construct; identical to SEQ ID NO: 2634

SEQ ID NO: 2904 - protein, 2114 aa, synthetic construct; identical to SEQ ID NO: 2618

SEQ ID NO: 2905 - protein, 2111 aa, synthetic construct
MPAAKRVKLDGGDKKYSIGLDIGTNSVGWAVITDEYKVPSKKFKVLGNTDRHSIKKNLIGALLFDSGETAEATRLKRTARRRYTRRKNRICYLQEIFSNEMAKVDDSFFHRLEESFLVEEDKKHERHPIFGNIVDEVAYHEKYPTIYHLRKKLVDSTDKADLRLIYLALAHMIKFRGHFLIEGDLNPDNSDVDKLFIQLVQTYNQLFEENPINASGVDAKAILSARLSKSRRLENLIAQLPGEKKNGLFGNLIALSLGLTPNFKSNFDLAEDAKLQLSKDTYDDDLDNLLAQIGDQYADLFLAAKNLSDAILLSDILRVNTEITKAPLSASMIKRYDEHHQDLTLLKALVRQQLPEKYKEIFFDQSKNGYAGYIDGGASQEEFYKFIKPILEKMDGTEELLVKLNREDLLRKQRTFDNGSIPHQIHLGELHAILRRQEDFYPFLKDNREKIEKILTFRIPYYVGPLARGNSRFAWMTRKSEETITPWNFEEVVDKGASAQSFIERMTNFDKNLPNEKVLPKHSLLYEYFTVYNELTKVKYVTEGMRKPAFLSGEQKKAIVDLLFKTNRKVTVKQLKEDYFKKIECFDSVEISGVEDRFNASLGTYHDLLKIIKDKDFLDNEENEDILEDIVLTLTLFEDREMIEERLKTYAHLFDDKVMKQLKRRRYTGWGRLSRKLINGIRDKQSGKTILDFLKSDGFANRNFMQLIHDDSLTFKEDIQKAQVSGQGDSLHEHIANLAGSPAIKKGILQTVKVVDELVKVMGRHKPENIVIEMARENQTTQKGQKNSRERMKRIEEGIKELGSQILKEHPVENTQLQNEKLYLYYLQNGRDMYVDQELDINRLSDYDVDHIVPQSFLKDDSIDNKVLTRSDKARGKSDNVPSEEVVKKMKNYWRQLLNAKLITQRKFDNLTKAERGGLSELDKAGFIKRQLVETRQITKHVAQILDSRMNTKYDENDKLIREVKVITLKSKLVSDFRKDFQFYKVREINNYHHAHDAYLNAVVGTALIKKYPKLESEFVYGDYKVYDVRKMIAKSEQEIGKATAKYFFYSNIMNFFKTEITLANGEIRKRPLIETNGETGEIVWDKGRDFATVRKVLSMPQVNIVKKTEVQTGGFSKESILPKRNSDKLIARKKDWDPKKYGGFDSPTVAYSVLVVAKVEKGKSKKLKSVKELLGITIMERSSFEKNPIDFLEAKGYKEVKKDLIIKLPKYSLFELENGRKRMLASAGELQKGNELALPSKYVNFLYLASHYEKLKGSPEDNEQKQLFVEQHKHYLDEIIEQISEFSKRVILADANLDKVLSAYNKHRDKPIREQAENIIHLFTLTNLGAPAAFKYFDTTIDRKRYTSTKEVLDATLIHQSITGLYETRIDLSQLGGDGGGSSGSSGGTLNIEDEYRLHETSKEPDVSLGSTWLSDFPQAWAETGGMGLAVRQAPLIIPLKATSTPVSIKQYPMSQEARLGIKPHIQRLLDQGILVPCQSPWNTPLLPVKKPGTNDYRPVQDLREVNKRVEDIHPTVPNPYNLLSGLPPSHQWYTVLDLKDAFFCLRLHPTSQPLFAFEWRDPEMGISGQLTWTRLPQGFKNSPTLFNEALHRDLADFRIQHPDLILLQYVDDLLLAATSELDCQQGTRALLQTLGNLGYRASAKKAQICQKQVKYLGYLLKEGQRWLTEARKETVMGQPTPKTPRQLREFLGKAGFCRLFIPGFAEMAAPLYPLTKPGTLFNWGPDQQKAYQEIKQALLTAPALGLPDLTKPFELFVDEKQGYAKGVLTQKLGPWRRPVAYLSKKLDPVAAGWPPCLRMVAAIAVLTKDAGKLTMGQPLVILAPHAVEALVKQPPDRWLSNARMTHYQALLLDTDRVQFGPVVALNPATLLPLPEEGLQHNCLDILAEAHGTRPDLTDQPLPDADHTWYTDGSSLLQEGQRKAGAAVTTETEVIWAKALPAGTSAQRAELIALTQALKMAEGKKLNVYTDSRYAFATAHIHGEIYRRRGWLTSEGKEIKNKDEILALLKALFLPKRLSIIHCPGHQKGHSAEARGNRMADQAARKAAITETPDTSTLLIENSSPSGGSKRTADGSEFEAGKRTADGSEFEKRTADGSEFESPKKKAKVE

SEQ ID NO: 2906 - protein, 2111 aa, synthetic construct; identical to SEQ ID NO: 2643

SEQ ID NO: 2907 - protein, 2121 aa, synthetic construct; identical to SEQ ID NO: 2663

SEQ ID NO: 2908 - protein, 2113 aa, synthetic construct; identical to SEQ ID NO: 2626

SEQ ID NO: 2909 - protein, 2115 aa, synthetic construct; identical to SEQ ID NO: 2639

SEQ ID NO: 2910 - protein, 2111 aa, synthetic construct; identical to SEQ ID NO: 2671

SEQ ID NO: 2911 - protein, 2111 aa, synthetic construct; identical to SEQ ID NO: 2672

SEQ ID NO: 2912 - protein, 2116 aa, synthetic construct; identical to SEQ ID NO: 2703

SEQ ID NO: 2913 - protein, 2116 aa, synthetic construct; identical to SEQ ID NO: 2660

SEQ ID NO: 2914 - protein, 2111 aa, synthetic construct
MPAAKRVKLDGGDKKYSIGLDIGTNSVGWAVITDEYKVPSKKFKVLGNTDRHSIKKNLIGALLFDSGETAEATRLKRTARRRYTRRKNRICYLQEIFSNEMAKVDDSFFHRLEESFLVEEDKKHERHPIFGNIVDEVAYHEKYPTIYHLRKKLVDSTDKADLRLIYLALAHMIKFRGHFLIEGDLNPDNSDVDKLFIQLVQTYNQLFEENPINASGVDAKAILSARLSKSRRLENLIAQLPGEKKNGLFGNLIALSLGLTPNFKSNFDLAEDAKLQLSKDTYDDDLDNLLAQIGDQYADLFLAAKNLSDAILLSDILRVNTEITKAPLSASMIKRYDEHHQDLTLLKALVRQQLPEKYKEIFFDQSKNGYAGYIDGGASQEEFYKFIKPILEKMDGTEELLVKLNREDLLRKQRTFDNGSIPHQIHLGELHAILRRQEDFYPFLKDNREKIEKILTFRIPYYVGPLARGNSRFAWMTRKSEETITPWNFEEVVDKGASAQSFIERMTNFDKNLPNEKVLPKHSLLYEYFTVYNELTKVKYVTEGMRKPAFLSGEQKKAIVDLLFKTNRKVTVKQLKEDYFKKIECFDSVEISGVEDRFNASLGTYHDLLKIIKDKDFLDNEENEDILEDIVLTLTLFEDREMIEERLKTYAHLFDDKVMKQLKRRRYTGWGRLSRKLINGIRDKQSGKTILDFLKSDGFANRNFMQLIHDDSLTFKEDIQKAQVSGQGDSLHEHIANLAGSPAIKKGILQTVKVVDELVKVMGRHKPENIVIEMARENQTTQKGQKNSRERMKRIEEGIKELGSQILKEHPVENTQLQNEKLYLYYLQNGRDMYVDQELDINRLSDYDVDHIVPQSFLKDDSIDNKVLTRSDKARGKSDNVPSEEVVKKMKNYWRQLLNAKLITQRKFDNLTKAERGGLSELDKAGFIKRQLVETRQITKHVAQILDSRMNTKYDENDKLIREVKVITLKSKLVSDFRKDFQFYKVREINNYHHAHDAYLNAVVGTALIKKYPKLESEFVYGDYKVYDVRKMIAKSEQEIGKATAKYFFYSNIMNFFKTEITLANGEIRKRPLIETNGETGEIVWDKGRDFATVRKVLSMPQVNIVKKTEVQTGGFSKESILPKRNSDKLIARKKDWDPKKYGGFDSPTVAYSVLVVAKVEKGKSKKLKSVKELLGITIMERSSFEKNPIDFLEAKGYKEVKKDLIIKLPKYSLFELENGRKRMLASAGELQKGNELALPSKYVNFLYLASHYEKLKGSPEDNEQKQLFVEQHKHYLDEIIEQISEFSKRVILADANLDKVLSAYNKHRDKPIREQAENIIHLFTLTNLGAPAAFKYFDTTIDRKRYTSTKEVLDATLIHQSITGLYETRIDLSQLGGDGGGGSGSSGGTLNIEDEYRLHETSKEPDVSLGSTWLSDFPQAWAETGGMGLAVRQAPLIIPLKATSTPVSIKQYPMSQEARLGIKPHIQRLLDQGILVPCQSPWNTPLLPVKKPGTNDYRPVQDLREVNKRVEDIHPTVPNPYNLLSGLPPSHQWYTVLDLKDAFFCLRLHPTSQPLFAFEWRDPEMGISGQLTWTRLPQGFKNSPTLFNEALHRDLADFRIQHPDLILLQYVDDLLLAATSELDCQQGTRALLQTLGNLGYRASAKKAQICQKQVKYLGYLLKEGQRWLTEARKETVMGQPTPKTPRQLREFLGKAGFCRLFIPGFAEMAAPLYPLTKPGTLFNWGPDQQKAYQEIKQALLTAPALGLPDLTKPFELFVDEKQGYAKGVLTQKLGPWRRPVAYLSKKLDPVAAGWPPCLRMVAAIAVLTKDAGKLTMGQPLVILAPHAVEALVKQPPDRWLSNARMTHYQALLLDTDRVQFGPVVALNPATLLPLPEEGLQHNCLDILAEAHGTRPDLTDQPLPDADHTWYTDGSSLLQEGQRKAGAAVTTETEVIWAKALPAGTSAQRAELIALTQALKMAEGKKLNVYTDSRYAFATAHIHGEIYRRRGWLTSEGKEIKNKDEILALLKALFLPKRLSIIHCPGHQKGHSAEARGNRMADQAARKAAITETPDTSTLLIENSSPSGGSKRTADGSEFEAGKRTADGSEFEKRTADGSEFESPKKKAKVE

SEQ ID NO: 2915 - protein, 2116 aa, synthetic construct; identical to SEQ ID NO: 2668

SEQ ID NO: 2916 - protein, 2113 aa, synthetic construct
MPAAKRVKLDGGDKKYSIGLDIGTNSVGWAVITDEYKVPSKKFKVLGNTDRHSIKKNLIGALLFDSGETAEATRLKRTARRRYTRRKNRICYLQEIFSNEMAKVDDSFFHRLEESFLVEEDKKHERHPIFGNIVDEVAYHEKYPTIYHLRKKLVDSTDKADLRLIYLALAHMIKFRGHFLIEGDLNPDNSDVDKLFIQLVQTYNQLFEENPINASGVDAKAILSARLSKSRRLENLIAQLPGEKKNGLFGNLIALSLGLTPNFKSNFDLAEDAKLQLSKDTYDDDLDNLLAQIGDQYADLFLAAKNLSDAILLSDILRVNTEITKAPLSASMIKRYDEHHQDLTLLKALVRQQLPEKYKEIFFDQSKNGYAGYIDGGASQEEFYKFIKPILEKMDGTEELLVKLNREDLLRKQRTFDNGSIPHQIHLGELHAILRRQEDFYPFLKDNREKIEKILTFRIPYYVGPLARGNSRFAWMTRKSEETITPWNFEEVVDKGASAQSFIERMTNFDKNLPNEKVLPKHSLLYEYFTVYNELTKVKYVTEGMRKPAFLSGEQKKAIVDLLFKTNRKVTVKQLKEDYFKKIECFDSVEISGVEDRFNASLGTYHDLLKIIKDKDFLDNEENEDILEDIVLTLTLFEDREMIEERLKTYAHLFDDKVMKQLKRRRYTGWGRLSRKLINGIRDKQSGKTILDFLKSDGFANRNFMQLIHDDSLTFKEDIQKAQVSGQGDSLHEHIANLAGSPAIKKGILQTVKVVDELVKVMGRHKPENIVIEMARENQTTQKGQKNSRERMKRIEEGIKELGSQILKEHPVENTQLQNEKLYLYYLQNGRDMYVDQELDINRLSDYDVDHIVPQSFLKDDSIDNKVLTRSDKARGKSDNVPSEEVVKKMKNYWRQLLNAKLITQRKFDNLTKAERGGLSELDKAGFIKRQLVETRQITKHVAQILDSRMNTKYDENDKLIREVKVITLKSKLVSDFRKDFQFYKVREINNYHHAHDAYLNAVVGTALIKKYPKLESEFVYGDYKVYDVRKMIAKSEQEIGKATAKYFFYSNIMNFFKTEITLANGEIRKRPLIETNGETGEIVWDKGRDFATVRKVLSMPQVNIVKKTEVQTGGFSKESILPKRNSDKLIARKKDWDPKKYGGFDSPTVAYSVLVVAKVEKGKSKKLKSVKELLGITIMERSSFEKNPIDFLEAKGYKEVKKDLIIKLPKYSLFELENGRKRMLASAGELQKGNELALPSKYVNFLYLASHYEKLKGSPEDNEQKQLFVEQHKHYLDEIIEQISEFSKRVILADANLDKVLSAYNKHRDKPIREQAENIIHLFTLTNLGAPAAFKYFDTTIDRKRYTSTKEVLDATLIHQSITGLYETRIDLSQLGGDGGGSSEAAAKGGTLNIEDEYRLHETSKEPDVSLGSTWLSDFPQAWAETGGMGLAVRQAPLIIPLKATSTPVSIKQYPMSQEARLGIKPHIQRLLDQGILVPCQSPWNTPLLPVKKPGTNDYRPVQDLREVNKRVEDIHPTVPNPYNLLSGLPPSHQWYTVLDLKDAFFCLRLHPTSQPLFAFEWRDPEMGISGQLTWTRLPQGFKNSPTLFNEALHRDLADFRIQHPDLILLQYVDDLLLAATSELDCQQGTRALLQTLGNLGYRASAKKAQICQKQVKYLGYLLKEGQRWLTEARKETVMGQPTPKTPRQLREFLGKAGFCRLFIPGFAEMAAPLYPLTKPGTLFNWGPDQQKAYQEIKQALLTAPALGLPDLTKPFELFVDEKQGYAKGVLTQKLGPWRRPVAYLSKKLDPVAAGWPPCLRMVAAIAVLTKDAGKLTMGQPLVILAPHAVEALVKQPPDRWLSNARMTHYQALLLDTDRVQFGPVVALNPATLLPLPEEGLQHNCLDILAEAHGTRPDLTDQPLPDADHTWYTDGSSLLQEGQRKAGAAVTTETEVIWAKALPAGTSAQRAELIALTQALKMAEGKKLNVYTDSRYAFATAHIHGEIYRRRGWLTSEGKEIKNKDEILALLKALFLPKRLSIIHCPGHQKGHSAEARGNRMADQAARKAAITETPDTSTLLIENSSPSGGSKRTADGSEFEAGKRTADGSEFEKRTADGSEFESPKKKAKVE

SEQ ID NO: 2917 - protein, 2123 aa, synthetic construct
MPAAKRVKLDGGDKKYSIGLDIGTNSVGWAVITDEYKVPSKKFKVLGNTDRHSIKKNLIGALLFDSGETAEATRLKRTARRRYTRRKNRICYLQEIFSNEMAKVDDSFFHRLEESFLVEEDKKHERHPIFGNIVDEVAYHEKYPTIYHLRKKLVDSTDKADLRLIYLALAHMIKFRGHFLIEGDLNPDNSDVDKLFIQLVQTYNQLFEENPINASGVDAKAILSARLSKSRRLENLIAQLPGEKKNGLFGNLIALSLGLTPNFKSNFDLAEDAKLQLSKDTYDDDLDNLLAQIGDQYADLFLAAKNLSDAILLSDILRVNTEITKAPLSASMIKRYDEHHQDLTLLKALVRQQLPEKYKEIFFDQSKNGYAGYIDGGASQEEFYKFIKPILEKMDGTEELLVKLNREDLLRKQRTFDNGSIPHQIHLGELHAILRRQEDFYPFLKDNREKIEKILTFRIPYYVGPLARGNSRFAWMTRKSEETITPWNFEEVVDKGASAQSFIERMTNFDKNLPNEKVLPKHSLLYEYFTVYNELTKVKYVTEGMRKPAFLSGEQKKAIVDLLFKTNRKVTVKQLKEDYFKKIECFDSVEISGVEDRFNASLGTYHDLLKIIKDKDFLDNEENEDILEDIVLTLTLFEDREMIEERLKTYAHLFDDKVMKQLKRRRYTGWGRLSRKLINGIRDKQSGKTILDFLKSDGFANRNFMQLIHDDSLTFKEDIQKAQVSGQGDSLHEHIANLAGSPAIKKGILQTVKVVDELVKVMGRHKPENIVIEMARENQTTQKGQKNSRERMKRIEEGIKELGSQILKEHPVENTQLQNEKLYLYYLQNGRDMYVDQELDINRLSDYDVDHIVPQSFLKDDSIDNKVLTRSDKARGKSDNVPSEEVVKKMKNYWRQLLNAKLITQRKFDNLTKAERGGLSELDKAGFIKRQLVETRQITKHVAQILDSRMNTKYDENDKLIREVKVITLKSKLVSDFRKDFQFYKVREINNYHHAHDAYLNAVVGTALIKKYPKLESEFVYGDYKVYDVRKMIAKSEQEIGKATAKYFFYSNIMNFFKTEITLANGEIRKRPLIETNGETGEIVWDKGRDFATVRKVLSMPQVNIVKKTEVQTGGFSKESILPKRNSDKLIARKKDWDPKKYGGFDSPTVAYSVLVVAKVEKGKSKKLKSVKELLGITIMERSSFEKNPIDFLEAKGYKEVKKDLIIKLPKYSLFELENGRKRMLASAGELQKGNELALPSKYVNFLYLASHYEKLKGSPEDNEQKQLFVEQHKHYLDEIIEQISEFSKRVILADANLDKVLSAYNKHRDKPIREQAENIIHLFTLTNLGAPAAFKYFDTTIDRKRYTSTKEVLDATLIHQSITGLYETRIDLSQLGGDGGGGSGGSGGSGGSGGSGGSGGTLNIEDEYRLHETSKEPDVSLGSTWLSDFPQAWAETGGMGLAVRQAPLIIPLKATSTPVSIKQYPMSQEARLGIKPHIQRLLDQGILVPCQSPWNTPLLPVKKPGTNDYRPVQDLREVNKRVEDIHPTVPNPYNLLSGLPPSHQWYTVLDLKDAFFCLRLHPTSQPLFAFEWRDPEMGISGQLTWTRLPQGFKNSPTLFNEALHRDLADFRIQHPDLILLQYVDDLLLAATSELDCQQGTRALLQTLGNLGYRASAKKAQICQKQVKYLGYLLKEGQRWLTEARKETVMGQPTPKTPRQLREFLGKAGFCRLFIPGFAEMAAPLYPLTKPGTLFNWGPDQQKAYQEIKQALLTAPALGLPDLTKPFELFVDEKQGYAKGVLTQKLGPWRRPVAYLSKKLDPVAAGWPPCLRMVAAIAVLTKDAGKLTMGQPLVILAPHAVEALVKQPPDRWLSNARMTHYQALLLDTDRVQFGPVVALNPATLLPLPEEGLQHNCLDILAEAHGTRPDLTDQPLPDADHTWYTDGSSLLQEGQRKAGAAVTTETEVIWAKALPAGTSAQRAELIALTQALKMAEGKKLNVYTDSRYAFATAHIHGEIYRRRGWLTSEGKEIKNKDEILALLKALFLPKRLSIIHCPGHQKGHSAEARGNRMADQAARKAAITETPDTSTLLIENSSPSGGSKRTADGSEFEAGKRTADGSEFEKRTADGSEFESPKKKAKVE

SEQ ID NO: 2918 - protein, 2114 aa, synthetic construct
MPAAKRVKLDGGDKKYSIGLDIGTNSVGWAVITDEYKVPSKKFKVLGNTDRHSIKKNLIGALLFDSGETAEATRLKRTARRRYTRRKNRICYLQEIFSNEMAKVDDSFFHRLEESFLVEEDKKHERHPIFGNIVDEVAYHEKYPTIYHLRKKLVDSTDKADLRLIYLALAHMIKFRGHFLIEGDLNPDNSDVDKLFIQLVQTYNQLFEENPINASGVDAKAILSARLSKSRRLENLIAQLPGEKKNGLFGNLIALSLGLTPNFKSNFDLAEDAKLQLSKDTYDDDLDNLLAQIGDQYADLFLAAKNLSDAILLSDILRVNTEITKAPLSASMIKRYDEHHQDLTLLKALVRQQLPEKYKEIFFDQSKNGYAGYIDGGASQEEFYKFIKPILEKMDGTEELLVKLNREDLLRKQRTFDNGSIPHQIHLGELHAILRRQEDFYPFLKDNREKIEKILTFRIPYYVGPLARGNSRFAWMTRKSEETITPWNFEEVVDKGASAQSFIERMTNFDKNLPNEKVLPKHSLLYEYFTVYNELTKVKYVTEGMRKPAFLSGEQKKAIVDLLFKTNRKVTVKQLKEDYFKKIECFDSVEISGVEDRFNASLGTYHDLLKIIKDKDFLDNEENEDILEDIVLTLTLFEDREMIEERLKTYAHLFDDKVMKQLKRRRYTGWGRLSRKLINGIRDKQSGKTILDFLKSDGFANRNFMQLIHDDSLTFKEDIQKAQVSGQGDSLHEHIANLAGSPAIKKGILQTVKVVDELVKVMGRHKPENIVIEMARENQTTQKGQKNSRERMKRIEEGIKELGSQILKEHPVENTQLQNEKLYLYYLQNGRDMYVDQELDINRLSDYDVDHIVPQSFLKDDSIDNKVLTRSDKARGKSDNVPSEEVVKKMKNYWRQLLNAKLITQRKFDNLTKAERGGLSELDKAGFIKRQLVETRQITKHVAQILDSRMNTKYDENDKLIREVKVITLKSKLVSDFRKDFQFYKVREINNYHHAHDAYLNAVVGTALIKKYPKLESEFVYGDYKVYDVRKMIAKSEQEIGKATAKYFFYSNIMNFFKTEITLANGEIRKRPLIETNGETGEIVWDKGRDFATVRKVLSMPQVNIVKKTEVQTGGFSKESILPKRNSDKLIARKKDWDPKKYGGFDSPTVAYSVLVVAKVEKGKSKKLKSVKELLGITIMERSSFEKNPIDFLEAKGYKEVKKDLIIKLPKYSLFELENGRKRMLASAGELQKGNELALPSKYVNFLYLASHYEKLKGSPEDNEQKQLFVEQHKHYLDEIIEQISEFSKRVILADANLDKVLSAYNKHRDKPIREQAENIIHLFTLTNLGAPAAFKYFDTTIDRKRYTSTKEVLDATLIHQSITGLYETRIDLSQLGGDGGGGGGGSPAPGGTLNIEDEYRLHETSKEPDVSLGSTWLSDFPQAWAETGGMGLAVRQAPLIIPLKATSTPVSIKQYPMSQEARLGIKPHIQRLLDQGILVPCQSPWNTPLLPVKKPGTNDYRPVQDLREVNKRVEDIHPTVPNPYNLLSGLPPSHQWYTVLDLKDAFFCLRLHPTSQPLFAFEWRDPEMGISGQLTWTRLPQGFKNSPTLFNEALHRDLADFRIQHPDLILLQYVDDLLLAATSELDCQQGTRALLQTLGNLGYRASAKKAQICQKQVKYLGYLLKEGQRWLTEARKETVMGQPTPKTPRQLREFLGKAGFCRLFIPGFAEMAAPLYPLTKPGTLFNWGPDQQKAYQEIKQALLTAPALGLPDLTKPFELFVDEKQGYAKGVLTQKLGPWRRPVAYLSKKLDPVAAGWPPCLRMVAAIAVLTKDAGKLTMGQPLVILAPHAVEALVKQPPDRWLSNARMTHYQALLLDTDRVQFGPVVALNPATLLPLPEEGLQHNCLDILAEAHGTRPDLTDQPLPDADHTWYTDGSSLLQEGQRKAGAAVTTETEVIWAKALPAGTSAQRAELIALTQALKMAEGKKLNVYTDSRYAFATAHIHGEIYRRRGWLTSEGKEIKNKDEILALLKALFLPKRLSIIHCPGHQKGHSAEARGNRMADQAARKAAITETPDTSTLLIENSSPSGGSKRTADGSEFEAGKRTADGSEFEKRTADGSEFESPKKKAKVE

SEQ ID NO: 2919 - protein, 2116 aa, synthetic construct; identical to SEQ ID NO: 2690

SEQ ID NO: 2920 - protein, 2116 aa, synthetic construct; identical to SEQ ID NO: 2648

SEQ ID NO: 2921 - protein, 2114 aa, synthetic construct; identical to SEQ ID NO: 2616

SEQ ID NO: 2922 - protein, 2116 aa, synthetic construct; identical to SEQ ID NO: 2666

SEQ ID NO: 2923 - protein, 2111 aa, synthetic construct
MPAAKRVKLDGGDKKYSIGLDIGTNSVGWAVITDEYKVPSKKFKVLGNTDRHSIKKNLIGALLFDSGETAEATRLKRTARRRYTRRKNRICYLQEIFSNEMAKVDDSFFHRLEESFLVEEDKKHERHPIFGNIVDEVAYHEKYPTIYHLRKKLVDSTDKADLRLIYLALAHMIKFRGHFLIEGDLNPDNSDVDKLFIQLVQTYNQLFEENPINASGVDAKAILSARLSKSRRLENLIAQLPGEKKNGLFGNLIALSLGLTPNFKSNFDLAEDAKLQLSKDTYDDDLDNLLAQIGDQYADLFLAAKNLSDAILLSDILRVNTEITKAPLSASMIKRYDEHHQDLTLLKALVRQQLPEKYKEIFFDQSKNGYAGYIDGGASQEEFYKFIKPILEKMDGTEELLVKLNREDLLRKQRTFDNGSIPHQIHLGELHAILRRQEDFYPFLKDNREKIEKILTFRIPYYVGPLARGNSRFAWMTRKSEETITPWNFEEVVDKGASAQSFIERMTNFDKNLPNEKVLPKHSLLYEYFTVYNELTKVKYVTEGMRKPAFLSGEQKKAIVDLLFKTNRKVTVKQLKEDYFKKIECFDSVEISGVEDRFNASLGTYHDLLKIIKDKDFLDNEENEDILEDIVLTLTLFEDREMIEERLKTYAHLFDDKVMKQLKRRRYTGWGRLSRKLINGIRDKQSGKTILDFLKSDGFANRNFMQLIHDDSLTFKEDIQKAQVSGQGDSLHEHIANLAGSPAIKKGILQTVKVVDELVKVMGRHKPENIVIEMARENQTTQKGQKNSRERMKRIEEGIKELGSQILKEHPVENTQLQNEKLYLYYLQNGRDMYVDQELDINRLSDYDVDHIVPQSFLKDDSIDNKVLTRSDKARGKSDNVPSEEVVKKMKNYWRQLLNAKLITQRKFDNLTKAERGGLSELDKAGFIKRQLVETRQITKHVAQILDSRMNTKYDENDKLIREVKVITLKSKLVSDFRKDFQFYKVREINNYHHAHDAYLNAVVGTALIKKYPKLESEFVYGDYKVYDVRKMIAKSEQEIGKATAKYFFYSNIMNFFKTEITLANGEIRKRPLIETNGETGEIVWDKGRDFATVRKVLSMPQVNIVKKTEVQTGGFSKESILPKRNSDKLIARKKDWDPKKYGGFDSPTVAYSVLVVAKVEKGKSKKLKSVKELLGITIMERSSFEKNPIDFLEAKGYKEVKKDLIIKLPKYSLFELENGRKRMLASAGELQKGNELALPSKYVNFLYLASHYEKLKGSPEDNEQKQLFVEQHKHYLDEIIEQISEFSKRVILADANLDKVLSAYNKHRDKPIREQAENIIHLFTLTNLGAPAAFKYFDTTIDRKRYTSTKEVLDATLIHQSITGLYETRIDLSQLGGDGGPAPGGGGGTLNIEDEYRLHETSKEPDVSLGSTWLSDFPQAWAETGGMGLAVRQAPLIIPLKATSTPVSIKQYPMSQEARLGIKPHIQRLLDQGILVPCQSPWNTPLLPVKKPGTNDYRPVQDLREVNKRVEDIHPTVPNPYNLLSGLPPSHQWYTVLDLKDAFFCLRLHPTSQPLFAFEWRDPEMGISGQLTWTRLPQGFKNSPTLFNEALHRDLADFRIQHPDLILLQYVDDLLLAATSELDCQQGTRALLQTLGNLGYRASAKKAQICQKQVKYLGYLLKEGQRWLTEARKETVMGQPTPKTPRQLREFLGKAGFCRLFIPGFAEMAAPLYPLTKPGTLFNWGPDQQKAYQEIKQALLTAPALGLPDLTKPFELFVDEKQGYAKGVLTQKLGPWRRPVAYLSKKLDPVAAGWPPCLRMVAAIAVLTKDAGKLTMGQPLVILAPHAVEALVKQPPDRWLSNARMTHYQALLLDTDRVQFGPVVALNPATLLPLPEEGLQHNCLDILAEAHGTRPDLTDQPLPDADHTWYTDGSSLLQEGQRKAGAAVTTETEVIWAKALPAGTSAQRAELIALTQALKMAEGKKLNVYTDSRYAFATAHIHGEIYRRRGWLTSEGKEIKNKDEILALLKALFLPKRLSIIHCPGHQKGHSAEARGNRMADQAARKAAITETPDTSTLLIENSSPSGGSKRTADGSEFEAGKRTADGSEFEKRTADGSEFESPKKKAKVE

SEQ ID NO: 2924 - protein, 2116 aa, synthetic construct
MPAAKRVKLDGGDKKYSIGLDIGTNSVGWAVITDEYKVPSKKFKVLGNTDRHSIKKNLIGALLFDSGETAEATRLKRTARRRYTRRKNRICYLQEIFSNEMAKVDDSFFHRLEESFLVEEDKKHERHPIFGNIVDEVAYHEKYPTIYHLRKKLVDSTDKADLRLIYLALAHMIKFRGHFLIEGDLNPDNSDVDKLFIQLVQTYNQLFEENPINASGVDAKAILSARLSKSRRLENLIAQLPGEKKNGLFGNLIALSLGLTPNFKSNFDLAEDAKLQLSKDTYDDDLDNLLAQIGDQYADLFLAAKNLSDAILLSDILRVNTEITKAPLSASMIKRYDEHHQDLTLLKALVRQQLPEKYKEIFFDQSKNGYAGYIDGGASQEEFYKFIKPILEKMDGTEELLVKLNREDLLRKQRTFDNGSIPHQIHLGELHAILRRQEDFYPFLKDNREKIEKILTFRIPYYVGPLARGNSRFAWMTRKSEETITPWNFEEVVDKGASAQSFIERMTNFDKNLPNEKVLPKHSLLYEYFTVYNELTKVKYVTEGMRKPAFLSGEQKKAIVDLLFKTNRKVTVKQLKEDYFKKIECFDSVEISGVEDRFNASLGTYHDLLKIIKDKDFLDNEENEDILEDIVLTLTLFEDREMIEERLKTYAHLFDDKVMKQLKRRRYTGWGRLSRKLINGIRDKQSGKTILDFLKSDGFANRNFMQLIHDDSLTFKEDIQKAQVSGQGDSLHEHIANLAGSPAIKKGILQTVKVVDELVKVMGRHKPENIVIEMARENQTTQKGQKNSRERMKRIEEGIKELGSQILKEHPVENTQLQNEKLYLYYLQNGRDMYVDQELDINRLSDYDVDHIVPQSFLKDDSIDNKVLTRSDKARGKSDNVPSEEVVKKMKNYWRQLLNAKLITQRKFDNLTKAERGGLSELDKAGFIKRQLVETRQITKHVAQILDSRMNTKYDENDKLIREVKVITLKSKLVSDFRKDFQFYKVREINNYHHAHDAYLNAVVGTALIKKYPKLESEFVYGDYKVYDVRKMIAKSEQEIGKATAKYFFYSNIMNFFKTEITLANGEIRKRPLIETNGETGEIVWDKGRDFATVRKVLSMPQVNIVKKTEVQTGGFSKESILPKRNSDKLIARKKDWDPKKYGGFDSPTVAYSVLVVAKVEKGKSKKLKSVKELLGITIMERSSFEKNPIDFLEAKGYKEVKKDLIIKLPKYSLFELENGRKRMLASAGELQKGNELALPSKYVNFLYLASHYEKLKGSPEDNEQKQLFVEQHKHYLDEIIEQISEFSKRVILADANLDKVLSAYNKHRDKPIREQAENIIHLFTLTNLGAPAAFKYFDTTIDRKRYTSTKEVLDATLIHQSITGLYETRIDLSQLGGDGGPAPEAAAKGGSGGTLNIEDEYRLHETSKEPDVSLGSTWLSDFPQAWAETGGMGLAVRQAPLIIPLKATSTPVSIKQYPMSQEARLGIKPHIQRLLDQGILVPCQSPWNTPLLPVKKPGTNDYRPVQDLREVNKRVEDIHPTVPNPYNLLSGLPPSHQWYTVLDLKDAFFCLRLHPTSQPLFAFEWRDPEMGISGQLTWTRLPQGFKNSPTLFNEALHRDLADFRIQHPDLILLQYVDDLLLAATSELDCQQGTRALLQTLGNLGYRASAKKAQICQKQVKYLGYLLKEGQRWLTEARKETVMGQPTPKTPRQLREFLGKAGFCRLFIPGFAEMAAPLYPLTKPGTLFNWGPDQQKAYQEIKQALLTAPALGLPDLTKPFELFVDEKQGYAKGVLTQKLGPWRRPVAYLSKKLDPVAAGWPPCLRMVAAIAVLTKDAGKLTMGQPLVILAPHAVEALVKQPPDRWLSNARMTHYQALLLDTDRVQFGPVVALNPATLLPLPEEGLQHNCLDILAEAHGTRPDLTDQPLPDADHTWYTDGSSLLQEGQRKAGAAVTTETEVIWAKALPAGTSAQRAELIALTQALKMAEGKKLNVYTDSRYAFATAHIHGEIYRRRGWLTSEGKEIKNKDEILALLKALFLPKRLSIIHCPGHQKGHSAEARGNRMADQAARKAAITETPDTSTLLIENSSPSGGSKRTADGSEFEAGKRTADGSEFEKRTADGSEFESPKKKAKVE

SEQ ID NO: 2925 - protein, 2116 aa, synthetic construct; identical to SEQ ID NO: 2628

SEQ ID NO: 2926 - protein, 2116 aa, synthetic construct; identical to SEQ ID NO: 2640

SEQ ID NO: 2927 - protein, 2109 aa, synthetic construct
MPAAKRVKLDGGDKKYSIGLDIGTNSVGWAVITDEYKVPSKKFKVLGNTDRHSIKKNLIGALLFDSGETAEATRLKRTARRRYTRRKNRICYLQEIFSNEMAKVDDSFFHRLEESFLVEEDKKHERHPIFGNIVDEVAYHEKYPTIYHLRKKLVDSTDKADLRLIYLALAHMIKFRGHFLIEGDLNPDNSDVDKLFIQLVQTYNQLFEENPINASGVDAKAILSARLSKSRRLENLIAQLPGEKKNGLFGNLIALSLGLTPNFKSNFDLAEDAKLQLSKDTYDDDLDNLLAQIGDQYADLFLAAKNLSDAILLSDILRVNTEITKAPLSASMIKRYDEHHQDLTLLKALVRQQLPEKYKEIFFDQSKNGYAGYIDGGASQEEFYKFIKPILEKMDGTEELLVKLNREDLLRKQRTFDNGSIPHQIHLGELHAILRRQEDFYPFLKDNREKIEKILTFRIPYYVGPLARGNSRFAWMTRKSEETITPWNFEEVVDKGASAQSFIERMTNFDKNLPNEKVLPKHSLLYEYFTVYNELTKVKYVTEGMRKPAFLSGEQKKAIVDLLFKTNRKVTVKQLKEDYFKKIECFDSVEISGVEDRFNASLGTYHDLLKIIKDKDFLDNEENEDILEDIVLTLTLFEDREMIEERLKTYAHLFDDKVMKQLKRRRYTGWGRLSRKLINGIRDKQSGKTILDFLKSDGFANRNFMQLIHDDSLTFKEDIQKAQVSGQGDSLHEHIANLAGSPAIKKGILQTVKVVDELVKVMGRHKPENIVIEMARENQTTQKGQKNSRERMKRIEEGIKELGSQILKEHPVENTQLQNEKLYLYYLQNGRDMYVDQELDINRLSDYDVDHIVPQSFLKDDSIDNKVLTRSDKARGKSDNVPSEEVVKKMKNYWRQLLNAKLITQRKFDNLTKAERGGLSELDKAGFIKRQLVETRQITKHVAQILDSRMNTKYDENDKLIREVKVITLKSKLVSDFRKDFQFYKVREINNYHHAHDAYLNAVVGTALIKKYPKLESEFVYGDYKVYDVRKMIAKSEQEIGKATAKYFFYSNIMNFFKTEITLANGEIRKRPLIETNGETGEIVWDKGRDFATVRKVLSMPQVNIVKKTEVQTGGFSKESILPKRNSDKLIARKKDWDPKKYGGFDSPTVAYSVLVVAKVEKGKSKKLKSVKELLGITIMERSSFEKNPIDFLEAKGYKEVKKDLIIKLPKYSLFELENGRKRMLASAGELQKGNELALPSKYVNFLYLASHYEKLKGSPEDNEQKQLFVEQHKHYLDEIIEQISEFSKRVILADANLDKVLSAYNKHRDKPIREQAENIIHLFTLTNLGAPAAFKYFDTTIDRKRYTSTKEVLDATLIHQSITGLYETRIDLSQLGGDGGGGGGGGTLNIEDEYRLHETSKEPDVSLGSTWLSDFPQAWAETGGMGLAVRQAPLIIPLKATSTPVSIKQYPMSQEARLGIKPHIQRLLDQGILVPCQSPWNTPLLPVKKPGTNDYRPVQDLREVNKRVEDIHPTVPNPYNLLSGLPPSHQWYTVLDLKDAFFCLRLHPTSQPLFAFEWRDPEMGISGQLTWTRLPQGFKNSPTLFNEALHRDLADFRIQHPDLILLQYVDDLLLAATSELDCQQGTRALLQTLGNLGYRASAKKAQICQKQVKYLGYLLKEGQRWLTEARKETVMGQPTPKTPRQLREFLGKAGFCRLFIPGFAEMAAPLYPLTKPGTLFNWGPDQQKAYQEIKQALLTAPALGLPDLTKPFELFVDEKQGYAKGVLTQKLGPWRRPVAYLSKKLDPVAAGWPPCLRMVAAIAVLTKDAGKLTMGQPLVILAPHAVEALVKQPPDRWLSNARMTHYQALLLDTDRVQFGPVVALNPATLLPLPEEGLQHNCLDILAEAHGTRPDLTDQPLPDADHTWYTDGSSLLQEGQRKAGAAVTTETEVIWAKALPAGTSAQRAELIALTQALKMAEGKKLNVYTDSRYAFATAHIHGEIYRRRGWLTSEGKEIKNKDEILALLKALFLPKRLSIIHCPGHQKGHSAEARGNRMADQAARKAAITETPDTSTLLIENSSPSGGSKRTADGSEFEAGKRTADGSEFEKRTADGSEFESPKKKAKVE

SEQ ID NO: 2928 - protein, 2116 aa, synthetic construct
MPAAKRVKLDGGDKKYSIGLDIGTNSVGWAVITDEYKVPSKKFKVLGNTDRHSIKKNLIGALLFDSGETAEATRLKRTARRRYTRRKNRICYLQEIFSNEMAKVDDSFFHRLEESFLVEEDKKHERHPIFGNIVDEVAYHEKYPTIYHLRKKLVDSTDKADLRLIYLALAHMIKFRGHFLIEGDLNPDNSDVDKLFIQLVQTYNQLFEENPINASGVDAKAILSARLSKSRRLENLIAQLPGEKKNGLFGNLIALSLGLTPNFKSNFDLAEDAKLQLSKDTYDDDLDNLLAQIGDQYADLFLAAKNLSDAILLSDILRVNTEITKAPLSASMIKRYDEHHQDLTLLKALVRQQLPEKYKEIFFDQSKNGYAGYIDGGASQEEFYKFIKPILEKMDGTEELLVKLNREDLLRKQRTFDNGSIPHQIHLGELHAILRRQEDFYPFLKDNREKIEKILTFRIPYYVGPLARGNSRFAWMTRKSEETITPWNFEEVVDKGASAQSFIERMTNFDKNLPNEKVLPKHSLLYEYFTVYNELTKVKYVTEGMRKPAFLSGEQKKAIVDLLFKTNRKVTVKQLKEDYFKKIECFDSVEISGVEDRFNASLGTYHDLLKIIKDKDFLDNEENEDILEDIVLTLTLFEDREMIEERLKTYAHLFDDKVMKQLKRRRYTGWGRLSRKLINGIRDKQSGKTILDFLKSDGFANRNFMQLIHDDSLTFKEDIQKAQVSGQGDSLHEHIANLAGSPAIKKGILQTVKVVDELVKVMGRHKPENIVIEMARENQTTQKGQKNSRERMKRIEEGIKELGSQILKEHPVENTQLQNEKLYLYYLQNGRDMYVDQELDINRLSDYDVDHIVPQSFLKDDSIDNKVLTRSDKARGKSDNVPSEEVVKKMKNYWRQLLNAKLITQRKFDNLTKAERGGLSELDKAGFIKRQLVETRQITKHVAQILDSRMNTKYDENDKLIREVKVITLKSKLVSDFRKDFQFYKVREINNYHHAHDAYLNAVVGTALIKKYPKLESEFVYGDYKVYDVRKMIAKSEQEIGKATAKYFFYSNIMNFFKTEITLANGEIRKRPLIETNGETGEIVWDKGRDFATVRKVLSMPQVNIVKKTEVQTGGFSKESILPKRNSDKLIARKKDWDPKKYGGFDSPTVAYSVLVVAKVEKGKSKKLKSVKELLGITIMERSSFEKNPIDFLEAKGYKEVKKDLIIKLPKYSLFELENGRKRMLASAGELQKGNELALPSKYVNFLYLASHYEKLKGSPEDNEQKQLFVEQHKHYLDEIIEQISEFSKRVILADANLDKVLSAYNKHRDKPIREQAENIIHLFTLTNLGAPAAFKYFDTTIDRKRYTSTKEVLDATLIHQSITGLYETRIDLSQLGGDGGGGGGGSEAAAKGGTLNIEDEYRLHETSKEPDVSLGSTWLSDFPQAWAETGGMGLAVRQAPLIIPLKATSTPVSIKQYPMSQEARLGIKPHIQRLLDQGILVPCQSPWNTPLLPVKKPGTNDYRPVQDLREVNKRVEDIHPTVPNPYNLLSGLPPSHQWYTVLDLKDAFFCLRLHPTSQPLFAFEWRDPEMGISGQLTWTRLPQGFKNSPTLFNEALHRDLADFRIQHPDLILLQYVDDLLLAATSELDCQQGTRALLQTLGNLGYRASAKKAQICQKQVKYLGYLLKEGQRWLTEARKETVMGQPTPKTPRQLREFLGKAGFCRLFIPGFAEMAAPLYPLTKPGTLFNWGPDQQKAYQEIKQALLTAPALGLPDLTKPFELFVDEKQGYAKGVLTQKLGPWRRPVAYLSKKLDPVAAGWPPCLRMVAAIAVLTKDAGKLTMGQPLVILAPHAVEALVKQPPDRWLSNARMTHYQALLLDTDRVQFGPVVALNPATLLPLPEEGLQHNCLDILAEAHGTRPDLTDQPLPDADHTWYTDGSSLLQEGQRKAGAAVTTETEVIWAKALPAGTSAQRAELIALTQALKMAEGKKLNVYTDSRYAFATAHIHGEIYRRRGWLTSEGKEIKNKDEILALLKALFLPKRLSIIHCPGHQKGHSAEARGNRMADQAARKAAITETPDTSTLLIENSSPSGGSKRTADGSEFEAGKRTADGSEFEKRTADGSEFESPKKKAKVE

SEQ ID NO: 2929 - protein, 2113 aa, synthetic construct; identical to SEQ ID NO: 2700

SEQ ID NO: 2930 - protein, 2114 aa, synthetic construct; identical to SEQ ID NO: 2656

SEQ ID NO: 2931 - protein, 2116 aa, synthetic construct; identical to SEQ ID NO: 2652

SEQ ID NO: 2932 - protein, 2120 aa, synthetic construct; identical to SEQ ID NO: 2623

SEQ ID NO: 2933 - protein, 2113 aa, synthetic construct; identical to SEQ ID NO: 2657

SEQ ID NO: 2934 - protein, 2111 aa, synthetic construct; identical to SEQ ID NO: 2693

SEQ ID NO: 2935 - protein, 2108 aa, synthetic construct; identical to SEQ ID NO: 2646

SEQ ID NO: 2936 - protein, 2111 aa, synthetic construct
MPAAKRVKLDGGDKKYSIGLDIGTNSVGWAVITDEYKVPSKKFKVLGNTDRHSIKKNLIGALLFDSGETAEATRLKRTARRRYTRRKNRICYLQEIFSNEMAKVDDSFFHRLEESFLVEEDKKHERHPIFGNIVDEVAYHEKYPTIYHLRKKLVDSTDKADLRLIYLALAHMIKFRGHFLIEGDLNPDNSDVDKLFIQLVQTYNQLFEENPINASGVDAKAILSARLSKSRRLENLIAQLPGEKKNGLFGNLIALSLGLTPNFKSNFDLAEDAKLQLSKDTYDDDLDNLLAQIGDQYADLFLAAKNLSDAILLSDILRVNTEITKAPLSASMIKRYDEHHQDLTLLKALVRQQLPEKYKEIFFDQSKNGYAGYIDGGASQEEFYKFIKPILEKMDGTEELLVKLNREDLLRKQRTFDNGSIPHQIHLGELHAILRRQEDFYPFLKDNREKIEKILTFRIPYYVGPLARGNSRFAWMTRKSEETITPWNFEEVVDKGASAQSFIERMTNFDKNLPNEKVLPKHSLLYEYFTVYNELTKVKYVTEGMRKPAFLSGEQKKAIVDLLFKTNRKVTVKQLKEDYFKKIECFDSVEISGVEDRFNASLGTYHDLLKIIKDKDFLDNEENEDILEDIVLTLTLFEDREMIEERLKTYAHLFDDKVMKQLKRRRYTGWGRLSRKLINGIRDKQSGKTILDFLKSDGFANRNFMQLIHDDSLTFKEDIQKAQVSGQGDSLHEHIANLAGSPAIKKGILQTVKVVDELVKVMGRHKPENIVIEMARENQTTQKGQKNSRERMKRIEEGIKELGSQILKEHPVENTQLQNEKLYLYYLQNGRDMYVDQELDINRLSDYDVDHIVPQSFLKDDSIDNKVLTRSDKARGKSDNVPSEEVVKKMKNYWRQLLNAKLITQRKFDNLTKAERGGLSELDKAGFIKRQLVETRQITKHVAQILDSRMNTKYDENDKLIREVKVITLKSKLVSDFRKDFQFYKVREINNYHHAHDAYLNAVVGTALIKKYPKLESEFVYGDYKVYDVRKMIAKSEQEIGKATAKYFFYSNIMNFFKTEITLANGEIRKRPLIETNGETGEIVWDKGRDFATVRKVLSMPQVNIVKKTEVQTGGFSKESILPKRNSDKLIARKKDWDPKKYGGFDSPTVAYSVLVVAKVEKGKSKKLKSVKELLGITIMERSSFEKNPIDFLEAKGYKEVKKDLIIKLPKYSLFELENGRKRMLASAGELQKGNELALPSKYVNFLYLASHYEKLKGSPEDNEQKQLFVEQHKHYLDEIIEQISEFSKRVILADANLDKVLSAYNKHRDKPIREQAENIIHLFTLTNLGAPAAFKYFDTTIDRKRYTSTKEVLDATLIHQSITGLYETRIDLSQLGGDGGPAPGSSGGTLNIEDEYRLHETSKEPDVSLGSTWLSDFPQAWAETGGMGLAVRQAPLIIPLKATSTPVSIKQYPMSQEARLGIKPHIQRLLDQGILVPCQSPWNTPLLPVKKPGTNDYRPVQDLREVNKRVEDIHPTVPNPYNLLSGLPPSHQWYTVLDLKDAFFCLRLHPTSQPLFAFEWRDPEMGISGQLTWTRLPQGFKNSPTLFNEALHRDLADFRIQHPDLILLQYVDDLLLAATSELDCQQGTRALLQTLGNLGYRASAKKAQICQKQVKYLGYLLKEGQRWLTEARKETVMGQPTPKTPRQLREFLGKAGFCRLFIPGFAEMAAPLYPLTKPGTLFNWGPDQQKAYQEIKQALLTAPALGLPDLTKPFELFVDEKQGYAKGVLTQKLGPWRRPVAYLSKKLDPVAAGWPPCLRMVAAIAVLTKDAGKLTMGQPLVILAPHAVEALVKQPPDRWLSNARMTHYQALLLDTDRVQFGPVVALNPATLLPLPEEGLQHNCLDILAEAHGTRPDLTDQPLPDADHTWYTDGSSLLQEGQRKAGAAVTTETEVIWAKALPAGTSAQRAELIALTQALKMAEGKKLNVYTDSRYAFATAHIHGEIYRRRGWLTSEGKEIKNKDEILALLKALFLPKRLSIIHCPGHQKGHSAEARGNRMADQAARKAAITETPDTSTLLIENSSPSGGSKRTADGSEFEAGKRTADGSEFEKRTADGSEFESPKKKAKVE

SEQ ID NO: 2937 - protein, 2120 aa, synthetic construct; identical to SEQ ID NO: 2636

SEQ ID NO: 2938 - protein, 2116 aa, synthetic construct; identical to SEQ ID NO: 2661

SEQ ID NO: 2939 - protein, 2120 aa, synthetic construct; identical to SEQ ID NO: 2680

SEQ ID NO: 2940 - protein, 2116 aa, synthetic construct
MPAAKRVKLDGGDKKYSIGLDIGTNSVGWAVITDEYKVPSKKFKVLGNTDRHSIKKNLIGALLFDSGETAEATRLKRTARRRYTRRKNRICYLQEIFSNEMAKVDDSFFHRLEESFLVEEDKKHERHPIFGNIVDEVAYHEKYPTIYHLRKKLVDSTDKADLRLIYLALAHMIKFRGHFLIEGDLNPDNSDVDKLFIQLVQTYNQLFEENPINASGVDAKAILSARLSKSRRLENLIAQLPGEKKNGLFGNLIALSLGLTPNFKSNFDLAEDAKLQLSKDTYDDDLDNLLAQIGDQYADLFLAAKNLSDAILLSDILRVNTEITKAPLSASMIKRYDEHHQDLTLLKALVRQQLPEKYKEIFFDQSKNGYAGYIDGGASQEEFYKFIKPILEKMDGTEELLVKLNREDLLRKQRTFDNGSIPHQIHLGELHAILRRQEDFYPFLKDNREKIEKILTFRIPYYVGPLARGNSRFAWMTRKSEETITPWNFEEVVDKGASAQSFIERMTNFDKNLPNEKVLPKHSLLYEYFTVYNELTKVKYVTEGMRKPAFLSGEQKKAIVDLLFKTNRKVTVKQLKEDYFKKIECFDSVEISGVEDRFNASLGTYHDLLKIIKDKDFLDNEENEDILEDIVLTLTLFEDREMIEERLKTYAHLFDDKVMKQLKRRRYTGWGRLSRKLINGIRDKQSGKTILDFLKSDGFANRNFMQLIHDDSLTFKEDIQKAQVSGQGDSLHEHIANLAGSPAIKKGILQTVKVVDELVKVMGRHKPENIVIEMARENQTTQKGQKNSRERMKRIEEGIKELGSQILKEHPVENTQLQNEKLYLYYLQNGRDMYVDQELDINRLSDYDVDHIVPQSFLKDDSIDNKVLTRSDKARGKSDNVPSEEVVKKMKNYWRQLLNAKLITQRKFDNLTKAERGGLSELDKAGFIKRQLVETRQITKHVAQILDSRMNTKYDENDKLIREVKVITLKSKLVSDFRKDFQFYKVREINNYHHAHDAYLNAVVGTALIKKYPKLESEFVYGDYKVYDVRKMIAKSEQEIGKATAKYFFYSNIMNFFKTEITLANGEIRKRPLIETNGETGEIVWDKGRDFATVRKVLSMPQVNIVKKTEVQTGGFSKESILPKRNSDKLIARKKDWDPKKYGGFDSPTVAYSVLVVAKVEKGKSKKLKSVKELLGITIMERSSFEKNPIDFLEAKGYKEVKKDLIIKLPKYSLFELENGRKRMLASAGELQKGNELALPSKYVNFLYLASHYEKLKGSPEDNEQKQLFVEQHKHYLDEIIEQISEFSKRVILADANLDKVLSAYNKHRDKPIREQAENIIHLFTLTNLGAPAAFKYFDTTIDRKRYTSTKEVLDATLIHQSITGLYETRIDLSQLGGDGGGGGPAPEAAAKGGTLNIEDEYRLHETSKEPDVSLGSTWLSDFPQAWAETGGMGLAVRQAPLIIPLKATSTPVSIKQYPMSQEARLGIKPHIQRLLDQGILVPCQSPWNTPLLPVKKPGTNDYRPVQDLREVNKRVEDIHPTVPNPYNLLSGLPPSHQWYTVLDLKDAFFCLRLHPTSQPLFAFEWRDPEMGISGQLTWTRLPQGFKNSPTLFNEALHRDLADFRIQHPDLILLQYVDDLLLAATSELDCQQGTRALLQTLGNLGYRASAKKAQICQKQVKYLGYLLKEGQRWLTEARKETVMGQPTPKTPRQLREFLGKAGFCRLFIPGFAEMAAPLYPLTKPGTLFNWGPDQQKAYQEIKQALLTAPALGLPDLTKPFELFVDEKQGYAKGVLTQKLGPWRRPVAYLSKKLDPVAAGWPPCLRMVAAIAVLTKDAGKLTMGQPLVILAPHAVEALVKQPPDRWLSNARMTHYQALLLDTDRVQFGPVVALNPATLLPLPEEGLQHNCLDILAEAHGTRPDLTDQPLPDADHTWYTDGSSLLQEGQRKAGAAVTTETEVIWAKALPAGTSAQRAELIALTQALKMAEGKKLNVYTDSRYAFATAHIHGEIYRRRGWLTSEGKEIKNKDEILALLKALFLPKRLSIIHCPGHQKGHSAEARGNRMADQAARKAAITETPDTSTLLIENSSPSGGSKRTADGSEFEAGKRTADGSEFEKRTADGSEFESPKKKAKVE

SEQ ID NO: 2941 - protein, 2120 aa, synthetic construct; identical to SEQ ID NO: 2669

SEQ ID NO: 2942 - protein, 2116 aa, synthetic construct; identical to SEQ ID NO: 2695

SEQ ID NO: 2943 - protein, 2123 aa, synthetic construct; identical to SEQ ID NO: 2612

SEQ ID NO: 2944 - protein, 2110 aa, synthetic construct; identical to SEQ ID NO: 2691

SEQ ID NO: 2945 - protein, 2113 aa, synthetic construct; identical to SEQ ID NO: 2659

SEQ ID NO: 2946 - protein, 2114 aa, synthetic construct; identical to SEQ ID NO: 2694

SEQ ID NO: 2947 - protein, 2111 aa, synthetic construct; identical to SEQ ID NO: 2682

SEQ ID NO: 2948 - protein, 2114 aa, synthetic construct; identical to SEQ ID NO: 2675

SEQ ID NO: 2949 - protein, 2116 aa, synthetic construct; identical to SEQ ID NO: 2686

SEQ ID NO: 2950 - protein, 2114 aa, synthetic construct; identical to SEQ ID NO: 2632

SEQ ID NO: 2951 - protein, 2113 aa, synthetic construct; identical to SEQ ID NO: 2625

SEQ ID NO: 2952 - protein, 2114 aa, synthetic construct; identical to SEQ ID NO: 2699

SEQ ID NO: 2953 - protein, 2113 aa, synthetic construct
MPAAKRVKLDGGDKKYSIGLDIGTNSVGWAVITDEYKVPSKKFKVLGNTDRHSIKKNLIGALLFDSGETAEATRLKRTARRRYTRRKNRICYLQEIFSNEMAKVDDSFFHRLEESFLVEEDKKHERHPIFGNIVDEVAYHEKYPTIYHLRKKLVDSTDKADLRLIYLALAHMIKFRGHFLIEGDLNPDNSDVDKLFIQLVQTYNQLFEENPINASGVDAKAILSARLSKSRRLENLIAQLPGEKKNGLFGNLIALSLGLTPNFKSNFDLAEDAKLQLSKDTYDDDLDNLLAQIGDQYADLFLAAKNLSDAILLSDILRVNTEITKAPLSASMIKRYDEHHQDLTLLKALVRQQLPEKYKEIFFDQSKNGYAGYIDGGASQEEFYKFIKPILEKMDGTEELLVKLNREDLLRKQRTFDNGSIPHQIHLGELHAILRRQEDFYPFLKDNREKIEKILTFRIPYYVGPLARGNSRFAWMTRKSEETITPWNFEEVVDKGASAQSFIERMTNFDKNLPNEKVLPKHSLLYEYFTVYNELTKVKYVTEGMRKPAFLSGEQKKAIVDLLFKTNRKVTVKQLKEDYFKKIECFDSVEISGVEDRFNASLGTYHDLLKIIKDKDFLDNEENEDILEDIVLTLTLFEDREMIEERLKTYAHLFDDKVMKQLKRRRYTGWGRLSRKLINGIRDKQSGKTILDFLKSDGFANRNFMQLIHDDSLTFKEDIQKAQVSGQGDSLHEHIANLAGSPAIKKGILQTVKVVDELVKVMGRHKPENIVIEMARENQTTQKGQKNSRERMKRIEEGIKELGSQILKEHPVENTQLQNEKLYLYYLQNGRDMYVDQELDINRLSDYDVDHIVPQSFLKDDSIDNKVLTRSDKARGKSDNVPSEEVVKKMKNYWRQLLNAKLITQRKFDNLTKAERGGLSELDKAGFIKRQLVETRQITKHVAQILDSRMNTKYDENDKLIREVKVITLKSKLVSDFRKDFQFYKVREINNYHHAHDAYLNAVVGTALIKKYPKLESEFVYGDYKVYDVRKMIAKSEQEIGKATAKYFFYSNIMNFFKTEITLANGEIRKRPLIETNGETGEIVWDKGRDFATVRKVLSMPQVNIVKKTEVQTGGFSKESILPKRNSDKLIARKKDWDPKKYGGFDSPTVAYSVLVVAKVEKGKSKKLKSVKELLGITIMERSSFEKNPIDFLEAKGYKEVKKDLIIKLPKYSLFELENGRKRMLASAGELQKGNELALPSKYVNFLYLASHYEKLKGSPEDNEQKQLFVEQHKHYLDEIIEQISEFSKRVILADANLDKVLSAYNKHRDKPIREQAENIIHLFTLTNLGAPAAFKYFDTTIDRKRYTSTKEVLDATLIHQSITGLYETRIDLSQLGGDGGGGGEAAAKGGTLNIEDEYRLHETSKEPDVSLGSTWLSDFPQAWAETGGMGLAVRQAPLIIPLKATSTPVSIKQYPMSQEARLGIKPHIQRLLDQGILVPCQSPWNTPLLPVKKPGTNDYRPVQDLREVNKRVEDIHPTVPNPYNLLSGLPPSHQWYTVLDLKDAFFCLRLHPTSQPLFAFEWRDPEMGISGQLTWTRLPQGFKNSPTLFNEALHRDLADFRIQHPDLILLQYVDDLLLAATSELDCQQGTRALLQTLGNLGYRASAKKAQICQKQVKYLGYLLKEGQRWLTEARKETVMGQPTPKTPRQLREFLGKAGFCRLFIPGFAEMAAPLYPLTKPGTLFNWGPDQQKAYQEIKQALLTAPALGLPDLTKPFELFVDEKQGYAKGVLTQKLGPWRRPVAYLSKKLDPVAAGWPPCLRMVAAIAVLTKDAGKLTMGQPLVILAPHAVEALVKQPPDRWLSNARMTHYQALLLDTDRVQFGPVVALNPATLLPLPEEGLQHNCLDILAEAHGTRPDLTDQPLPDADHTWYTDGSSLLQEGQRKAGAAVTTETEVIWAKALPAGTSAQRAELIALTQALKMAEGKKLNVYTDSRYAFATAHIHGEIYRRRGWLTSEGKEIKNKDEILALLKALFLPKRLSIIHCPGHQKGHSAEARGNRMADQAARKAAITETPDTSTLLIENSSPSGGSKRTADGSEFEAGKRTADGSEFEKRTADGSEFESPKKKAKVE

SEQ ID NO: 2954 - protein, 2114 aa, synthetic construct
MPAAKRVKLDGGDKKYSIGLDIGTNSVGWAVITDEYKVPSKKFKVLGNTDRHSIKKNLIGALLFDSGETAEATRLKRTARRRYTRRKNRICYLQEIFSNEMAKVDDSFFHRLEESFLVEEDKKHERHPIFGNIVDEVAYHEKYPTIYHLRKKLVDSTDKADLRLIYLALAHMIKFRGHFLIEGDLNPDNSDVDKLFIQLVQTYNQLFEENPINASGVDAKAILSARLSKSRRLENLIAQLPGEKKNGLFGNLIALSLGLTPNFKSNFDLAEDAKLQLSKDTYDDDLDNLLAQIGDQYADLFLAAKNLSDAILLSDILRVNTEITKAPLSASMIKRYDEHHQDLTLLKALVRQQLPEKYKEIFFDQSKNGYAGYIDGGASQEEFYKFIKPILEKMDGTEELLVKLNREDLLRKQRTFDNGSIPHQIHLGELHAILRRQEDFYPFLKDNREKIEKILTFRIPYYVGPLARGNSRFAWMTRKSEETITPWNFEEVVDKGASAQSFIERMTNFDKNLPNEKVLPKHSLLYEYFTVYNELTKVKYVTEGMRKPAFLSGEQKKAIVDLLFKTNRKVTVKQLKEDYFKKIECFDSVEISGVEDRFNASLGTYHDLLKIIKDKDFLDNEENEDILEDIVLTLTLFEDREMIEERLKTYAHLFDDKVMKQLKRRRYTGWGRLSRKLINGIRDKQSGKTILDFLKSDGFANRNFMQLIHDDSLTFKEDIQKAQVSGQGDSLHEHIANLAGSPAIKKGILQTVKVVDELVKVMGRHKPENIVIEMARENQTTQKGQKNSRERMKRIEEGIKELGSQILKEHPVENTQLQNEKLYLYYLQNGRDMYVDQELDINRLSDYDVDHIVPQSFLKDDSIDNKVLTRSDKARGKSDNVPSEEVVKKMKNYWRQLLNAKLITQRKFDNLTKAERGGLSELDKAGFIKRQLVETRQITKHVAQILDSRMNTKYDENDKLIREVKVITLKSKLVSDFRKDFQFYKVREINNYHHAHDAYLNAVVGTALIKKYPKLESEFVYGDYKVYDVRKMIAKSEQEIGKATAKYFFYSNIMNFFKTEITLANGEIRKRPLIETNGETGEIVWDKGRDFATVRKVLSMPQVNIVKKTEVQTGGFSKESILPKRNSDKLIARKKDWDPKKYGGFDSPTVAYSVLVVAKVEKGKSKKLKSVKELLGITIMERSSFEKNPIDFLEAKGYKEVKKDLIIKLPKYSLFELENGRKRMLASAGELQKGNELALPSKYVNFLYLASHYEKLKGSPEDNEQKQLFVEQHKHYLDEIIEQISEFSKRVILADANLDKVLSAYNKHRDKPIREQAENIIHLFTLTNLGAPAAFKYFDTTIDRKRYTSTKEVLDATLIHQSITGLYETRIDLSQLGGDGGGSSGGGPAPGGTLNIEDEYRLHETSKEPDVSLGSTWLSDFPQAWAETGGMGLAVRQAPLIIPLKATSTPVSIKQYPMSQEARLGIKPHIQRLLDQGILVPCQSPWNTPLLPVKKPGTNDYRPVQDLREVNKRVEDIHPTVPNPYNLLSGLPPSHQWYTVLDLKDAFFCLRLHPTSQPLFAFEWRDPEMGISGQLTWTRLPQGFKNSPTLFNEALHRDLADFRIQHPDLILLQYVDDLLLAATSELDCQQGTRALLQTLGNLGYRASAKKAQICQKQVKYLGYLLKEGQRWLTEARKETVMGQPTPKTPRQLREFLGKAGFCRLFIPGFAEMAAPLYPLTKPGTLFNWGPDQQKAYQEIKQALLTAPALGLPDLTKPFELFVDEKQGYAKGVLTQKLGPWRRPVAYLSKKLDPVAAGWPPCLRMVAAIAVLTKDAGKLTMGQPLVILAPHAVEALVKQPPDRWLSNARMTHYQALLLDTDRVQFGPVVALNPATLLPLPEEGLQHNCLDILAEAHGTRPDLTDQPLPDADHTWYTDGSSLLQEGQRKAGAAVTTETEVIWAKALPAGTSAQRAELIALTQALKMAEGKKLNVYTDSRYAFATAHIHGEIYRRRGWLTSEGKEIKNKDEILALLKALFLPKRLSIIHCPGHQKGHSAEARGNRMADQAARKAAITETPDTSTLLIENSSPSGGSKRTADGSEFEAGKRTADGSEFEKRTADGSEFESPKKKAKVE

SEQ ID NO: 2955 - protein, 2114 aa, synthetic construct; identical to SEQ ID NO: 2689

SEQ ID NO: 2956 - protein, 1999 aa, synthetic construct
MPAAKRVKLDGGDKKYSIGLDIGTNSVGWAVITDEYKVPSKKFKVLGNTDRHSIKKNLIGALLFDSGETAEATRLKRTARRRYTRRKNRICYLQEIFSNEMAKVDDSFFHRLEESFLVEEDKKHERHPIFGNIVDEVAYHEKYPTIYHLRKKLVDSTDKADLRLIYLALAHMIKFRGHFLIEGDLNPDNSDVDKLFIQLVQTYNQLFEENPINASGVDAKAILSARLSKSRRLENLIAQLPGEKKNGLFGNLIALSLGLTPNFKSNFDLAEDAKLQLSKDTYDDDLDNLLAQIGDQYADLFLAAKNLSDAILLSDILRVNTEITKAPLSASMIKRYDEHHQDLTLLKALVRQQLPEKYKEIFFDQSKNGYAGYIDGGASQEEFYKFIKPILEKMDGTEELLVKLNREDLLRKQRTFDNGSIPHQIHLGELHAILRRQEDFYPFLKDNREKIEKILTFRIPYYVGPLARGNSRFAWMTRKSEETITPWNFEEVVDKGASAQSFIERMTNFDKNLPNEKVLPKHSLLYEYFTVYNELTKVKYVTEGMRKPAFLSGEQKKAIVDLLFKTNRKVTVKQLKEDYFKKIECFDSVEISGVEDRFNASLGTYHDLLKIIKDKDFLDNEENEDILEDIVLTLTLFEDREMIEERLKTYAHLFDDKVMKQLKRRRYTGWGRLSRKLINGIRDKQSGKTILDFLKSDGFANRNFMQLIHDDSLTFKEDIQKAQVSGQGDSLHEHIANLAGSPAIKKGILQTVKVVDELVKVMGRHKPENIVIEMARENQTTQKGQKNSRERMKRIEEGIKELGSQILKEHPVENTQLQNEKLYLYYLQNGRDMYVDQELDINRLSDYDVDHIVPQSFLKDDSIDNKVLTRSDKARGKSDNVPSEEVVKKMKNYWRQLLNAKLITQRKFDNLTKAERGGLSELDKAGFIKRQLVETRQITKHVAQILDSRMNTKYDENDKLIREVKVITLKSKLVSDFRKDFQFYKVREINNYHHAHDAYLNAVVGTALIKKYPKLESEFVYGDYKVYDVRKMIAKSEQEIGKATAKYFFYSNIMNFFKTEITLANGEIRKRPLIETNGETGEIVWDKGRDFATVRKVLSMPQVNIVKKTEVQTGGFSKESILPKRNSDKLIARKKDWDPKKYGGFDSPTVAYSVLVVAKVEKGKSKKLKSVKELLGITIMERSSFEKNPIDFLEAKGYKEVKKDLIIKLPKYSLFELENGRKRMLASAGELQKGNELALPSKYVNFLYLASHYEKLKGSPEDNEQKQLFVEQHKHYLDEIIEQISEFSKRVILADANLDKVLSAYNKHRDKPIREQAENIIHLFTLTNLGAPAAFKYFDTTIDRKRYTSTKEVLDATLIHQSITGLYETRIDLSQLGGDGGGGGGSSGGSGGGVLDAPPSHIGLEHLPPPPEVPQFPLNLERLQALQDLVHRSLEAGYISPWDGPGNNPVFPVRKPNGAWRFVHDLRVTNALTKPIPALSPGPPDLTAIPTHLPHIICLDLKDAFFQIPVEDRFRSYFAFTLPTPGGLQPHRRFAWRVLPQGFINSPALFQRALQEPLRQVSAAFSQSLLVSYMDDILYVSPTEEQRLQCYQTMAAHLRDLGFQVASEKTRQTPSPVPFLGQMVHERMVTYQSLPTLQISSPISLHQLQTVLGDLQWVSRGTPTTRRPLQLLYSSLKPIDDPRAIIHLSPEQQQGIAELRQALSHNARSRYNEQEPLLAYVHLTRAGSTLVLFQKGAQFPLAYFQTPLTDNQASPWGLLLLLGCQYLQAQALSSYAKTILKYYHNLPKTSLDNWIQSSEDPRVQELLQLWPQISSQGIQPPGPWKTLVTRAEVFLTPQFSPEPIPAALCLFSDGAARRGAYCLWKDHLLDFQAVPAPESAQKGELAGLLAGLAAAPPEPLNIWVDSKYLYSLLRTLVLGAWLQPDPVPSYALLYKSLLRHPAIFVGHVRSHSSASHPIASLNNYVDQLAGKRTADGSEFEKRTADGSEFESPKKKAKVE

SEQ ID NO: 2957 - protein, 2131 aa, synthetic construct
MPAAKRVKLDGGDKKYSIGLDIGTNSVGWAVITDEYKVPSKKFKVLGNTDRHSIKKNLIGALLFDSGETAEATRLKRTARRRYTRRKNRICYLQEIFSNEMAKVDDSFFHRLEESFLVEEDKKHERHPIFGNIVDEVAYHEKYPTIYHLRKKLVDSTDKADLRLIYLALAHMIKFRGHFLIEGDLNPDNSDVDKLFIQLVQTYNQLFEENPINASGVDAKAILSARLSKSRRLENLIAQLPGEKKNGLFGNLIALSLGLTPNFKSNFDLAEDAKLQLSKDTYDDDLDNLLAQIGDQYADLFLAAKNLSDAILLSDILRVNTEITKAPLSASMIKRYDEHHQDLTLLKALVRQQLPEKYKEIFFDQSKNGYAGYIDGGASQEEFYKFIKPILEKMDGTEELLVKLNREDLLRKQRTFDNGSIPHQIHLGELHAILRRQEDFYPFLKDNREKIEKILTFRIPYYVGPLARGNSRFAWMTRKSEETITPWNFEEVVDKGASAQSFIERMTNFDKNLPNEKVLPKHSLLYEYFTVYNELTKVKYVTEGMRKPAFLSGEQKKAIVDLLFKTNRKVTVKQLKEDYFKKIECFDSVEISGVEDRFNASLGTYHDLLKIIKDKDFLDNEENEDILEDIVLTLTLFEDREMIEERLKTYAHLFDDKVMKQLKRRRYTGWGRLSRKLINGIRDKQSGKTILDFLKSDGFANRNFMQLIHDDSLTFKEDIQKAQVSGQGDSLHEHIANLAGSPAIKKGILQTVKVVDELVKVMGRHKPENIVIEMARENQTTQKGQKNSRERMKRIEEGIKELGSQILKEHPVENTQLQNEKLYLYYLQNGRDMYVDQELDINRLSDYDVDHIVPQSFLKDDSIDNKVLTRSDKARGKSDNVPSEEVVKKMKNYWRQLLNAKLITQRKFDNLTKAERGGLSELDKAGFIKRQLVETRQITKHVAQILDSRMNTKYDENDKLIREVKVITLKSKLVSDFRKDFQFYKVREINNYHHAHDAYLNAVVGTALIKKYPKLESEFVYGDYKVYDVRKMIAKSEQEIGKATAKYFFYSNIMNFFKTEITLANGEIRKRPLIETNGETGEIVWDKGRDFATVRKVLSMPQVNIVKKTEVQTGGFSKESILPKRNSDKLIARKKDWDPKKYGGFDSPTVAYSVLVVAKVEKGKSKKLKSVKELLGITIMERSSFEKNPIDFLEAKGYKEVKKDLIIKLPKYSLFELENGRKRMLASAGELQKGNELALPSKYVNFLYLASHYEKLKGSPEDNEQKQLFVEQHKHYLDEIIEQISEFSKRVILADANLDKVLSAYNKHRDKPIREQAENIIHLFTLTNLGAPAAFKYFDTTIDRKRYTSTKEVLDATLIHQSITGLYETRIDLSQLGGDGGAEAAAKEAAAKEAAAKEAAAKALEAEAAAKEAAAKEAAAKEAAAKAGGTLNIEDEHRLHETSKEPDVSLGSTWLSDFPQAWAETGGMGLAVRQAPLIIPLKATSTPVSIKQYPMSQEARLGIKPHIQRLLDQGILVPCQSPWNTPLLPVKKPGTNDYRPVQDLREVNKRVEDIHPTVPNPYNLLSGLPPSHQWYTVLDLKDAFFCLRLHPTSQPLFAFEWRDPEMGISGQLTWTRLPQGFKNSPTLFDEALHRDLADFRIQHPDLILLQYVDDLLLAATSELDCQQGTRALLQTLGNLGYRASAKKAQICQKQVKYLGYLLKEGQRWLTEARKETVMGQPTPKTPRQLREFLGTAGFCRLWIPGFAEMAAPLYPLTKTGTLFNWGPDQQKAYQEIKQALLTAPALGLPDLTKPFELFVDEKQGYAKGVLTQKLGPWRRPVAYLSKKLDPVAAGWPPCLRMVAAIAVLTKDAGKLTMGQPLVILAPHAVEALVKQPPDRWLSNARMTHYQALLLDTDRVQFGPVVALNPATLLPLPEEGLQHNCLDILAEAHGTRPDLTDQPLPDADHTWYTDGSSLLQEGQRKAGAAVTTETEVIWAKALPAGTSAQRAELIALTQALKMAEGKKLNVYTDSRYAFATAHIHGEIYRRRGLLTSEGKEIKNKDEILALLKALFLPKRLSIIHCPGHQKGHSAEARGNRMADQAARKAAITETPDTSTLLAGKRTADGSEFEKRTADGSEFESPKKKAKVE

SEQ ID NO: 2958 - protein, 2101 aa, synthetic construct
MPAAKRVKLDGGDKKYSIGLDIGTNSVGWAVITDEYKVPSKKFKVLGNTDRHSIKKNLIGALLFDSGETAEATRLKRTARRRYTRRKNRICYLQEIFSNEMAKVDDSFFHRLEESFLVEEDKKHERHPIFGNIVDEVAYHEKYPTIYHLRKKLVDSTDKADLRLIYLALAHMIKFRGHFLIEGDLNPDNSDVDKLFIQLVQTYNQLFEENPINASGVDAKAILSARLSKSRRLENLIAQLPGEKKNGLFGNLIALSLGLTPNFKSNFDLAEDAKLQLSKDTYDDDLDNLLAQIGDQYADLFLAAKNLSDAILLSDILRVNTEITKAPLSASMIKRYDEHHQDLTLLKALVRQQLPEKYKEIFFDQSKNGYAGYIDGGASQEEFYKFIKPILEKMDGTEELLVKLNREDLLRKQRTFDNGSIPHQIHLGELHAILRRQEDFYPFLKDNREKIEKILTFRIPYYVGPLARGNSRFAWMTRKSEETITPWNFEEVVDKGASAQSFIERMTNFDKNLPNEKVLPKHSLLYEYFTVYNELTKVKYVTEGMRKPAFLSGEQKKAIVDLLFKTNRKVTVKQLKEDYFKKIECFDSVEISGVEDRFNASLGTYHDLLKIIKDKDFLDNEENEDILEDIVLTLTLFEDREMIEERLKTYAHLFDDKVMKQLKRRRYTGWGRLSRKLINGIRDKQSGKTILDFLKSDGFANRNFMQLIHDDSLTFKEDIQKAQVSGQGDSLHEHIANLAGSPAIKKGILQTVKVVDELVKVMGRHKPENIVIEMARENQTTQKGQKNSRERMKRIEEGIKELGSQILKEHPVENTQLQNEKLYLYYLQNGRDMYVDQELDINRLSDYDVDHIVPQSFLKDDSIDNKVLTRSDKARGKSDNVPSEEVVKKMKNYWRQLLNAKLITQRKFDNLTKAERGGLSELDKAGFIKRQLVETRQITKHVAQILDSRMNTKYDENDKLIREVKVITLKSKLVSDFRKDFQFYKVREINNYHHAHDAYLNAVVGTALIKKYPKLESEFVYGDYKVYDVRKMIAKSEQEIGKATAKYFFYSNIMNFFKTEITLANGEIRKRPLIETNGETGEIVWDKGRDFATVRKVLSMPQVNIVKKTEVQTGGFSKESILPKRNSDKLIARKKDWDPKKYGGFDSPTVAYSVLVVAKVEKGKSKKLKSVKELLGITIMERSSFEKNPIDFLEAKGYKEVKKDLIIKLPKYSLFELENGRKRMLASAGELQKGNELALPSKYVNFLYLASHYEKLKGSPEDNEQKQLFVEQHKHYLDEIIEQISEFSKRVILADANLDKVLSAYNKHRDKPIREQAENIIHLFTLTNLGAPAAFKYFDTTIDRKRYTSTKEVLDATLIHQSITGLYETRIDLSQLGGDGGSGSETPGTSESATPESGGTLNIEDEHRLHETSKEPDVSLGSTWLSDFPQAWAETGGMGLAVRQAPLIIPLKATSTPVSIKQYPMSQEARLGIKPHIQRLLDQGILVPCQSPWNTPLLPVKKPGTNDYRPVQDLREVNKRVEDIHPTVPNPYNLLSGLPPSHQWYTVLDLKDAFFCLRLHPTSQPLFAFEWRDPEMGISGQLTWTRLPQGFKNSPTLFDEALHRDLADFRIQHPDLILLQYVDDLLLAATSELDCQQGTRALLQTLGNLGYRASAKKAQICQKQVKYLGYLLKEGQRWLTEARKETVMGQPTPKTPRQLREFLGTAGFCRLWIPGFAEMAAPLYPLTKTGTLFNWGPDQQKAYQEIKQALLTAPALGLPDLTKPFELFVDEKQGYAKGVLTQKLGPWRRPVAYLSKKLDPVAAGWPPCLRMVAAIAVLTKDAGKLTMGQPLVILAPHAVEALVKQPPDRWLSNARMTHYQALLLDTDRVQFGPVVALNPATLLPLPEEGLQHNCLDILAEAHGTRPDLTDQPLPDADHTWYTDGSSLLQEGQRKAGAAVTTETEVIWAKALPAGTSAQRAELIALTQALKMAEGKKLNVYTDSRYAFATAHIHGEIYRRRGLLTSEGKEIKNKDEILALLKALFLPKRLSIIHCPGHQKGHSAEARGNRMADQAARKAAITETPDTSTLLAGKRTADGSEFEKRTADGSEFESPKKKAKVE

SEQ ID NO: 2959 - protein, 2096 aa, synthetic construct
MPAAKRVKLDGGDKKYSIGLDIGTNSVGWAVITDEYKVPSKKFKVLGNTDRHSIKKNLIGALLFDSGETAEATRLKRTARRRYTRRKNRICYLQEIFSNEMAKVDDSFFHRLEESFLVEEDKKHERHPIFGNIVDEVAYHEKYPTIYHLRKKLVDSTDKADLRLIYLALAHMIKFRGHFLIEGDLNPDNSDVDKLFIQLVQTYNQLFEENPINASGVDAKAILSARLSKSRRLENLIAQLPGEKKNGLFGNLIALSLGLTPNFKSNFDLAEDAKLQLSKDTYDDDLDNLLAQIGDQYADLFLAAKNLSDAILLSDILRVNTEITKAPLSASMIKRYDEHHQDLTLLKALVRQQLPEKYKEIFFDQSKNGYAGYIDGGASQEEFYKFIKPILEKMDGTEELLVKLNREDLLRKQRTFDNGSIPHQIHLGELHAILRRQEDFYPFLKDNREKIEKILTFRIPYYVGPLARGNSRFAWMTRKSEETITPWNFEEVVDKGASAQSFIERMTNFDKNLPNEKVLPKHSLLYEYFTVYNELTKVKYVTEGMRKPAFLSGEQKKAIVDLLFKTNRKVTVKQLKEDYFKKIECFDSVEISGVEDRFNASLGTYHDLLKIIKDKDFLDNEENEDILEDIVLTLTLFEDREMIEERLKTYAHLFDDKVMKQLKRRRYTGWGRLSRKLINGIRDKQSGKTILDFLKSDGFANRNFMQLIHDDSLTFKEDIQKAQVSGQGDSLHEHIANLAGSPAIKKGILQTVKVVDELVKVMGRHKPENIVIEMARENQTTQKGQKNSRERMKRIEEGIKELGSQILKEHPVENTQLQNEKLYLYYLQNGRDMYVDQELDINRLSDYDVDHIVPQSFLKDDSIDNKVLTRSDKARGKSDNVPSEEVVKKMKNYWRQLLNAKLITQRKFDNLTKAERGGLSELDKAGFIKRQLVETRQITKHVAQILDSRMNTKYDENDKLIREVKVITLKSKLVSDFRKDFQFYKVREINNYHHAHDAYLNAVVGTALIKKYPKLESEFVYGDYKVYDVRKMIAKSEQEIGKATAKYFFYSNIMNFFKTEITLANGEIRKRPLIETNGETGEIVWDKGRDFATVRKVLSMPQVNIVKKTEVQTGGFSKESILPKRNSDKLIARKKDWDPKKYGGFDSPTVAYSVLVVAKVEKGKSKKLKSVKELLGITIMERSSFEKNPIDFLEAKGYKEVKKDLIIKLPKYSLFELENGRKRMLASAGELQKGNELALPSKYVNFLYLASHYEKLKGSPEDNEQKQLFVEQHKHYLDEIIEQISEFSKRVILADANLDKVLSAYNKHRDKPIREQAENIIHLFTLTNLGAPAAFKYFDTTIDRKRYTSTKEVLDATLIHQSITGLYETRIDLSQLGGDGGEAAAKGGSGGGGGTLNIEDEHRLHETSKEPDVSLGSTWLSDFPQAWAETGGMGLAVRQAPLIIPLKATSTPVSIKQYPMSQEARLGIKPHIQRLLDQGILVPCQSPWNTPLLPVKKPGTNDYRPVQDLREVNKRVEDIHPTVPNPYNLLSGLPPSHQWYTVLDLKDAFFCLRLHPTSQPLFAFEWRDPEMGISGQLTWTRLPQGFKNSPTLFDEALHRDLADFRIQHPDLILLQYVDDLLLAATSELDCQQGTRALLQTLGNLGYRASAKKAQICQKQVKYLGYLLKEGQRWLTEARKETVMGQPTPKTPRQLREFLGTAGFCRLWIPGFAEMAAPLYPLTKTGTLFNWGPDQQKAYQEIKQALLTAPALGLPDLTKPFELFVDEKQGYAKGVLTQKLGPWRRPVAYLSKKLDPVAAGWPPCLRMVAAIAVLTKDAGKLTMGQPLVILAPHAVEALVKQPPDRWLSNARMTHYQALLLDTDRVQFGPVVALNPATLLPLPEEGLQHNCLDILAEAHGTRPDLTDQPLPDADHTWYTDGSSLLQEGQRKAGAAVTTETEVIWAKALPAGTSAQRAELIALTQALKMAEGKKLNVYTDSRYAFATAHIHGEIYRRRGLLTSEGKEIKNKDEILALLKALFLPKRLSIIHCPGHQKGHSAEARGNRMADQAARKAAITETPDTSTLLAGKRTADGSEFEKRTADGSEFESPKKKAKVE

SEQ ID NO: 2960 - protein, 2096 aa, synthetic construct
MPAAKRVKLDGGDKKYSIGLDIGTNSVGWAVITDEYKVPSKKFKVLGNTDRHSIKKNLIGALLFDSGETAEATRLKRTARRRYTRRKNRICYLQEIFSNEMAKVDDSFFHRLEESFLVEEDKKHERHPIFGNIVDEVAYHEKYPTIYHLRKKLVDSTDKADLRLIYLALAHMIKFRGHFLIEGDLNPDNSDVDKLFIQLVQTYNQLFEENPINASGVDAKAILSARLSKSRRLENLIAQLPGEKKNGLFGNLIALSLGLTPNFKSNFDLAEDAKLQLSKDTYDDDLDNLLAQIGDQYADLFLAAKNLSDAILLSDILRVNTEITKAPLSASMIKRYDEHHQDLTLLKALVRQQLPEKYKEIFFDQSKNGYAGYIDGGASQEEFYKFIKPILEKMDGTEELLVKLNREDLLRKQRTFDNGSIPHQIHLGELHAILRRQEDFYPFLKDNREKIEKILTFRIPYYVGPLARGNSRFAWMTRKSEETITPWNFEEVVDKGASAQSFIERMTNFDKNLPNEKVLPKHSLLYEYFTVYNELTKVKYVTEGMRKPAFLSGEQKKAIVDLLFKTNRKVTVKQLKEDYFKKIECFDSVEISGVEDRFNASLGTYHDLLKIIKDKDFLDNEENEDILEDIVLTLTLFEDREMIEERLKTYAHLFDDKVMKQLKRRRYTGWGRLSRKLINGIRDKQSGKTILDFLKSDGFANRNFMQLIHDDSLTFKEDIQKAQVSGQGDSLHEHIANLAGSPAIKKGILQTVKVVDELVKVMGRHKPENIVIEMARENQTTQKGQKNSRERMKRIEEGIKELGSQILKEHPVENTQLQNEKLYLYYLQNGRDMYVDQELDINRLSDYDVDHIVPQSFLKDDSIDNKVLTRSDKARGKSDNVPSEEVVKKMKNYWRQLLNAKLITQRKFDNLTKAERGGLSELDKAGFIKRQLVETRQITKHVAQILDSRMNTKYDENDKLIREVKVITLKSKLVSDFRKDFQFYKVREINNYHHAHDAYLNAVVGTALIKKYPKLESEFVYGDYKVYDVRKMIAKSEQEIGKATAKYFFYSNIMNFFKTEITLANGEIRKRPLIETNGETGEIVWDKGRDFATVRKVLSMPQVNIVKKTEVQTGGFSKESILPKRNSDKLIARKKDWDPKKYGGFDSPTVAYSVLVVAKVEKGKSKKLKSVKELLGITIMERSSFEKNPIDFLEAKGYKEVKKDLIIKLPKYSLFELENGRKRMLASAGELQKGNELALPSKYVNFLYLASHYEKLKGSPEDNEQKQLFVEQHKHYLDEIIEQISEFSKRVILADANLDKVLSAYNKHRDKPIREQAENIIHLFTLTNLGAPAAFKYFDTTIDRKRYTSTKEVLDATLIHQSITGLYETRIDLSQLGGDGGGGSEAAAKGSSGGTLNIEDEHRLHETSKEPDVSLGSTWLSDFPQAWAETGGMGLAVRQAPLIIPLKATSTPVSIKQYPMSQEARLGIKPHIQRLLDQGILVPCQSPWNTPLLPVKKPGTNDYRPVQDLREVNKRVEDIHPTVPNPYNLLSGLPPSHQWYTVLDLKDAFFCLRLHPTSQPLFAFEWRDPEMGISGQLTWTRLPQGFKNSPTLFDEALHRDLADFRIQHPDLILLQYVDDLLLAATSELDCQQGTRALLQTLGNLGYRASAKKAQICQKQVKYLGYLLKEGQRWLTEARKETVMGQPTPKTPRQLREFLGTAGFCRLWIPGFAEMAAPLYPLTKTGTLFNWGPDQQKAYQEIKQALLTAPALGLPDLTKPFELFVDEKQGYAKGVLTQKLGPWRRPVAYLSKKLDPVAAGWPPCLRMVAAIAVLTKDAGKLTMGQPLVILAPHAVEALVKQPPDRWLSNARMTHYQALLLDTDRVQFGPVVALNPATLLPLPEEGLQHNCLDILAEAHGTRPDLTDQPLPDADHTWYTDGSSLLQEGQRKAGAAVTTETEVIWAKALPAGTSAQRAELIALTQALKMAEGKKLNVYTDSRYAFATAHIHGEIYRRRGLLTSEGKEIKNKDEILALLKALFLPKRLSIIHCPGHQKGHSAEARGNRMADQAARKAAITETPDTSTLLAGKRTADGSEFEKRTADGSEFESPKKKAKVE

SEQ ID NO: 2961 - protein, 2096 aa, synthetic construct
MPAAKRVKLDGGDKKYSIGLDIGTNSVGWAVITDEYKVPSKKFKVLGNTDRHSIKKNLIGALLFDSGETAEATRLKRTARRRYTRRKNRICYLQEIFSNEMAKVDDSFFHRLEESFLVEEDKKHERHPIFGNIVDEVAYHEKYPTIYHLRKKLVDSTDKADLRLIYLALAHMIKFRGHFLIEGDLNPDNSDVDKLFIQLVQTYNQLFEENPINASGVDAKAILSARLSKSRRLENLIAQLPGEKKNGLFGNLIALSLGLTPNFKSNFDLAEDAKLQLSKDTYDDDLDNLLAQIGDQYADLFLAAKNLSDAILLSDILRVNTEITKAPLSASMIKRYDEHHQDLTLLKALVRQQLPEKYKEIFFDQSKNGYAGYIDGGASQEEFYKFIKPILEKMDGTEELLVKLNREDLLRKQRTFDNGSIPHQIHLGELHAILRRQEDFYPFLKDNREKIEKILTFRIPYYVGPLARGNSRFAWMTRKSEETITPWNFEEVVDKGASAQSFIERMTNFDKNLPNEKVLPKHSLLYEYFTVYNELTKVKYVTEGMRKPAFLSGEQKKAIVDLLFKTNRKVTVKQLKEDYFKKIECFDSVEISGVEDRFNASLGTYHDLLKIIKDKDFLDNEENEDILEDIVLTLTLFEDREMIEERLKTYAHLFDDKVMKQLKRRRYTGWGRLSRKLINGIRDKQSGKTILDFLKSDGFANRNFMQLIHDDSLTFKEDIQKAQVSGQGDSLHEHIANLAGSPAIKKGILQTVKVVDELVKVMGRHKPENIVIEMARENQTTQKGQKNSRERMKRIEEGIKELGSQILKEHPVENTQLQNEKLYLYYLQNGRDMYVDQELDINRLSDYDVDHIVPQSFLKDDSIDNKVLTRSDKARGKSDNVPSEEVVKKMKNYWRQLLNAKLITQRKFDNLTKAERGGLSELDKAGFIKRQLVETRQITKHVAQILDSRMNTKYDENDKLIREVKVITLKSKLVSDFRKDFQFYKVREINNYHHAHDAYLNAVVGTALIKKYPKLESEFVYGDYKVYDVRKMIAKSEQEIGKATAKYFFYSNIMNFFKTEITLANGEIRKRPLIETNGETGEIVWDKGRDFATVRKVLSMPQVNIVKKTEVQTGGFSKESILPKRNSDKLIARKKDWDPKKYGGFDSPTVAYSVLVVAKVEKGKSKKLKSVKELLGITIMERSSFEKNPIDFLEAKGYKEVKKDLIIKLPKYSLFELENGRKRMLASAGELQKGNELALPSKYVNFLYLASHYEKLKGSPEDNEQKQLFVEQHKHYLDEIIEQISEFSKRVILADANLDKVLSAYNKHRDKPIREQAENIIHLFTLTNLGAPAAFKYFDTTIDRKRYTSTKEVLDATLIHQSITGLYETRIDLSQLGGDGGPAPGGSEAAAKGGTLNIEDEHRLHETSKEPDVSLGSTWLSDFPQAWAETGGMGLAVRQAPLIIPLKATSTPVSIKQYPMSQEARLGIKPHIQRLLDQGILVPCQSPWNTPLLPVKKPGTNDYRPVQDLREVNKRVEDIHPTVPNPYNLLSGLPPSHQWYTVLDLKDAFFCLRLHPTSQPLFAFEWRDPEMGISGQLTWTRLPQGFKNSPTLFDEALHRDLADFRIQHPDLILLQYVDDLLLAATSELDCQQGTRALLQTLGNLGYRASAKKAQICQKQVKYLGYLLKEGQRWLTEARKETVMGQPTPKTPRQLREFLGTAGFCRLWIPGFAEMAAPLYPLTKTGTLFNWGPDQQKAYQEIKQALLTAPALGLPDLTKPFELFVDEKQGYAKGVLTQKLGPWRRPVAYLSKKLDPVAAGWPPCLRMVAAIAVLTKDAGKLTMGQPLVILAPHAVEALVKQPPDRWLSNARMTHYQALLLDTDRVQFGPVVALNPATLLPLPEEGLQHNCLDILAEAHGTRPDLTDQPLPDADHTWYTDGSSLLQEGQRKAGAAVTTETEVIWAKALPAGTSAQRAELIALTQALKMAEGKKLNVYTDSRYAFATAHIHGEIYRRRGLLTSEGKEIKNKDEILALLKALFLPKRLSIIHCPGHQKGHSAEARGNRMADQAARKAAITETPDTSTLLAGKRTADGSEFEKRTADGSEFESPKKKAKVE

SEQ ID NO: 2962 - protein, 2093 aa, synthetic construct
MPAAKRVKLDGGDKKYSIGLDIGTNSVGWAVITDEYKVPSKKFKVLGNTDRHSIKKNLIGALLFDSGETAEATRLKRTARRRYTRRKNRICYLQEIFSNEMAKVDDSFFHRLEESFLVEEDKKHERHPIFGNIVDEVAYHEKYPTIYHLRKKLVDSTDKADLRLIYLALAHMIKFRGHFLIEGDLNPDNSDVDKLFIQLVQTYNQLFEENPINASGVDAKAILSARLSKSRRLENLIAQLPGEKKNGLFGNLIALSLGLTPNFKSNFDLAEDAKLQLSKDTYDDDLDNLLAQIGDQYADLFLAAKNLSDAILLSDILRVNTEITKAPLSASMIKRYDEHHQDLTLLKALVRQQLPEKYKEIFFDQSKNGYAGYIDGGASQEEFYKFIKPILEKMDGTEELLVKLNREDLLRKQRTFDNGSIPHQIHLGELHAILRRQEDFYPFLKDNREKIEKILTFRIPYYVGPLARGNSRFAWMTRKSEETITPWNFEEVVDKGASAQSFIERMTNFDKNLPNEKVLPKHSLLYEYFTVYNELTKVKYVTEGMRKPAFLSGEQKKAIVDLLFKTNRKVTVKQLKEDYFKKIECFDSVEISGVEDRFNASLGTYHDLLKIIKDKDFLDNEENEDILEDIVLTLTLFEDREMIEERLKTYAHLFDDKVMKQLKRRRYTGWGRLSRKLINGIRDKQSGKTILDFLKSDGFANRNFMQLIHDDSLTFKEDIQKAQVSGQGDSLHEHIANLAGSPAIKKGILQTVKVVDELVKVMGRHKPENIVIEMARENQTTQKGQKNSRERMKRIEEGIKELGSQILKEHPVENTQLQNEKLYLYYLQNGRDMYVDQELDINRLSDYDVDHIVPQSFLKDDSIDNKVLTRSDKARGKSDNVPSEEVVKKMKNYWRQLLNAKLITQRKFDNLTKAERGGLSELDKAGFIKRQLVETRQITKHVAQILDSRMNTKYDENDKLIREVKVITLKSKLVSDFRKDFQFYKVREINNYHHAHDAYLNAVVGTALIKKYPKLESEFVYGDYKVYDVRKMIAKSEQEIGKATAKYFFYSNIMNFFKTEITLANGEIRKRPLIETNGETGEIVWDKGRDFATVRKVLSMPQVNIVKKTEVQTGGFSKESILPKRNSDKLIARKKDWDPKKYGGFDSPTVAYSVLVVAKVEKGKSKKLKSVKELLGITIMERSSFEKNPIDFLEAKGYKEVKKDLIIKLPKYSLFELENGRKRMLASAGELQKGNELALPSKYVNFLYLASHYEKLKGSPEDNEQKQLFVEQHKHYLDEIIEQISEFSKRVILADANLDKVLSAYNKHRDKPIREQAENIIHLFTLTNLGAPAAFKYFDTTIDRKRYTSTKEVLDATLIHQSITGLYETRIDLSQLGGDGGGGSEAAAKGGTLNIEDEHRLHETSKEPDVSLGSTWLSDFPQAWAETGGMGLAVRQAPLIIPLKATSTPVSIKQYPMSQEARLGIKPHIQRLLDQGILVPCQSPWNTPLLPVKKPGTNDYRPVQDLREVNKRVEDIHPTVPNPYNLLSGLPPSHQWYTVLDLKDAFFCLRLHPTSQPLFAFEWRDPEMGISGQLTWTRLPQGFKNSPTLFDEALHRDLADFRIQHPDLILLQYVDDLLLAATSELDCQQGTRALLQTLGNLGYRASAKKAQICQKQVKYLGYLLKEGQRWLTEARKETVMGQPTPKTPRQLREFLGTAGFCRLWIPGFAEMAAPLYPLTKTGTLFNWGPDQQKAYQEIKQALLTAPALGLPDLTKPFELFVDEKQGYAKGVLTQKLGPWRRPVAYLSKKLDPVAAGWPPCLRMVAAIAVLTKDAGKLTMGQPLVILAPHAVEALVKQPPDRWLSNARMTHYQALLLDTDRVQFGPVVALNPATLLPLPEEGLQHNCLDILAEAHGTRPDLTDQPLPDADHTWYTDGSSLLQEGQRKAGAAVTTETEVIWAKALPAGTSAQRAELIALTQALKMAEGKKLNVYTDSRYAFATAHIHGEIYRRRGLLTSEGKEIKNKDEILALLKALFLPKRLSIIHCPGHQKGHSAEARGNRMADQAARKAAITETPDTSTLLAGKRTADGSEFEKRTADGSEFESPKKKAKVE

SEQ ID NO: 2963 - protein, 2088 aa, synthetic construct
MPAAKRVKLDGGDKKYSIGLDIGTNSVGWAVITDEYKVPSKKFKVLGNTDRHSIKKNLIGALLFDSGETAEATRLKRTARRRYTRRKNRICYLQEIFSNEMAKVDDSFFHRLEESFLVEEDKKHERHPIFGNIVDEVAYHEKYPTIYHLRKKLVDSTDKADLRLIYLALAHMIKFRGHFLIEGDLNPDNSDVDKLFIQLVQTYNQLFEENPINASGVDAKAILSARLSKSRRLENLIAQLPGEKKNGLFGNLIALSLGLTPNFKSNFDLAEDAKLQLSKDTYDDDLDNLLAQIGDQYADLFLAAKNLSDAILLSDILRVNTEITKAPLSASMIKRYDEHHQDLTLLKALVRQQLPEKYKEIFFDQSKNGYAGYIDGGASQEEFYKFIKPILEKMDGTEELLVKLNREDLLRKQRTFDNGSIPHQIHLGELHAILRRQEDFYPFLKDNREKIEKILTFRIPYYVGPLARGNSRFAWMTRKSEETITPWNFEEVVDKGASAQSFIERMTNFDKNLPNEKVLPKHSLLYEYFTVYNELTKVKYVTEGMRKPAFLSGEQKKAIVDLLFKTNRKVTVKQLKEDYFKKIECFDSVEISGVEDRFNASLGTYHDLLKIIKDKDFLDNEENEDILEDIVLTLTLFEDREMIEERLKTYAHLFDDKVMKQLKRRRYTGWGRLSRKLINGIRDKQSGKTILDFLKSDGFANRNFMQLIHDDSLTFKEDIQKAQVSGQGDSLHEHIANLAGSPAIKKGILQTVKVVDELVKVMGRHKPENIVIEMARENQTTQKGQKNSRERMKRIEEGIKELGSQILKEHPVENTQLQNEKLYLYYLQNGRDMYVDQELDINRLSDYDVDHIVPQSFLKDDSIDNKVLTRSDKARGKSDNVPSEEVVKKMKNYWRQLLNAKLITQRKFDNLTKAERGGLSELDKAGFIKRQLVETRQITKHVAQILDSRMNTKYDENDKLIREVKVITLKSKLVSDFRKDFQFYKVREINNYHHAHDAYLNAVVGTALIKKYPKLESEFVYGDYKVYDVRKMIAKSEQEIGKATAKYFFYSNIMNFFKTEITLANGEIRKRPLIETNGETGEIVWDKGRDFATVRKVLSMPQVNIVKKTEVQTGGFSKESILPKRNSDKLIARKKDWDPKKYGGFDSPTVAYSVLVVAKVEKGKSKKLKSVKELLGITIMERSSFEKNPIDFLEAKGYKEVKKDLIIKLPKYSLFELENGRKRMLASAGELQKGNELALPSKYVNFLYLASHYEKLKGSPEDNEQKQLFVEQHKHYLDEIIEQISEFSKRVILADANLDKVLSAYNKHRDKPIREQAENIIHLFTLTNLGAPAAFKYFDTTIDRKRYTSTKEVLDATLIHQSITGLYETRIDLSQLGGDGGGSSGGTLNIEDEHRLHETSKEPDVSLGSTWLSDFPQAWAETGGMGLAVRQAPLIIPLKATSTPVSIKQYPMSQEARLGIKPHIQRLLDQGILVPCQSPWNTPLLPVKKPGTNDYRPVQDLREVNKRVEDIHPTVPNPYNLLSGLPPSHQWYTVLDLKDAFFCLRLHPTSQPLFAFEWRDPEMGISGQLTWTRLPQGFKNSPTLFDEALHRDLADFRIQHPDLILLQYVDDLLLAATSELDCQQGTRALLQTLGNLGYRASAKKAQICQKQVKYLGYLLKEGQRWLTEARKETVMGQPTPKTPRQLREFLGTAGFCRLWIPGFAEMAAPLYPLTKTGTLFNWGPDQQKAYQEIKQALLTAPALGLPDLTKPFELFVDEKQGYAKGVLTQKLGPWRRPVAYLSKKLDPVAAGWPPCLRMVAAIAVLTKDAGKLTMGQPLVILAPHAVEALVKQPPDRWLSNARMTHYQALLLDTDRVQFGPVVALNPATLLPLPEEGLQHNCLDILAEAHGTRPDLTDQPLPDADHTWYTDGSSLLQEGQRKAGAAVTTETEVIWAKALPAGTSAQRAELIALTQALKMAEGKKLNVYTDSRYAFATAHIHGEIYRRRGLLTSEGKEIKNKDEILALLKALFLPKRLSIIHCPGHQKGHSAEARGNRMADQAARKAAITETPDTSTLLAGKRTADGSEFEKRTADGSEFESPKKKAKVE

SEQ ID NO: 2964 - protein, 2094 aa, synthetic construct
MPAAKRVKLDGGDKKYSIGLDIGTNSVGWAVITDEYKVPSKKFKVLGNTDRHSIKKNLIGALLFDSGETAEATRLKRTARRRYTRRKNRICYLQEIFSNEMAKVDDSFFHRLEESFLVEEDKKHERHPIFGNIVDEVAYHEKYPTIYHLRKKLVDSTDKADLRLIYLALAHMIKFRGHFLIEGDLNPDNSDVDKLFIQLVQTYNQLFEENPINASGVDAKAILSARLSKSRRLENLIAQLPGEKKNGLFGNLIALSLGLTPNFKSNFDLAEDAKLQLSKDTYDDDLDNLLAQIGDQYADLFLAAKNLSDAILLSDILRVNTEITKAPLSASMIKRYDEHHQDLTLLKALVRQQLPEKYKEIFFDQSKNGYAGYIDGGASQEEFYKFIKPILEKMDGTEELLVKLNREDLLRKQRTFDNGSIPHQIHLGELHAILRRQEDFYPFLKDNREKIEKILTFRIPYYVGPLARGNSRFAWMTRKSEETITPWNFEEVVDKGASAQSFIERMTNFDKNLPNEKVLPKHSLLYEYFTVYNELTKVKYVTEGMRKPAFLSGEQKKAIVDLLFKTNRKVTVKQLKEDYFKKIECFDSVEISGVEDRFNASLGTYHDLLKIIKDKDFLDNEENEDILEDIVLTLTLFEDREMIEERLKTYAHLFDDKVMKQLKRRRYTGWGRLSRKLINGIRDKQSGKTILDFLKSDGFANRNFMQLIHDDSLTFKEDIQKAQVSGQGDSLHEHIANLAGSPAIKKGILQTVKVVDELVKVMGRHKPENIVIEMARENQTTQKGQKNSRERMKRIEEGIKELGSQILKEHPVENTQLQNEKLYLYYLQNGRDMYVDQELDINRLSDYDVDHIVPQSFLKDDSIDNKVLTRSDKARGKSDNVPSEEVVKKMKNYWRQLLNAKLITQRKFDNLTKAERGGLSELDKAGFIKRQLVETRQITKHVAQILDSRMNTKYDENDKLIREVKVITLKSKLVSDFRKDFQFYKVREINNYHHAHDAYLNAVVGTALIKKYPKLESEFVYGDYKVYDVRKMIAKSEQEIGKATAKYFFYSNIMNFFKTEITLANGEIRKRPLIETNGETGEIVWDKGRDFATVRKVLSMPQVNIVKKTEVQTGGFSKESILPKRNSDKLIARKKDWDPKKYGGFDSPTVAYSVLVVAKVEKGKSKKLKSVKELLGITIMERSSFEKNPIDFLEAKGYKEVKKDLIIKLPKYSLFELENGRKRMLASAGELQKGNELALPSKYVNFLYLASHYEKLKGSPEDNEQKQLFVEQHKHYLDEIIEQISEFSKRVILADANLDKVLSAYNKHRDKPIREQAENIIHLFTLTNLGAPAAFKYFDTTIDRKRYTSTKEVLDATLIHQSITGLYETRIDLSQLGGDGGGGSGSSPAPGGTLNIEDEHRLHETSKEPDVSLGSTWLSDFPQAWAETGGMGLAVRQAPLIIPLKATSTPVSIKQYPMSQEARLGIKPHIQRLLDQGILVPCQSPWNTPLLPVKKPGTNDYRPVQDLREVNKRVEDIHPTVPNPYNLLSGLPPSHQWYTVLDLKDAFFCLRLHPTSQPLFAFEWRDPEMGISGQLTWTRLPQGFKNSPTLFDEALHRDLADFRIQHPDLILLQYVDDLLLAATSELDCQQGTRALLQTLGNLGYRASAKKAQICQKQVKYLGYLLKEGQRWLTEARKETVMGQPTPKTPRQLREFLGTAGFCRLWIPGFAEMAAPLYPLTKTGTLFNWGPDQQKAYQEIKQALLTAPALGLPDLTKPFELFVDEKQGYAKGVLTQKLGPWRRPVAYLSKKLDPVAAGWPPCLRMVAAIAVLTKDAGKLTMGQPLVILAPHAVEALVKQPPDRWLSNARMTHYQALLLDTDRVQFGPVVALNPATLLPLPEEGLQHNCLDILAEAHGTRPDLTDQPLPDADHTWYTDGSSLLQEGQRKAGAAVTTETEVIWAKALPAGTSAQRAELIALTQALKMAEGKKLNVYTDSRYAFATAHIHGEIYRRRGLLTSEGKEIKNKDEILALLKALFLPKRLSIIHCPGHQKGHSAEARGNRMADQAARKAAITETPDTSTLLAGKRTADGSEFEKRTADGSEFESPKKKAKVE

SEQ ID NO: 2965 - protein, 2103 aa, synthetic construct
MPAAKRVKLDGGDKKYSIGLDIGTNSVGWAVITDEYKVPSKKFKVLGNTDRHSIKKNLIGALLFDSGETAEATRLKRTARRRYTRRKNRICYLQEIFSNEMAKVDDSFFHRLEESFLVEEDKKHERHPIFGNIVDEVAYHEKYPTIYHLRKKLVDSTDKADLRLIYLALAHMIKFRGHFLIEGDLNPDNSDVDKLFIQLVQTYNQLFEENPINASGVDAKAILSARLSKSRRLENLIAQLPGEKKNGLFGNLIALSLGLTPNFKSNFDLAEDAKLQLSKDTYDDDLDNLLAQIGDQYADLFLAAKNLSDAILLSDILRVNTEITKAPLSASMIKRYDEHHQDLTLLKALVRQQLPEKYKEIFFDQSKNGYAGYIDGGASQEEFYKFIKPILEKMDGTEELLVKLNREDLLRKQRTFDNGSIPHQIHLGELHAILRRQEDFYPFLKDNREKIEKILTFRIPYYVGPLARGNSRFAWMTRKSEETITPWNFEEVVDKGASAQSFIERMTNFDKNLPNEKVLPKHSLLYEYFTVYNELTKVKYVTEGMRKPAFLSGEQKKAIVDLLFKTNRKVTVKQLKEDYFKKIECFDSVEISGVEDRFNASLGTYHDLLKIIKDKDFLDNEENEDILEDIVLTLTLFEDREMIEERLKTYAHLFDDKVMKQLKRRRYTGWGRLSRKLINGIRDKQSGKTILDFLKSDGFANRNFMQLIHDDSLTFKEDIQKAQVSGQGDSLHEHIANLAGSPAIKKGILQTVKVVDELVKVMGRHKPENIVIEMARENQTTQKGQKNSRERMKRIEEGIKELGSQILKEHPVENTQLQNEKLYLYYLQNGRDMYVDQELDINRLSDYDVDHIVPQSFLKDDSIDNKVLTRSDKARGKSDNVPSEEVVKKMKNYWRQLLNAKLITQRKFDNLTKAERGGLSELDKAGFIKRQLVETRQITKHVAQILDSRMNTKYDENDKLIREVKVITLKSKLVSDFRKDFQFYKVREINNYHHAHDAYLNAVVGTALIKKYPKLESEFVYGDYKVYDVRKMIAKSEQEIGKATAKYFFYSNIMNFFKTEITLANGEIRKRPLIETNGETGEIVWDKGRDFATVRKVLSMPQVNIVKKTEVQTGGFSKESILPKRNSDKLIARKKDWDPKKYGGFDSPTVAYSVLVVAKVEKGKSKKLKSVKELLGITIMERSSFEKNPIDFLEAKGYKEVKKDLIIKLPKYSLFELENGRKRMLASAGELQKGNELALPSKYVNFLYLASHYEKLKGSPEDNEQKQLFVEQHKHYLDEIIEQISEFSKRVILADANLDKVLSAYNKHRDKPIREQAENIIHLFTLTNLGAPAAFKYFDTTIDRKRYTSTKEVLDATLIHQSITGLYETRIDLSQLGGDGGGSSGSSGSSGSSGSSGSSGGTLNIEDEHRLHETSKEPDVSLGSTWLSDFPQAWAETGGMGLAVRQAPLIIPLKATSTPVSIKQYPMSQEARLGIKPHIQRLLDQGILVPCQSPWNTPLLPVKKPGTNDYRPVQDLREVNKRVEDIHPTVPNPYNLLSGLPPSHQWYTVLDLKDAFFCLRLHPTSQPLFAFEWRDPEMGISGQLTWTRLPQGFKNSPTLFNEALHRDLADFRIQHPDLILLQYVDDLLLAATSELDCQQGTRALLQTLGNLGYRASAKKAQICQKQVKYLGYLLKEGQRWLTEARKETVMGQPTPKTPRQLREFLGTAGFCRLWIPGFAEMAAPLYPLTKPGTLFNWGPDQQKAYQEIKQALLTAPALGLPDLTKPFELFVDEKQGYAKGVLTQKLGPWRRPVAYLSKKLDPVAAGWPPCLRMVAAIAVLTKDAGKLTMGQPLVILAPHAVEALVKQPPDRWLSNARMTHYQALLLDTDRVQFGPVVALNPATLLPLPEEGLQHNCLDILAEAHGTRPDLTDQPLPDADHTWYTDGSSLLQEGQRKAGAAVTTETEVIWAKALPAGTSAQRAELIALTQALKMAEGKKLNVYTDSRYAFATAHIHGEIYRRRGWLTSEGKEIKNKDEILALLKALFLPKRLSIIHCPGHQKGHSAEARGNRMADQAARKAAITETPDTSTLLAGKRTADGSEFEKRTADGSEFESPKKKAKVE

SEQ ID NO: 2966 - protein, 2096 aa, synthetic construct; identical to SEQ ID NO: 2713

SEQ ID NO: 2967 - protein, 2091 aa, synthetic construct
MPAAKRVKLDGGDKKYSIGLDIGTNSVGWAVITDEYKVPSKKFKVLGNTDRHSIKKNLIGALLFDSGETAEATRLKRTARRRYTRRKNRICYLQEIFSNEMAKVDDSFFHRLEESFLVEEDKKHERHPIFGNIVDEVAYHEKYPTIYHLRKKLVDSTDKADLRLIYLALAHMIKFRGHFLIEGDLNPDNSDVDKLFIQLVQTYNQLFEENPINASGVDAKAILSARLSKSRRLENLIAQLPGEKKNGLFGNLIALSLGLTPNFKSNFDLAEDAKLQLSKDTYDDDLDNLLAQIGDQYADLFLAAKNLSDAILLSDILRVNTEITKAPLSASMIKRYDEHHQDLTLLKALVRQQLPEKYKEIFFDQSKNGYAGYIDGGASQEEFYKFIKPILEKMDGTEELLVKLNREDLLRKQRTFDNGSIPHQIHLGELHAILRRQEDFYPFLKDNREKIEKILTFRIPYYVGPLARGNSRFAWMTRKSEETITPWNFEEVVDKGASAQSFIERMTNFDKNLPNEKVLPKHSLLYEYFTVYNELTKVKYVTEGMRKPAFLSGEQKKAIVDLLFKTNRKVTVKQLKEDYFKKIECFDSVEISGVEDRFNASLGTYHDLLKIIKDKDFLDNEENEDILEDIVLTLTLFEDREMIEERLKTYAHLFDDKVMKQLKRRRYTGWGRLSRKLINGIRDKQSGKTILDFLKSDGFANRNFMQLIHDDSLTFKEDIQKAQVSGQGDSLHEHIANLAGSPAIKKGILQTVKVVDELVKVMGRHKPENIVIEMARENQTTQKGQKNSRERMKRIEEGIKELGSQILKEHPVENTQLQNEKLYLYYLQNGRDMYVDQELDINRLSDYDVDHIVPQSFLKDDSIDNKVLTRSDKARGKSDNVPSEEVVKKMKNYWRQLLNAKLITQRKFDNLTKAERGGLSELDKAGFIKRQLVETRQITKHVAQILDSRMNTKYDENDKLIREVKVITLKSKLVSDFRKDFQFYKVREINNYHHAHDAYLNAVVGTALIKKYPKLESEFVYGDYKVYDVRKMIAKSEQEIGKATAKYFFYSNIMNFFKTEITLANGEIRKRPLIETNGETGEIVWDKGRDFATVRKVLSMPQVNIVKKTEVQTGGFSKESILPKRNSDKLIARKKDWDPKKYGGFDSPTVAYSVLVVAKVEKGKSKKLKSVKELLGITIMERSSFEKNPIDFLEAKGYKEVKKDLIIKLPKYSLFELENGRKRMLASAGELQKGNELALPSKYVNFLYLASHYEKLKGSPEDNEQKQLFVEQHKHYLDEIIEQISEFSKRVILADANLDKVLSAYNKHRDKPIREQAENIIHLFTLTNLGAPAAFKYFDTTIDRKRYTSTKEVLDATLIHQSITGLYETRIDLSQLGGDGGGSSGGGGGTLNIEDEHRLHETSKEPDVSLGSTWLSDFPQAWAETGGMGLAVRQAPLIIPLKATSTPVSIKQYPMSQEARLGIKPHIQRLLDQGILVPCQSPWNTPLLPVKKPGTNDYRPVQDLREVNKRVEDIHPTVPNPYNLLSGLPPSHQWYTVLDLKDAFFCLRLHPTSQPLFAFEWRDPEMGISGQLTWTRLPQGFKNSPTLFNEALHRDLADFRIQHPDLILLQYVDDLLLAATSELDCQQGTRALLQTLGNLGYRASAKKAQICQKQVKYLGYLLKEGQRWLTEARKETVMGQPTPKTPRQLREFLGTAGFCRLWIPGFAEMAAPLYPLTKPGTLFNWGPDQQKAYQEIKQALLTAPALGLPDLTKPFELFVDEKQGYAKGVLTQKLGPWRRPVAYLSKKLDPVAAGWPPCLRMVAAIAVLTKDAGKLTMGQPLVILAPHAVEALVKQPPDRWLSNARMTHYQALLLDTDRVQFGPVVALNPATLLPLPEEGLQHNCLDILAEAHGTRPDLTDQPLPDADHTWYTDGSSLLQEGQRKAGAAVTTETEVIWAKALPAGTSAQRAELIALTQALKMAEGKKLNVYTDSRYAFATAHIHGEIYRRRGWLTSEGKEIKNKDEILALLKALFLPKRLSIIHCPGHQKGHSAEARGNRMADQAARKAAITETPDTSTLLAGKRTADGSEFEKRTADGSEFESPKKKAKVE

SEQ ID NO: 2968 - protein, 2105 aa, synthetic construct; identical to SEQ ID NO: 2771

SEQ ID NO: 2969 - protein, 2096 aa, synthetic construct; identical to SEQ ID NO: 2753

SEQ ID NO: 2970 - protein, 2096 aa, synthetic construct
MPAAKRVKLDGGDKKYSIGLDIGTNSVGWAVITDEYKVPSKKFKVLGNTDRHSIKKNLIGALLFDSGETAEATRLKRTARRRYTRRKNRICYLQEIFSNEMAKVDDSFFHRLEESFLVEEDKKHERHPIFGNIVDEVAYHEKYPTIYHLRKKLVDSTDKADLRLIYLALAHMIKFRGHFLIEGDLNPDNSDVDKLFIQLVQTYNQLFEENPINASGVDAKAILSARLSKSRRLENLIAQLPGEKKNGLFGNLIALSLGLTPNFKSNFDLAEDAKLQLSKDTYDDDLDNLLAQIGDQYADLFLAAKNLSDAILLSDILRVNTEITKAPLSASMIKRYDEHHQDLTLLKALVRQQLPEKYKEIFFDQSKNGYAGYIDGGASQEEFYKFIKPILEKMDGTEELLVKLNREDLLRKQRTFDNGSIPHQIHLGELHAILRRQEDFYPFLKDNREKIEKILTFRIPYYVGPLARGNSRFAWMTRKSEETITPWNFEEVVDKGASAQSFIERMTNFDKNLPNEKVLPKHSLLYEYFTVYNELTKVKYVTEGMRKPAFLSGEQKKAIVDLLFKTNRKVTVKQLKEDYFKKIECFDSVEISGVEDRFNASLGTYHDLLKIIKDKDFLDNEENEDILEDIVLTLTLFEDREMIEERLKTYAHLFDDKVMKQLKRRRYTGWGRLSRKLINGIRDKQSGKTILDFLKSDGFANRNFMQLIHDDSLTFKEDIQKAQVSGQGDSLHEHIANLAGSPAIKKGILQTVKVVDELVKVMGRHKPENIVIEMARENQTTQKGQKNSRERMKRIEEGIKELGSQILKEHPVENTQLQNEKLYLYYLQNGRDMYVDQELDINRLSDYDVDHIVPQSFLKDDSIDNKVLTRSDKARGKSDNVPSEEVVKKMKNYWRQLLNAKLITQRKFDNLTKAERGGLSELDKAGFIKRQLVETRQITKHVAQILDSRMNTKYDENDKLIREVKVITLKSKLVSDFRKDFQFYKVREINNYHHAHDAYLNAVVGTALIKKYPKLESEFVYGDYKVYDVRKMIAKSEQEIGKATAKYFFYSNIMNFFKTEITLANGEIRKRPLIETNGETGEIVWDKGRDFATVRKVLSMPQVNIVKKTEVQTGGFSKESILPKRNSDKLIARKKDWDPKKYGGFDSPTVAYSVLVVAKVEKGKSKKLKSVKELLGITIMERSSFEKNPIDFLEAKGYKEVKKDLIIKLPKYSLFELENGRKRMLASAGELQKGNELALPSKYVNFLYLASHYEKLKGSPEDNEQKQLFVEQHKHYLDEIIEQISEFSKRVILADANLDKVLSAYNKHRDKPIREQAENIIHLFTLTNLGAPAAFKYFDTTIDRKRYTSTKEVLDATLIHQSITGLYETRIDLSQLGGDGGPAPAPAPAPAPGGTLNIEDEHRLHETSKEPDVSLGSTWLSDFPQAWAETGGMGLAVRQAPLIIPLKATSTPVSIKQYPMSQEARLGIKPHIQRLLDQGILVPCQSPWNTPLLPVKKPGTNDYRPVQDLREVNKRVEDIHPTVPNPYNLLSGLPPSHQWYTVLDLKDAFFCLRLHPTSQPLFAFEWRDPEMGISGQLTWTRLPQGFKNSPTLFNEALHRDLADFRIQHPDLILLQYVDDLLLAATSELDCQQGTRALLQTLGNLGYRASAKKAQICQKQVKYLGYLLKEGQRWLTEARKETVMGQPTPKTPRQLREFLGTAGFCRLWIPGFAEMAAPLYPLTKPGTLFNWGPDQQKAYQEIKQALLTAPALGLPDLTKPFELFVDEKQGYAKGVLTQKLGPWRRPVAYLSKKLDPVAAGWPPCLRMVAAIAVLTKDAGKLTMGQPLVILAPHAVEALVKQPPDRWLSNARMTHYQALLLDTDRVQFGPVVALNPATLLPLPEEGLQHNCLDILAEAHGTRPDLTDQPLPDADHTWYTDGSSLLQEGQRKAGAAVTTETEVIWAKALPAGTSAQRAELIALTQALKMAEGKKLNVYTDSRYAFATAHIHGEIYRRRGWLTSEGKEIKNKDEILALLKALFLPKRLSIIHCPGHQKGHSAEARGNRMADQAARKAAITETPDTSTLLAGKRTADGSEFEKRTADGSEFESPKKKAKVE

SEQ ID NO: 2971 - protein, 2093 aa, synthetic construct; identical to SEQ ID NO: 2724

SEQ ID NO: 2972 - protein, 2131 aa, synthetic construct; identical to SEQ ID NO: 2711

SEQ ID NO: 2973 - protein, 2088 aa, synthetic construct
MPAAKRVKLDGGDKKYSIGLDIGTNSVGWAVITDEYKVPSKKFKVLGNTDRHSIKKNLIGALLFDSGETAEATRLKRTARRRYTRRKNRICYLQEIFSNEMAKVDDSFFHRLEESFLVEEDKKHERHPIFGNIVDEVAYHEKYPTIYHLRKKLVDSTDKADLRLIYLALAHMIKFRGHFLIEGDLNPDNSDVDKLFIQLVQTYNQLFEENPINASGVDAKAILSARLSKSRRLENLIAQLPGEKKNGLFGNLIALSLGLTPNFKSNFDLAEDAKLQLSKDTYDDDLDNLLAQIGDQYADLFLAAKNLSDAILLSDILRVNTEITKAPLSASMIKRYDEHHQDLTLLKALVRQQLPEKYKEIFFDQSKNGYAGYIDGGASQEEFYKFIKPILEKMDGTEELLVKLNREDLLRKQRTFDNGSIPHQIHLGELHAILRRQEDFYPFLKDNREKIEKILTFRIPYYVGPLARGNSRFAWMTRKSEETITPWNFEEVVDKGASAQSFIERMTNFDKNLPNEKVLPKHSLLYEYFTVYNELTKVKYVTEGMRKPAFLSGEQKKAIVDLLFKTNRKVTVKQLKEDYFKKIECFDSVEISGVEDRFNASLGTYHDLLKIIKDKDFLDNEENEDILEDIVLTLTLFEDREMIEERLKTYAHLFDDKVMKQLKRRRYTGWGRLSRKLINGIRDKQSGKTILDFLKSDGFANRNFMQLIHDDSLTFKEDIQKAQVSGQGDSLHEHIANLAGSPAIKKGILQTVKVVDELVKVMGRHKPENIVIEMARENQTTQKGQKNSRERMKRIEEGIKELGSQILKEHPVENTQLQNEKLYLYYLQNGRDMYVDQELDINRLSDYDVDHIVPQSFLKDDSIDNKVLTRSDKARGKSDNVPSEEVVKKMKNYWRQLLNAKLITQRKFDNLTKAERGGLSELDKAGFIKRQLVETRQITKHVAQILDSRMNTKYDENDKLIREVKVITLKSKLVSDFRKDFQFYKVREINNYHHAHDAYLNAVVGTALIKKYPKLESEFVYGDYKVYDVRKMIAKSEQEIGKATAKYFFYSNIMNFFKTEITLANGEIRKRPLIETNGETGEIVWDKGRDFATVRKVLSMPQVNIVKKTEVQTGGFSKESILPKRNSDKLIARKKDWDPKKYGGFDSPTVAYSVLVVAKVEKGKSKKLKSVKELLGITIMERSSFEKNPIDFLEAKGYKEVKKDLIIKLPKYSLFELENGRKRMLASAGELQKGNELALPSKYVNFLYLASHYEKLKGSPEDNEQKQLFVEQHKHYLDEIIEQISEFSKRVILADANLDKVLSAYNKHRDKPIREQAENIIHLFTLTNLGAPAAFKYFDTTIDRKRYTSTKEVLDATLIHQSITGLYETRIDLSQLGGDGGPAPGGTLNIEDEHRLHETSKEPDVSLGSTWLSDFPQAWAETGGMGLAVRQAPLIIPLKATSTPVSIKQYPMSQEARLGIKPHIQRLLDQGILVPCQSPWNTPLLPVKKPGTNDYRPVQDLREVNKRVEDIHPTVPNPYNLLSGLPPSHQWYTVLDLKDAFFCLRLHPTSQPLFAFEWRDPEMGISGQLTWTRLPQGFKNSPTLFNEALHRDLADFRIQHPDLILLQYVDDLLLAATSELDCQQGTRALLQTLGNLGYRASAKKAQICQKQVKYLGYLLKEGQRWLTEARKETVMGQPTPKTPRQLREFLGTAGFCRLWIPGFAEMAAPLYPLTKPGTLFNWGPDQQKAYQEIKQALLTAPALGLPDLTKPFELFVDEKQGYAKGVLTQKLGPWRRPVAYLSKKLDPVAAGWPPCLRMVAAIAVLTKDAGKLTMGQPLVILAPHAVEALVKQPPDRWLSNARMTHYQALLLDTDRVQFGPVVALNPATLLPLPEEGLQHNCLDILAEAHGTRPDLTDQPLPDADHTWYTDGSSLLQEGQRKAGAAVTTETEVIWAKALPAGTSAQRAELIALTQALKMAEGKKLNVYTDSRYAFATAHIHGEIYRRRGWLTSEGKEIKNKDEILALLKALFLPKRLSIIHCPGHQKGHSAEARGNRMADQAARKAAITETPDTSTLLAGKRTADGSEFEKRTADGSEFESPKKKAKVE

SEQ ID NO: 2974 - protein, 2098 aa, synthetic construct
MPAAKRVKLDGGDKKYSIGLDIGTNSVGWAVITDEYKVPSKKFKVLGNTDRHSIKKNLIGALLFDSGETAEATRLKRTARRRYTRRKNRICYLQEIFSNEMAKVDDSFFHRLEESFLVEEDKKHERHPIFGNIVDEVAYHEKYPTIYHLRKKLVDSTDKADLRLIYLALAHMIKFRGHFLIEGDLNPDNSDVDKLFIQLVQTYNQLFEENPINASGVDAKAILSARLSKSRRLENLIAQLPGEKKNGLFGNLIALSLGLTPNFKSNFDLAEDAKLQLSKDTYDDDLDNLLAQIGDQYADLFLAAKNLSDAILLSDILRVNTEITKAPLSASMIKRYDEHHQDLTLLKALVRQQLPEKYKEIFFDQSKNGYAGYIDGGASQEEFYKFIKPILEKMDGTEELLVKLNREDLLRKQRTFDNGSIPHQIHLGELHAILRRQEDFYPFLKDNREKIEKILTFRIPYYVGPLARGNSRFAWMTRKSEETITPWNFEEVVDKGASAQSFIERMTNFDKNLPNEKVLPKHSLLYEYFTVYNELTKVKYVTEGMRKPAFLSGEQKKAIVDLLFKTNRKVTVKQLKEDYFKKIECFDSVEISGVEDRFNASLGTYHDLLKIIKDKDFLDNEENEDILEDIVLTLTLFEDREMIEERLKTYAHLFDDKVMKQLKRRRYTGWGRLSRKLINGIRDKQSGKTILDFLKSDGFANRNFMQLIHDDSLTFKEDIQKAQVSGQGDSLHEHIANLAGSPAIKKGILQTVKVVDELVKVMGRHKPENIVIEMARENQTTQKGQKNSRERMKRIEEGIKELGSQILKEHPVENTQLQNEKLYLYYLQNGRDMYVDQELDINRLSDYDVDHIVPQSFLKDDSIDNKVLTRSDKARGKSDNVPSEEVVKKMKNYWRQLLNAKLITQRKFDNLTKAERGGLSELDKAGFIKRQLVETRQITKHVAQILDSRMNTKYDENDKLIREVKVITLKSKLVSDFRKDFQFYKVREINNYHHAHDAYLNAVVGTALIKKYPKLESEFVYGDYKVYDVRKMIAKSEQEIGKATAKYFFYSNIMNFFKTEITLANGEIRKRPLIETNGETGEIVWDKGRDFATVRKVLSMPQVNIVKKTEVQTGGFSKESILPKRNSDKLIARKKDWDPKKYGGFDSPTVAYSVLVVAKVEKGKSKKLKSVKELLGITIMERSSFEKNPIDFLEAKGYKEVKKDLIIKLPKYSLFELENGRKRMLASAGELQKGNELALPSKYVNFLYLASHYEKLKGSPEDNEQKQLFVEQHKHYLDEIIEQISEFSKRVILADANLDKVLSAYNKHRDKPIREQAENIIHLFTLTNLGAPAAFKYFDTTIDRKRYTSTKEVLDATLIHQSITGLYETRIDLSQLGGDGGPAPAPAPAPAPAPGGTLNIEDEHRLHETSKEPDVSLGSTWLSDFPQAWAETGGMGLAVRQAPLIIPLKATSTPVSIKQYPMSQEARLGIKPHIQRLLDQGILVPCQSPWNTPLLPVKKPGTNDYRPVQDLREVNKRVEDIHPTVPNPYNLLSGLPPSHQWYTVLDLKDAFFCLRLHPTSQPLFAFEWRDPEMGISGQLTWTRLPQGFKNSPTLFNEALHRDLADFRIQHPDLILLQYVDDLLLAATSELDCQQGTRALLQTLGNLGYRASAKKAQICQKQVKYLGYLLKEGQRWLTEARKETVMGQPTPKTPRQLREFLGTAGFCRLWIPGFAEMAAPLYPLTKPGTLFNWGPDQQKAYQEIKQALLTAPALGLPDLTKPFELFVDEKQGYAKGVLTQKLGPWRRPVAYLSKKLDPVAAGWPPCLRMVAAIAVLTKDAGKLTMGQPLVILAPHAVEALVKQPPDRWLSNARMTHYQALLLDTDRVQFGPVVALNPATLLPLPEEGLQHNCLDILAEAHGTRPDLTDQPLPDADHTWYTDGSSLLQEGQRKAGAAVTTETEVIWAKALPAGTSAQRAELIALTQALKMAEGKKLNVYTDSRYAFATAHIHGEIYRRRGWLTSEGKEIKNKDEILALLKALFLPKRLSIIHCPGHQKGHSAEARGNRMADQAARKAAITETPDTSTLLAGKRTADGSEFEKRTADGSEFESPKKKAKVE

SEQ ID NO: 2975 - protein, 2091 aa, synthetic construct
MPAAKRVKLDGGDKKYSIGLDIGTNSVGWAVITDEYKVPSKKFKVLGNTDRHSIKKNLIGALLFDSGETAEATRLKRTARRRYTRRKNRICYLQEIFSNEMAKVDDSFFHRLEESFLVEEDKKHERHPIFGNIVDEVAYHEKYPTIYHLRKKLVDSTDKADLRLIYLALAHMIKFRGHFLIEGDLNPDNSDVDKLFIQLVQTYNQLFEENPINASGVDAKAILSARLSKSRRLENLIAQLPGEKKNGLFGNLIALSLGLTPNFKSNFDLAEDAKLQLSKDTYDDDLDNLLAQIGDQYADLFLAAKNLSDAILLSDILRVNTEITKAPLSASMIKRYDEHHQDLTLLKALVRQQLPEKYKEIFFDQSKNGYAGYIDGGASQEEFYKFIKPILEKMDGTEELLVKLNREDLLRKQRTFDNGSIPHQIHLGELHAILRRQEDFYPFLKDNREKIEKILTFRIPYYVGPLARGNSRFAWMTRKSEETITPWNFEEVVDKGASAQSFIERMTNFDKNLPNEKVLPKHSLLYEYFTVYNELTKVKYVTEGMRKPAFLSGEQKKAIVDLLFKTNRKVTVKQLKEDYFKKIECFDSVEISGVEDRFNASLGTYHDLLKIIKDKDFLDNEENEDILEDIVLTLTLFEDREMIEERLKTYAHLFDDKVMKQLKRRRYTGWGRLSRKLINGIRDKQSGKTILDFLKSDGFANRNFMQLIHDDSLTFKEDIQKAQVSGQGDSLHEHIANLAGSPAIKKGILQTVKVVDELVKVMGRHKPENIVIEMARENQTTQKGQKNSRERMKRIEEGIKELGSQILKEHPVENTQLQNEKLYLYYLQNGRDMYVDQELDINRLSDYDVDHIVPQSFLKDDSIDNKVLTRSDKARGKSDNVPSEEVVKKMKNYWRQLLNAKLITQRKFDNLTKAERGGLSELDKAGFIKRQLVETRQITKHVAQILDSRMNTKYDENDKLIREVKVITLKSKLVSDFRKDFQFYKVREINNYHHAHDAYLNAVVGTALIKKYPKLESEFVYGDYKVYDVRKMIAKSEQEIGKATAKYFFYSNIMNFFKTEITLANGEIRKRPLIETNGETGEIVWDKGRDFATVRKVLSMPQVNIVKKTEVQTGGFSKESILPKRNSDKLIARKKDWDPKKYGGFDSPTVAYSVLVVAKVEKGKSKKLKSVKELLGITIMERSSFEKNPIDFLEAKGYKEVKKDLIIKLPKYSLFELENGRKRMLASAGELQKGNELALPSKYVNFLYLASHYEKLKGSPEDNEQKQLFVEQHKHYLDEIIEQISEFSKRVILADANLDKVLSAYNKHRDKPIREQAENIIHLFTLTNLGAPAAFKYFDTTIDRKRYTSTKEVLDATLIHQSITGLYETRIDLSQLGGDGGGGGGGGGGTLNIEDEHRLHETSKEPDVSLGSTWLSDFPQAWAETGGMGLAVRQAPLIIPLKATSTPVSIKQYPMSQEARLGIKPHIQRLLDQGILVPCQSPWNTPLLPVKKPGTNDYRPVQDLREVNKRVEDIHPTVPNPYNLLSGLPPSHQWYTVLDLKDAFFCLRLHPTSQPLFAFEWRDPEMGISGQLTWTRLPQGFKNSPTLFNEALHRDLADFRIQHPDLILLQYVDDLLLAATSELDCQQGTRALLQTLGNLGYRASAKKAQICQKQVKYLGYLLKEGQRWLTEARKETVMGQPTPKTPRQLREFLGTAGFCRLWIPGFAEMAAPLYPLTKPGTLFNWGPDQQKAYQEIKQALLTAPALGLPDLTKPFELFVDEKQGYAKGVLTQKLGPWRRPVAYLSKKLDPVAAGWPPCLRMVAAIAVLTKDAGKLTMGQPLVILAPHAVEALVKQPPDRWLSNARMTHYQALLLDTDRVQFGPVVALNPATLLPLPEEGLQHNCLDILAEAHGTRPDLTDQPLPDADHTWYTDGSSLLQEGQRKAGAAVTTETEVIWAKALPAGTSAQRAELIALTQALKMAEGKKLNVYTDSRYAFATAHIHGEIYRRRGWLTSEGKEIKNKDEILALLKALFLPKRLSIIHCPGHQKGHSAEARGNRMADQAARKAAITETPDTSTLLAGKRTADGSEFEKRTADGSEFESPKKKAKVE

SEQ ID NO: 2976 - protein, 2096 aa, synthetic construct; identical to SEQ ID NO: 2723

SEQ ID NO: 2977 - protein, 2096 aa, synthetic construct; identical to SEQ ID NO: 2777

SEQ ID NO: 2978 - protein, 2093 aa, synthetic construct
MPAAKRVKLDGGDKKYSIGLDIGTNSVGWAVITDEYKVPSKKFKVLGNTDRHSIKKNLIGALLFDSGETAEATRLKRTARRRYTRRKNRICYLQEIFSNEMAKVDDSFFHRLEESFLVEEDKKHERHPIFGNIVDEVAYHEKYPTIYHLRKKLVDSTDKADLRLIYLALAHMIKFRGHFLIEGDLNPDNSDVDKLFIQLVQTYNQLFEENPINASGVDAKAILSARLSKSRRLENLIAQLPGEKKNGLFGNLIALSLGLTPNFKSNFDLAEDAKLQLSKDTYDDDLDNLLAQIGDQYADLFLAAKNLSDAILLSDILRVNTEITKAPLSASMIKRYDEHHQDLTLLKALVRQQLPEKYKEIFFDQSKNGYAGYIDGGASQEEFYKFIKPILEKMDGTEELLVKLNREDLLRKQRTFDNGSIPHQIHLGELHAILRRQEDFYPFLKDNREKIEKILTFRIPYYVGPLARGNSRFAWMTRKSEETITPWNFEEVVDKGASAQSFIERMTNFDKNLPNEKVLPKHSLLYEYFTVYNELTKVKYVTEGMRKPAFLSGEQKKAIVDLLFKTNRKVTVKQLKEDYFKKIECFDSVEISGVEDRFNASLGTYHDLLKIIKDKDFLDNEENEDILEDIVLTLTLFEDREMIEERLKTYAHLFDDKVMKQLKRRRYTGWGRLSRKLINGIRDKQSGKTILDFLKSDGFANRNFMQLIHDDSLTFKEDIQKAQVSGQGDSLHEHIANLAGSPAIKKGILQTVKVVDELVKVMGRHKPENIVIEMARENQTTQKGQKNSRERMKRIEEGIKELGSQILKEHPVENTQLQNEKLYLYYLQNGRDMYVDQELDINRLSDYDVDHIVPQSFLKDDSIDNKVLTRSDKARGKSDNVPSEEVVKKMKNYWRQLLNAKLITQRKFDNLTKAERGGLSELDKAGFIKRQLVETRQITKHVAQILDSRMNTKYDENDKLIREVKVITLKSKLVSDFRKDFQFYKVREINNYHHAHDAYLNAVVGTALIKKYPKLESEFVYGDYKVYDVRKMIAKSEQEIGKATAKYFFYSNIMNFFKTEITLANGEIRKRPLIETNGETGEIVWDKGRDFATVRKVLSMPQVNIVKKTEVQTGGFSKESILPKRNSDKLIARKKDWDPKKYGGFDSPTVAYSVLVVAKVEKGKSKKLKSVKELLGITIMERSSFEKNPIDFLEAKGYKEVKKDLIIKLPKYSLFELENGRKRMLASAGELQKGNELALPSKYVNFLYLASHYEKLKGSPEDNEQKQLFVEQHKHYLDEIIEQISEFSKRVILADANLDKVLSAYNKHRDKPIREQAENIIHLFTLTNLGAPAAFKYFDTTIDRKRYTSTKEVLDATLIHQSITGLYETRIDLSQLGGDGGEAAAKGGGGGTLNIEDEHRLHETSKEPDVSLGSTWLSDFPQAWAETGGMGLAVRQAPLIIPLKATSTPVSIKQYPMSQEARLGIKPHIQRLLDQGILVPCQSPWNTPLLPVKKPGTNDYRPVQDLREVNKRVEDIHPTVPNPYNLLSGLPPSHQWYTVLDLKDAFFCLRLHPTSQPLFAFEWRDPEMGISGQLTWTRLPQGFKNSPTLFNEALHRDLADFRIQHPDLILLQYVDDLLLAATSELDCQQGTRALLQTLGNLGYRASAKKAQICQKQVKYLGYLLKEGQRWLTEARKETVMGQPTPKTPRQLREFLGTAGFCRLWIPGFAEMAAPLYPLTKPGTLFNWGPDQQKAYQEIKQALLTAPALGLPDLTKPFELFVDEKQGYAKGVLTQKLGPWRRPVAYLSKKLDPVAAGWPPCLRMVAAIAVLTKDAGKLTMGQPLVILAPHAVEALVKQPPDRWLSNARMTHYQALLLDTDRVQFGPVVALNPATLLPLPEEGLQHNCLDILAEAHGTRPDLTDQPLPDADHTWYTDGSSLLQEGQRKAGAAVTTETEVIWAKALPAGTSAQRAELIALTQALKMAEGKKLNVYTDSRYAFATAHIHGEIYRRRGWLTSEGKEIKNKDEILALLKALFLPKRLSIIHCPGHQKGHSAEARGNRMADQAARKAAITETPDTSTLLAGKRTADGSEFEKRTADGSEFESPKKKAKVE

SEQ ID NO: 2979 - protein, 2094 aa, synthetic construct
MPAAKRVKLDGGDKKYSIGLDIGTNSVGWAVITDEYKVPSKKFKVLGNTDRHSIKKNLIGALLFDSGETAEATRLKRTARRRYTRRKNRICYLQEIFSNEMAKVDDSFFHRLEESFLVEEDKKHERHPIFGNIVDEVAYHEKYPTIYHLRKKLVDSTDKADLRLIYLALAHMIKFRGHFLIEGDLNPDNSDVDKLFIQLVQTYNQLFEENPINASGVDAKAILSARLSKSRRLENLIAQLPGEKKNGLFGNLIALSLGLTPNFKSNFDLAEDAKLQLSKDTYDDDLDNLLAQIGDQYADLFLAAKNLSDAILLSDILRVNTEITKAPLSASMIKRYDEHHQDLTLLKALVRQQLPEKYKEIFFDQSKNGYAGYIDGGASQEEFYKFIKPILEKMDGTEELLVKLNREDLLRKQRTFDNGSIPHQIHLGELHAILRRQEDFYPFLKDNREKIEKILTFRIPYYVGPLARGNSRFAWMTRKSEETITPWNFEEVVDKGASAQSFIERMTNFDKNLPNEKVLPKHSLLYEYFTVYNELTKVKYVTEGMRKPAFLSGEQKKAIVDLLFKTNRKVTVKQLKEDYFKKIECFDSVEISGVEDRFNASLGTYHDLLKIIKDKDFLDNEENEDILEDIVLTLTLFEDREMIEERLKTYAHLFDDKVMKQLKRRRYTGWGRLSRKLINGIRDKQSGKTILDFLKSDGFANRNFMQLIHDDSLTFKEDIQKAQVSGQGDSLHEHIANLAGSPAIKKGILQTVKVVDELVKVMGRHKPENIVIEMARENQTTQKGQKNSRERMKRIEEGIKELGSQILKEHPVENTQLQNEKLYLYYLQNGRDMYVDQELDINRLSDYDVDHIVPQSFLKDDSIDNKVLTRSDKARGKSDNVPSEEVVKKMKNYWRQLLNAKLITQRKFDNLTKAERGGLSELDKAGFIKRQLVETRQITKHVAQILDSRMNTKYDENDKLIREVKVITLKSKLVSDFRKDFQFYKVREINNYHHAHDAYLNAVVGTALIKKYPKLESEFVYGDYKVYDVRKMIAKSEQEIGKATAKYFFYSNIMNFFKTEITLANGEIRKRPLIETNGETGEIVWDKGRDFATVRKVLSMPQVNIVKKTEVQTGGFSKESILPKRNSDKLIARKKDWDPKKYGGFDSPTVAYSVLVVAKVEKGKSKKLKSVKELLGITIMERSSFEKNPIDFLEAKGYKEVKKDLIIKLPKYSLFELENGRKRMLASAGELQKGNELALPSKYVNFLYLASHYEKLKGSPEDNEQKQLFVEQHKHYLDEIIEQISEFSKRVILADANLDKVLSAYNKHRDKPIREQAENIIHLFTLTNLGAPAAFKYFDTTIDRKRYTSTKEVLDATLIHQSITGLYETRIDLSQLGGDGGGGSGSSGGGGGTLNIEDEHRLHETSKEPDVSLGSTWLSDFPQAWAETGGMGLAVRQAPLIIPLKATSTPVSIKQYPMSQEARLGIKPHIQRLLDQGILVPCQSPWNTPLLPVKKPGTNDYRPVQDLREVNKRVEDIHPTVPNPYNLLSGLPPSHQWYTVLDLKDAFFCLRLHPTSQPLFAFEWRDPEMGISGQLTWTRLPQGFKNSPTLFNEALHRDLADFRIQHPDLILLQYVDDLLLAATSELDCQQGTRALLQTLGNLGYRASAKKAQICQKQVKYLGYLLKEGQRWLTEARKETVMGQPTPKTPRQLREFLGTAGFCRLWIPGFAEMAAPLYPLTKPGTLFNWGPDQQKAYQEIKQALLTAPALGLPDLTKPFELFVDEKQGYAKGVLTQKLGPWRRPVAYLSKKLDPVAAGWPPCLRMVAAIAVLTKDAGKLTMGQPLVILAPHAVEALVKQPPDRWLSNARMTHYQALLLDTDRVQFGPVVALNPATLLPLPEEGLQHNCLDILAEAHGTRPDLTDQPLPDADHTWYTDGSSLLQEGQRKAGAAVTTETEVIWAKALPAGTSAQRAELIALTQALKMAEGKKLNVYTDSRYAFATAHIHGEIYRRRGWLTSEGKEIKNKDEILALLKALFLPKRLSIIHCPGHQKGHSAEARGNRMADQAARKAAITETPDTSTLLAGKRTADGSEFEKRTADGSEFESPKKKAKVE

SEQ ID NO: 2980 - protein, 2092 aa, synthetic construct
MPAAKRVKLDGGDKKYSIGLDIGTNSVGWAVITDEYKVPSKKFKVLGNTDRHSIKKNLIGALLFDSGETAEATRLKRTARRRYTRRKNRICYLQEIFSNEMAKVDDSFFHRLEESFLVEEDKKHERHPIFGNIVDEVAYHEKYPTIYHLRKKLVDSTDKADLRLIYLALAHMIKFRGHFLIEGDLNPDNSDVDKLFIQLVQTYNQLFEENPINASGVDAKAILSARLSKSRRLENLIAQLPGEKKNGLFGNLIALSLGLTPNFKSNFDLAEDAKLQLSKDTYDDDLDNLLAQIGDQYADLFLAAKNLSDAILLSDILRVNTEITKAPLSASMIKRYDEHHQDLTLLKALVRQQLPEKYKEIFFDQSKNGYAGYIDGGASQEEFYKFIKPILEKMDGTEELLVKLNREDLLRKQRTFDNGSIPHQIHLGELHAILRRQEDFYPFLKDNREKIEKILTFRIPYYVGPLARGNSRFAWMTRKSEETITPWNFEEVVDKGASAQSFIERMTNFDKNLPNEKVLPKHSLLYEYFTVYNELTKVKYVTEGMRKPAFLSGEQKKAIVDLLFKTNRKVTVKQLKEDYFKKIECFDSVEISGVEDRFNASLGTYHDLLKIIKDKDFLDNEENEDILEDIVLTLTLFEDREMIEERLKTYAHLFDDKVMKQLKRRRYTGWGRLSRKLINGIRDKQSGKTILDFLKSDGFANRNFMQLIHDDSLTFKEDIQKAQVSGQGDSLHEHIANLAGSPAIKKGILQTVKVVDELVKVMGRHKPENIVIEMARENQTTQKGQKNSRERMKRIEEGIKELGSQILKEHPVENTQLQNEKLYLYYLQNGRDMYVDQELDINRLSDYDVDHIVPQSFLKDDSIDNKVLTRSDKARGKSDNVPSEEVVKKMKNYWRQLLNAKLITQRKFDNLTKAERGGLSELDKAGFIKRQLVETRQITKHVAQILDSRMNTKYDENDKLIREVKVITLKSKLVSDFRKDFQFYKVREINNYHHAHDAYLNAVVGTALIKKYPKLESEFVYGDYKVYDVRKMIAKSEQEIGKATAKYFFYSNIMNFFKTEITLANGEIRKRPLIETNGETGEIVWDKGRDFATVRKVLSMPQVNIVKKTEVQTGGFSKESILPKRNSDKLIARKKDWDPKKYGGFDSPTVAYSVLVVAKVEKGKSKKLKSVKELLGITIMERSSFEKNPIDFLEAKGYKEVKKDLIIKLPKYSLFELENGRKRMLASAGELQKGNELALPSKYVNFLYLASHYEKLKGSPEDNEQKQLFVEQHKHYLDEIIEQISEFSKRVILADANLDKVLSAYNKHRDKPIREQAENIIHLFTLTNLGAPAAFKYFDTTIDRKRYTSTKEVLDATLIHQSITGLYETRIDLSQLGGDGGPAPAPAPGGTLNIEDEHRLHETSKEPDVSLGSTWLSDFPQAWAETGGMGLAVRQAPLIIPLKATSTPVSIKQYPMSQEARLGIKPHIQRLLDQGILVPCQSPWNTPLLPVKKPGTNDYRPVQDLREVNKRVEDIHPTVPNPYNLLSGLPPSHQWYTVLDLKDAFFCLRLHPTSQPLFAFEWRDPEMGISGQLTWTRLPQGFKNSPTLFNEALHRDLADFRIQHPDLILLQYVDDLLLAATSELDCQQGTRALLQTLGNLGYRASAKKAQICQKQVKYLGYLLKEGQRWLTEARKETVMGQPTPKTPRQLREFLGTAGFCRLWIPGFAEMAAPLYPLTKPGTLFNWGPDQQKAYQEIKQALLTAPALGLPDLTKPFELFVDEKQGYAKGVLTQKLGPWRRPVAYLSKKLDPVAAGWPPCLRMVAAIAVLTKDAGKLTMGQPLVILAPHAVEALVKQPPDRWLSNARMTHYQALLLDTDRVQFGPVVALNPATLLPLPEEGLQHNCLDILAEAHGTRPDLTDQPLPDADHTWYTDGSSLLQEGQRKAGAAVTTETEVIWAKALPAGTSAQRAELIALTQALKMAEGKKLNVYTDSRYAFATAHIHGEIYRRRGWLTSEGKEIKNKDEILALLKALFLPKRLSIIHCPGHQKGHSAEARGNRMADQAARKAAITETPDTSTLLAGKRTADGSEFEKRTADGSEFESPKKKAKVE

SEQ ID NO: 2981 - protein, 2100 aa, synthetic construct
MPAAKRVKLDGGDKKYSIGLDIGTNSVGWAVITDEYKVPSKKFKVLGNTDRHSIKKNLIGALLFDSGETAEATRLKRTARRRYTRRKNRICYLQEIFSNEMAKVDDSFFHRLEESFLVEEDKKHERHPIFGNIVDEVAYHEKYPTIYHLRKKLVDSTDKADLRLIYLALAHMIKFRGHFLIEGDLNPDNSDVDKLFIQLVQTYNQLFEENPINASGVDAKAILSARLSKSRRLENLIAQLPGEKKNGLFGNLIALSLGLTPNFKSNFDLAEDAKLQLSKDTYDDDLDNLLAQIGDQYADLFLAAKNLSDAILLSDILRVNTEITKAPLSASMIKRYDEHHQDLTLLKALVRQQLPEKYKEIFFDQSKNGYAGYIDGGASQEEFYKFIKPILEKMDGTEELLVKLNREDLLRKQRTFDNGSIPHQIHLGELHAILRRQEDFYPFLKDNREKIEKILTFRIPYYVGPLARGNSRFAWMTRKSEETITPWNFEEVVDKGASAQSFIERMTNFDKNLPNEKVLPKHSLLYEYFTVYNELTKVKYVTEGMRKPAFLSGEQKKAIVDLLFKTNRKVTVKQLKEDYFKKIECFDSVEISGVEDRFNASLGTYHDLLKIIKDKDFLDNEENEDILEDIVLTLTLFEDREMIEERLKTYAHLFDDKVMKQLKRRRYTGWGRLSRKLINGIRDKQSGKTILDFLKSDGFANRNFMQLIHDDSLTFKEDIQKAQVSGQGDSLHEHIANLAGSPAIKKGILQTVKVVDELVKVMGRHKPENIVIEMARENQTTQKGQKNSRERMKRIEEGIKELGSQILKEHPVENTQLQNEKLYLYYLQNGRDMYVDQELDINRLSDYDVDHIVPQSFLKDDSIDNKVLTRSDKARGKSDNVPSEEVVKKMKNYWRQLLNAKLITQRKFDNLTKAERGGLSELDKAGFIKRQLVETRQITKHVAQILDSRMNTKYDENDKLIREVKVITLKSKLVSDFRKDFQFYKVREINNYHHAHDAYLNAVVGTALIKKYPKLESEFVYGDYKVYDVRKMIAKSEQEIGKATAKYFFYSNIMNFFKTEITLANGEIRKRPLIETNGETGEIVWDKGRDFATVRKVLSMPQVNIVKKTEVQTGGFSKESILPKRNSDKLIARKKDWDPKKYGGFDSPTVAYSVLVVAKVEKGKSKKLKSVKELLGITIMERSSFEKNPIDFLEAKGYKEVKKDLIIKLPKYSLFELENGRKRMLASAGELQKGNELALPSKYVNFLYLASHYEKLKGSPEDNEQKQLFVEQHKHYLDEIIEQISEFSKRVILADANLDKVLSAYNKHRDKPIREQAENIIHLFTLTNLGAPAAFKYFDTTIDRKRYTSTKEVLDATLIHQSITGLYETRIDLSQLGGDGGGGSGGSGGSGGSGGSGGTLNIEDEHRLHETSKEPDVSLGSTWLSDFPQAWAETGGMGLAVRQAPLIIPLKATSTPVSIKQYPMSQEARLGIKPHIQRLLDQGILVPCQSPWNTPLLPVKKPGTNDYRPVQDLREVNKRVEDIHPTVPNPYNLLSGLPPSHQWYTVLDLKDAFFCLRLHPTSQPLFAFEWRDPEMGISGQLTWTRLPQGFKNSPTLFNEALHRDLADFRIQHPDLILLQYVDDLLLAATSELDCQQGTRALLQTLGNLGYRASAKKAQICQKQVKYLGYLLKEGQRWLTEARKETVMGQPTPKTPRQLREFLGTAGFCRLWIPGFAEMAAPLYPLTKPGTLFNWGPDQQKAYQEIKQALLTAPALGLPDLTKPFELFVDEKQGYAKGVLTQKLGPWRRPVAYLSKKLDPVAAGWPPCLRMVAAIAVLTKDAGKLTMGQPLVILAPHAVEALVKQPPDRWLSNARMTHYQALLLDTDRVQFGPVVALNPATLLPLPEEGLQHNCLDILAEAHGTRPDLTDQPLPDADHTWYTDGSSLLQEGQRKAGAAVTTETEVIWAKALPAGTSAQRAELIALTQALKMAEGKKLNVYTDSRYAFATAHIHGEIYRRRGWLTSEGKEIKNKDEILALLKALFLPKRLSIIHCPGHQKGHSAEARGNRMADQAARKAAITETPDTSTLLAGKRTADGSEFEKRTADGSEFESPKKKAKVE

SEQ ID NO: 2982 - protein, 2093 aa, synthetic construct; identical to SEQ ID NO: 2726

SEQ ID NO: 2983 - protein, 2115 aa, synthetic construct; identical to SEQ ID NO: 2741

SEQ ID NO: 2984 - protein, 2090 aa, synthetic construct
MPAAKRVKLDGGDKKYSIGLDIGTNSVGWAVITDEYKVPSKKFKVLGNTDRHSIKKNLIGALLFDSGETAEATRLKRTARRRYTRRKNRICYLQEIFSNEMAKVDDSFFHRLEESFLVEEDKKHERHPIFGNIVDEVAYHEKYPTIYHLRKKLVDSTDKADLRLIYLALAHMIKFRGHFLIEGDLNPDNSDVDKLFIQLVQTYNQLFEENPINASGVDAKAILSARLSKSRRLENLIAQLPGEKKNGLFGNLIALSLGLTPNFKSNFDLAEDAKLQLSKDTYDDDLDNLLAQIGDQYADLFLAAKNLSDAILLSDILRVNTEITKAPLSASMIKRYDEHHQDLTLLKALVRQQLPEKYKEIFFDQSKNGYAGYIDGGASQEEFYKFIKPILEKMDGTEELLVKLNREDLLRKQRTFDNGSIPHQIHLGELHAILRRQEDFYPFLKDNREKIEKILTFRIPYYVGPLARGNSRFAWMTRKSEETITPWNFEEVVDKGASAQSFIERMTNFDKNLPNEKVLPKHSLLYEYFTVYNELTKVKYVTEGMRKPAFLSGEQKKAIVDLLFKTNRKVTVKQLKEDYFKKIECFDSVEISGVEDRFNASLGTYHDLLKIIKDKDFLDNEENEDILEDIVLTLTLFEDREMIEERLKTYAHLFDDKVMKQLKRRRYTGWGRLSRKLINGIRDKQSGKTILDFLKSDGFANRNFMQLIHDDSLTFKEDIQKAQVSGQGDSLHEHIANLAGSPAIKKGILQTVKVVDELVKVMGRHKPENIVIEMARENQTTQKGQKNSRERMKRIEEGIKELGSQILKEHPVENTQLQNEKLYLYYLQNGRDMYVDQELDINRLSDYDVDHIVPQSFLKDDSIDNKVLTRSDKARGKSDNVPSEEVVKKMKNYWRQLLNAKLITQRKFDNLTKAERGGLSELDKAGFIKRQLVETRQITKHVAQILDSRMNTKYDENDKLIREVKVITLKSKLVSDFRKDFQFYKVREINNYHHAHDAYLNAVVGTALIKKYPKLESEFVYGDYKVYDVRKMIAKSEQEIGKATAKYFFYSNIMNFFKTEITLANGEIRKRPLIETNGETGEIVWDKGRDFATVRKVLSMPQVNIVKKTEVQTGGFSKESILPKRNSDKLIARKKDWDPKKYGGFDSPTVAYSVLVVAKVEKGKSKKLKSVKELLGITIMERSSFEKNPIDFLEAKGYKEVKKDLIIKLPKYSLFELENGRKRMLASAGELQKGNELALPSKYVNFLYLASHYEKLKGSPEDNEQKQLFVEQHKHYLDEIIEQISEFSKRVILADANLDKVLSAYNKHRDKPIREQAENIIHLFTLTNLGAPAAFKYFDTTIDRKRYTSTKEVLDATLIHQSITGLYETRIDLSQLGGDGGGGGGGGGTLNIEDEHRLHETSKEPDVSLGSTWLSDFPQAWAETGGMGLAVRQAPLIIPLKATSTPVSIKQYPMSQEARLGIKPHIQRLLDQGILVPCQSPWNTPLLPVKKPGTNDYRPVQDLREVNKRVEDIHPTVPNPYNLLSGLPPSHQWYTVLDLKDAFFCLRLHPTSQPLFAFEWRDPEMGISGQLTWTRLPQGFKNSPTLFNEALHRDLADFRIQHPDLILLQYVDDLLLAATSELDCQQGTRALLQTLGNLGYRASAKKAQICQKQVKYLGYLLKEGQRWLTEARKETVMGQPTPKTPRQLREFLGTAGFCRLWIPGFAEMAAPLYPLTKPGTLFNWGPDQQKAYQEIKQALLTAPALGLPDLTKPFELFVDEKQGYAKGVLTQKLGPWRRPVAYLSKKLDPVAAGWPPCLRMVAAIAVLTKDAGKLTMGQPLVILAPHAVEALVKQPPDRWLSNARMTHYQALLLDTDRVQFGPVVALNPATLLPLPEEGLQHNCLDILAEAHGTRPDLTDQPLPDADHTWYTDGSSLLQEGQRKAGAAVTTETEVIWAKALPAGTSAQRAELIALTQALKMAEGKKLNVYTDSRYAFATAHIHGEIYRRRGWLTSEGKEIKNKDEILALLKALFLPKRLSIIHCPGHQKGHSAEARGNRMADQAARKAAITETPDTSTLLAGKRTADGSEFEKRTADGSEFESPKKKAKVE

SEQ ID NO: 2985 - protein, 2094 aa, synthetic construct
MPAAKRVKLDGGDKKYSIGLDIGTNSVGWAVITDEYKVPSKKFKVLGNTDRHSIKKNLIGALLFDSGETAEATRLKRTARRRYTRRKNRICYLQEIFSNEMAKVDDSFFHRLEESFLVEEDKKHERHPIFGNIVDEVAYHEKYPTIYHLRKKLVDSTDKADLRLIYLALAHMIKFRGHFLIEGDLNPDNSDVDKLFIQLVQTYNQLFEENPINASGVDAKAILSARLSKSRRLENLIAQLPGEKKNGLFGNLIALSLGLTPNFKSNFDLAEDAKLQLSKDTYDDDLDNLLAQIGDQYADLFLAAKNLSDAILLSDILRVNTEITKAPLSASMIKRYDEHHQDLTLLKALVRQQLPEKYKEIFFDQSKNGYAGYIDGGASQEEFYKFIKPILEKMDGTEELLVKLNREDLLRKQRTFDNGSIPHQIHLGELHAILRRQEDFYPFLKDNREKIEKILTFRIPYYVGPLARGNSRFAWMTRKSEETITPWNFEEVVDKGASAQSFIERMTNFDKNLPNEKVLPKHSLLYEYFTVYNELTKVKYVTEGMRKPAFLSGEQKKAIVDLLFKTNRKVTVKQLKEDYFKKIECFDSVEISGVEDRFNASLGTYHDLLKIIKDKDFLDNEENEDILEDIVLTLTLFEDREMIEERLKTYAHLFDDKVMKQLKRRRYTGWGRLSRKLINGIRDKQSGKTILDFLKSDGFANRNFMQLIHDDSLTFKEDIQKAQVSGQGDSLHEHIANLAGSPAIKKGILQTVKVVDELVKVMGRHKPENIVIEMARENQTTQKGQKNSRERMKRIEEGIKELGSQILKEHPVENTQLQNEKLYLYYLQNGRDMYVDQELDINRLSDYDVDHIVPQSFLKDDSIDNKVLTRSDKARGKSDNVPSEEVVKKMKNYWRQLLNAKLITQRKFDNLTKAERGGLSELDKAGFIKRQLVETRQITKHVAQILDSRMNTKYDENDKLIREVKVITLKSKLVSDFRKDFQFYKVREINNYHHAHDAYLNAVVGTALIKKYPKLESEFVYGDYKVYDVRKMIAKSEQEIGKATAKYFFYSNIMNFFKTEITLANGEIRKRPLIETNGETGEIVWDKGRDFATVRKVLSMPQVNIVKKTEVQTGGFSKESILPKRNSDKLIARKKDWDPKKYGGFDSPTVAYSVLVVAKVEKGKSKKLKSVKELLGITIMERSSFEKNPIDFLEAKGYKEVKKDLIIKLPKYSLFELENGRKRMLASAGELQKGNELALPSKYVNFLYLASHYEKLKGSPEDNEQKQLFVEQHKHYLDEIIEQISEFSKRVILADANLDKVLSAYNKHRDKPIREQAENIIHLFTLTNLGAPAAFKYFDTTIDRKRYTSTKEVLDATLIHQSITGLYETRIDLSQLGGDGGGGSGSSPAPGGTLNIEDEHRLHETSKEPDVSLGSTWLSDFPQAWAETGGMGLAVRQAPLIIPLKATSTPVSIKQYPMSQEARLGIKPHIQRLLDQGILVPCQSPWNTPLLPVKKPGTNDYRPVQDLREVNKRVEDIHPTVPNPYNLLSGLPPSHQWYTVLDLKDAFFCLRLHPTSQPLFAFEWRDPEMGISGQLTWTRLPQGFKNSPTLFNEALHRDLADFRIQHPDLILLQYVDDLLLAATSELDCQQGTRALLQTLGNLGYRASAKKAQICQKQVKYLGYLLKEGQRWLTEARKETVMGQPTPKTPRQLREFLGTAGFCRLWIPGFAEMAAPLYPLTKPGTLFNWGPDQQKAYQEIKQALLTAPALGLPDLTKPFELFVDEKQGYAKGVLTQKLGPWRRPVAYLSKKLDPVAAGWPPCLRMVAAIAVLTKDAGKLTMGQPLVILAPHAVEALVKQPPDRWLSNARMTHYQALLLDTDRVQFGPVVALNPATLLPLPEEGLQHNCLDILAEAHGTRPDLTDQPLPDADHTWYTDGSSLLQEGQRKAGAAVTTETEVIWAKALPAGTSAQRAELIALTQALKMAEGKKLNVYTDSRYAFATAHIHGEIYRRRGWLTSEGKEIKNKDEILALLKALFLPKRLSIIHCPGHQKGHSAEARGNRMADQAARKAAITETPDTSTLLAGKRTADGSEFEKRTADGSEFESPKKKAKVE

SEQ ID NO: 2986 - protein, 2088 aa, synthetic construct
MPAAKRVKLDGGDKKYSIGLDIGTNSVGWAVITDEYKVPSKKFKVLGNTDRHSIKKNLIGALLFDSGETAEATRLKRTARRRYTRRKNRICYLQEIFSNEMAKVDDSFFHRLEESFLVEEDKKHERHPIFGNIVDEVAYHEKYPTIYHLRKKLVDSTDKADLRLIYLALAHMIKFRGHFLIEGDLNPDNSDVDKLFIQLVQTYNQLFEENPINASGVDAKAILSARLSKSRRLENLIAQLPGEKKNGLFGNLIALSLGLTPNFKSNFDLAEDAKLQLSKDTYDDDLDNLLAQIGDQYADLFLAAKNLSDAILLSDILRVNTEITKAPLSASMIKRYDEHHQDLTLLKALVRQQLPEKYKEIFFDQSKNGYAGYIDGGASQEEFYKFIKPILEKMDGTEELLVKLNREDLLRKQRTFDNGSIPHQIHLGELHAILRRQEDFYPFLKDNREKIEKILTFRIPYYVGPLARGNSRFAWMTRKSEETITPWNFEEVVDKGASAQSFIERMTNFDKNLPNEKVLPKHSLLYEYFTVYNELTKVKYVTEGMRKPAFLSGEQKKAIVDLLFKTNRKVTVKQLKEDYFKKIECFDSVEISGVEDRFNASLGTYHDLLKIIKDKDFLDNEENEDILEDIVLTLTLFEDREMIEERLKTYAHLFDDKVMKQLKRRRYTGWGRLSRKLINGIRDKQSGKTILDFLKSDGFANRNFMQLIHDDSLTFKEDIQKAQVSGQGDSLHEHIANLAGSPAIKKGILQTVKVVDELVKVMGRHKPENIVIEMARENQTTQKGQKNSRERMKRIEEGIKELGSQILKEHPVENTQLQNEKLYLYYLQNGRDMYVDQELDINRLSDYDVDHIVPQSFLKDDSIDNKVLTRSDKARGKSDNVPSEEVVKKMKNYWRQLLNAKLITQRKFDNLTKAERGGLSELDKAGFIKRQLVETRQITKHVAQILDSRMNTKYDENDKLIREVKVITLKSKLVSDFRKDFQFYKVREINNYHHAHDAYLNAVVGTALIKKYPKLESEFVYGDYKVYDVRKMIAKSEQEIGKATAKYFFYSNIMNFFKTEITLANGEIRKRPLIETNGETGEIVWDKGRDFATVRKVLSMPQVNIVKKTEVQTGGFSKESILPKRNSDKLIARKKDWDPKKYGGFDSPTVAYSVLVVAKVEKGKSKKLKSVKELLGITIMERSSFEKNPIDFLEAKGYKEVKKDLIIKLPKYSLFELENGRKRMLASAGELQKGNELALPSKYVNFLYLASHYEKLKGSPEDNEQKQLFVEQHKHYLDEIIEQISEFSKRVILADANLDKVLSAYNKHRDKPIREQAENIIHLFTLTNLGAPAAFKYFDTTIDRKRYTSTKEVLDATLIHQSITGLYETRIDLSQLGGDGGGSSGGTLNIEDEHRLHETSKEPDVSLGSTWLSDFPQAWAETGGMGLAVRQAPLIIPLKATSTPVSIKQYPMSQEARLGIKPHIQRLLDQGILVPCQSPWNTPLLPVKKPGTNDYRPVQDLREVNKRVEDIHPTVPNPYNLLSGLPPSHQWYTVLDLKDAFFCLRLHPTSQPLFAFEWRDPEMGISGQLTWTRLPQGFKNSPTLFNEALHRDLADFRIQHPDLILLQYVDDLLLAATSELDCQQGTRALLQTLGNLGYRASAKKAQICQKQVKYLGYLLKEGQRWLTEARKETVMGQPTPKTPRQLREFLGTAGFCRLWIPGFAEMAAPLYPLTKPGTLFNWGPDQQKAYQEIKQALLTAPALGLPDLTKPFELFVDEKQGYAKGVLTQKLGPWRRPVAYLSKKLDPVAAGWPPCLRMVAAIAVLTKDAGKLTMGQPLVILAPHAVEALVKQPPDRWLSNARMTHYQALLLDTDRVQFGPVVALNPATLLPLPEEGLQHNCLDILAEAHGTRPDLTDQPLPDADHTWYTDGSSLLQEGQRKAGAAVTTETEVIWAKALPAGTSAQRAELIALTQALKMAEGKKLNVYTDSRYAFATAHIHGEIYRRRGWLTSEGKEIKNKDEILALLKALFLPKRLSIIHCPGHQKGHSAEARGNRMADQAARKAAITETPDTSTLLAGKRTADGSEFEKRTADGSEFESPKKKAKVE

SEQ ID NO: 2987 - protein, 2096 aa, synthetic construct; identical to SEQ ID NO: 2776

SEQ ID NO: 2988 - protein, 2094 aa, synthetic construct
MPAAKRVKLDGGDKKYSIGLDIGTNSVGWAVITDEYKVPSKKFKVLGNTDRHSIKKNLIGALLFDSGETAEATRLKRTARRRYTRRKNRICYLQEIFSNEMAKVDDSFFHRLEESFLVEEDKKHERHPIFGNIVDEVAYHEKYPTIYHLRKKLVDSTDKADLRLIYLALAHMIKFRGHFLIEGDLNPDNSDVDKLFIQLVQTYNQLFEENPINASGVDAKAILSARLSKSRRLENLIAQLPGEKKNGLFGNLIALSLGLTPNFKSNFDLAEDAKLQLSKDTYDDDLDNLLAQIGDQYADLFLAAKNLSDAILLSDILRVNTEITKAPLSASMIKRYDEHHQDLTLLKALVRQQLPEKYKEIFFDQSKNGYAGYIDGGASQEEFYKFIKPILEKMDGTEELLVKLNREDLLRKQRTFDNGSIPHQIHLGELHAILRRQEDFYPFLKDNREKIEKILTFRIPYYVGPLARGNSRFAWMTRKSEETITPWNFEEVVDKGASAQSFIERMTNFDKNLPNEKVLPKHSLLYEYFTVYNELTKVKYVTEGMRKPAFLSGEQKKAIVDLLFKTNRKVTVKQLKEDYFKKIECFDSVEISGVEDRFNASLGTYHDLLKIIKDKDFLDNEENEDILEDIVLTLTLFEDREMIEERLKTYAHLFDDKVMKQLKRRRYTGWGRLSRKLINGIRDKQSGKTILDFLKSDGFANRNFMQLIHDDSLTFKEDIQKAQVSGQGDSLHEHIANLAGSPAIKKGILQTVKVVDELVKVMGRHKPENIVIEMARENQTTQKGQKNSRERMKRIEEGIKELGSQILKEHPVENTQLQNEKLYLYYLQNGRDMYVDQELDINRLSDYDVDHIVPQSFLKDDSIDNKVLTRSDKARGKSDNVPSEEVVKKMKNYWRQLLNAKLITQRKFDNLTKAERGGLSELDKAGFIKRQLVETRQITKHVAQILDSRMNTKYDENDKLIREVKVITLKSKLVSDFRKDFQFYKVREINNYHHAHDAYLNAVVGTALIKKYPKLESEFVYGDYKVYDVRKMIAKSEQEIGKATAKYFFYSNIMNFFKTEITLANGEIRKRPLIETNGETGEIVWDKGRDFATVRKVLSMPQVNIVKKTEVQTGGFSKESILPKRNSDKLIARKKDWDPKKYGGFDSPTVAYSVLVVAKVEKGKSKKLKSVKELLGITIMERSSFEKNPIDFLEAKGYKEVKKDLIIKLPKYSLFELENGRKRMLASAGELQKGNELALPSKYVNFLYLASHYEKLKGSPEDNEQKQLFVEQHKHYLDEIIEQISEFSKRVILADANLDKVLSAYNKHRDKPIREQAENIIHLFTLTNLGAPAAFKYFDTTIDRKRYTSTKEVLDATLIHQSITGLYETRIDLSQLGGDGGGSSPAPGGGGGTLNIEDEHRLHETSKEPDVSLGSTWLSDFPQAWAETGGMGLAVRQAPLIIPLKATSTPVSIKQYPMSQEARLGIKPHIQRLLDQGILVPCQSPWNTPLLPVKKPGTNDYRPVQDLREVNKRVEDIHPTVPNPYNLLSGLPPSHQWYTVLDLKDAFFCLRLHPTSQPLFAFEWRDPEMGISGQLTWTRLPQGFKNSPTLFNEALHRDLADFRIQHPDLILLQYVDDLLLAATSELDCQQGTRALLQTLGNLGYRASAKKAQICQKQVKYLGYLLKEGQRWLTEARKETVMGQPTPKTPRQLREFLGTAGFCRLWIPGFAEMAAPLYPLTKPGTLFNWGPDQQKAYQEIKQALLTAPALGLPDLTKPFELFVDEKQGYAKGVLTQKLGPWRRPVAYLSKKLDPVAAGWPPCLRMVAAIAVLTKDAGKLTMGQPLVILAPHAVEALVKQPPDRWLSNARMTHYQALLLDTDRVQFGPVVALNPATLLPLPEEGLQHNCLDILAEAHGTRPDLTDQPLPDADHTWYTDGSSLLQEGQRKAGAAVTTETEVIWAKALPAGTSAQRAELIALTQALKMAEGKKLNVYTDSRYAFATAHIHGEIYRRRGWLTSEGKEIKNKDEILALLKALFLPKRLSIIHCPGHQKGHSAEARGNRMADQAARKAAITETPDTSTLLAGKRTADGSEFEKRTADGSEFESPKKKAKVE

SEQ ID NO: 2989 - protein, 2096 aa, synthetic construct; identical to SEQ ID NO: 2727

SEQ ID NO: 2990 - protein, 2096 aa, synthetic construct; identical to SEQ ID NO: 2764

SEQ ID NO: 2991 - protein, 2110 aa, synthetic construct; identical to SEQ ID NO: 2716

SEQ ID NO: 2992 - protein, 2115 aa, synthetic construct
MPAAKRVKLDGGDKKYSIGLDIGTNSVGWAVITDEYKVPSKKFKVLGNTDRHSIKKNLIGALLFDSGETAEATRLKRTARRRYTRRKNRICYLQEIFSNEMAKVDDSFFHRLEESFLVEEDKKHERHPIFGNIVDEVAYHEKYPTIYHLRKKLVDSTDKADLRLIYLALAHMIKFRGHFLIEGDLNPDNSDVDKLFIQLVQTYNQLFEENPINASGVDAKAILSARLSKSRRLENLIAQLPGEKKNGLFGNLIALSLGLTPNFKSNFDLAEDAKLQLSKDTYDDDLDNLLAQIGDQYADLFLAAKNLSDAILLSDILRVNTEITKAPLSASMIKRYDEHHQDLTLLKALVRQQLPEKYKEIFFDQSKNGYAGYIDGGASQEEFYKFIKPILEKMDGTEELLVKLNREDLLRKQRTFDNGSIPHQIHLGELHAILRRQEDFYPFLKDNREKIEKILTFRIPYYVGPLARGNSRFAWMTRKSEETITPWNFEEVVDKGASAQSFIERMTNFDKNLPNEKVLPKHSLLYEYFTVYNELTKVKYVTEGMRKPAFLSGEQKKAIVDLLFKTNRKVTVKQLKEDYFKKIECFDSVEISGVEDRFNASLGTYHDLLKIIKDKDFLDNEENEDILEDIVLTLTLFEDREMIEERLKTYAHLFDDKVMKQLKRRRYTGWGRLSRKLINGIRDKQSGKTILDFLKSDGFANRNFMQLIHDDSLTFKEDIQKAQVSGQGDSLHEHIANLAGSPAIKKGILQTVKVVDELVKVMGRHKPENIVIEMARENQTTQKGQKNSRERMKRIEEGIKELGSQILKEHPVENTQLQNEKLYLYYLQNGRDMYVDQELDINRLSDYDVDHIVPQSFLKDDSIDNKVLTRSDKARGKSDNVPSEEVVKKMKNYWRQLLNAKLITQRKFDNLTKAERGGLSELDKAGFIKRQLVETRQITKHVAQILDSRMNTKYDENDKLIREVKVITLKSKLVSDFRKDFQFYKVREINNYHHAHDAYLNAVVGTALIKKYPKLESEFVYGDYKVYDVRKMIAKSEQEIGKATAKYFFYSNIMNFFKTEITLANGEIRKRPLIETNGETGEIVWDKGRDFATVRKVLSMPQVNIVKKTEVQTGGFSKESILPKRNSDKLIARKKDWDPKKYGGFDSPTVAYSVLVVAKVEKGKSKKLKSVKELLGITIMERSSFEKNPIDFLEAKGYKEVKKDLIIKLPKYSLFELENGRKRMLASAGELQKGNELALPSKYVNFLYLASHYEKLKGSPEDNEQKQLFVEQHKHYLDEIIEQISEFSKRVILADANLDKVLSAYNKHRDKPIREQAENIIHLFTLTNLGAPAAFKYFDTTIDRKRYTSTKEVLDATLIHQSITGLYETRIDLSQLGGDGGEAAAKEAAAKEAAAKEAAAKEAAAKEAAAKGGTLNIEDEHRLHETSKEPDVSLGSTWLSDFPQAWAETGGMGLAVRQAPLIIPLKATSTPVSIKQYPMSQEARLGIKPHIQRLLDQGILVPCQSPWNTPLLPVKKPGTNDYRPVQDLREVNKRVEDIHPTVPNPYNLLSGLPPSHQWYTVLDLKDAFFCLRLHPTSQPLFAFEWRDPEMGISGQLTWTRLPQGFKNSPTLFNEALHRDLADFRIQHPDLILLQYVDDLLLAATSELDCQQGTRALLQTLGNLGYRASAKKAQICQKQVKYLGYLLKEGQRWLTEARKETVMGQPTPKTPRQLREFLGTAGFCRLWIPGFAEMAAPLYPLTKPGTLFNWGPDQQKAYQEIKQALLTAPALGLPDLTKPFELFVDEKQGYAKGVLTQKLGPWRRPVAYLSKKLDPVAAGWPPCLRMVAAIAVLTKDAGKLTMGQPLVILAPHAVEALVKQPPDRWLSNARMTHYQALLLDTDRVQFGPVVALNPATLLPLPEEGLQHNCLDILAEAHGTRPDLTDQPLPDADHTWYTDGSSLLQEGQRKAGAAVTTETEVIWAKALPAGTSAQRAELIALTQALKMAEGKKLNVYTDSRYAFATAHIHGEIYRRRGWLTSEGKEIKNKDEILALLKALFLPKRLSIIHCPGHQKGHSAEARGNRMADQAARKAAITETPDTSTLLAGKRTADGSEFEKRTADGSEFESPKKKAKVE

SEQ ID NO: 2993 - protein, 2094 aa, synthetic construct; identical to SEQ ID NO: 2766

SEQ ID NO: 2994 - protein, 2094 aa, synthetic construct; identical to SEQ ID NO: 2773

SEQ ID NO: 2995 - protein, 2097 aa, synthetic construct
MPAAKRVKLDGGDKKYSIGLDIGTNSVGWAVITDEYKVPSKKFKVLGNTDRHSIKKNLIGALLFDSGETAEATRLKRTARRRYTRRKNRICYLQEIFSNEMAKVDDSFFHRLEESFLVEEDKKHERHPIFGNIVDEVAYHEKYPTIYHLRKKLVDSTDKADLRLIYLALAHMIKFRGHFLIEGDLNPDNSDVDKLFIQLVQTYNQLFEENPINASGVDAKAILSARLSKSRRLENLIAQLPGEKKNGLFGNLIALSLGLTPNFKSNFDLAEDAKLQLSKDTYDDDLDNLLAQIGDQYADLFLAAKNLSDAILLSDILRVNTEITKAPLSASMIKRYDEHHQDLTLLKALVRQQLPEKYKEIFFDQSKNGYAGYIDGGASQEEFYKFIKPILEKMDGTEELLVKLNREDLLRKQRTFDNGSIPHQIHLGELHAILRRQEDFYPFLKDNREKIEKILTFRIPYYVGPLARGNSRFAWMTRKSEETITPWNFEEVVDKGASAQSFIERMTNFDKNLPNEKVLPKHSLLYEYFTVYNELTKVKYVTEGMRKPAFLSGEQKKAIVDLLFKTNRKVTVKQLKEDYFKKIECFDSVEISGVEDRFNASLGTYHDLLKIIKDKDFLDNEENEDILEDIVLTLTLFEDREMIEERLKTYAHLFDDKVMKQLKRRRYTGWGRLSRKLINGIRDKQSGKTILDFLKSDGFANRNFMQLIHDDSLTFKEDIQKAQVSGQGDSLHEHIANLAGSPAIKKGILQTVKVVDELVKVMGRHKPENIVIEMARENQTTQKGQKNSRERMKRIEEGIKELGSQILKEHPVENTQLQNEKLYLYYLQNGRDMYVDQELDINRLSDYDVDHIVPQSFLKDDSIDNKVLTRSDKARGKSDNVPSEEVVKKMKNYWRQLLNAKLITQRKFDNLTKAERGGLSELDKAGFIKRQLVETRQITKHVAQILDSRMNTKYDENDKLIREVKVITLKSKLVSDFRKDFQFYKVREINNYHHAHDAYLNAVVGTALIKKYPKLESEFVYGDYKVYDVRKMIAKSEQEIGKATAKYFFYSNIMNFFKTEITLANGEIRKRPLIETNGETGEIVWDKGRDFATVRKVLSMPQVNIVKKTEVQTGGFSKESILPKRNSDKLIARKKDWDPKKYGGFDSPTVAYSVLVVAKVEKGKSKKLKSVKELLGITIMERSSFEKNPIDFLEAKGYKEVKKDLIIKLPKYSLFELENGRKRMLASAGELQKGNELALPSKYVNFLYLASHYEKLKGSPEDNEQKQLFVEQHKHYLDEIIEQISEFSKRVILADANLDKVLSAYNKHRDKPIREQAENIIHLFTLTNLGAPAAFKYFDTTIDRKRYTSTKEVLDATLIHQSITGLYETRIDLSQLGGDGGGSAGSAAGSGEFGGTLNIEDEHRLHETSKEPDVSLGSTWLSDFPQAWAETGGMGLAVRQAPLIIPLKATSTPVSIKQYPMSQEARLGIKPHIQRLLDQGILVPCQSPWNTPLLPVKKPGTNDYRPVQDLREVNKRVEDIHPTVPNPYNLLSGLPPSHQWYTVLDLKDAFFCLRLHPTSQPLFAFEWRDPEMGISGQLTWTRLPQGFKNSPTLFNEALHRDLADFRIQHPDLILLQYVDDLLLAATSELDCQQGTRALLQTLGNLGYRASAKKAQICQKQVKYLGYLLKEGQRWLTEARKETVMGQPTPKTPRQLREFLGTAGFCRLWIPGFAEMAAPLYPLTKPGTLFNWGPDQQKAYQEIKQALLTAPALGLPDLTKPFELFVDEKQGYAKGVLTQKLGPWRRPVAYLSKKLDPVAAGWPPCLRMVAAIAVLTKDAGKLTMGQPLVILAPHAVEALVKQPPDRWLSNARMTHYQALLLDTDRVQFGPVVALNPATLLPLPEEGLQHNCLDILAEAHGTRPDLTDQPLPDADHTWYTDGSSLLQEGQRKAGAAVTTETEVIWAKALPAGTSAQRAELIALTQALKMAEGKKLNVYTDSRYAFATAHIHGEIYRRRGWLTSEGKEIKNKDEILALLKALFLPKRLSIIHCPGHQKGHSAEARGNRMADQAARKAAITETPDTSTLLAGKRTADGSEFEKRTADGSEFESPKKKAKVE

SEQ ID NO: 2996 - protein, 2091 aa, synthetic construct
MPAAKRVKLDGGDKKYSIGLDIGTNSVGWAVITDEYKVPSKKFKVLGNTDRHSIKKNLIGALLFDSGETAEATRLKRTARRRYTRRKNRICYLQEIFSNEMAKVDDSFFHRLEESFLVEEDKKHERHPIFGNIVDEVAYHEKYPTIYHLRKKLVDSTDKADLRLIYLALAHMIKFRGHFLIEGDLNPDNSDVDKLFIQLVQTYNQLFEENPINASGVDAKAILSARLSKSRRLENLIAQLPGEKKNGLFGNLIALSLGLTPNFKSNFDLAEDAKLQLSKDTYDDDLDNLLAQIGDQYADLFLAAKNLSDAILLSDILRVNTEITKAPLSASMIKRYDEHHQDLTLLKALVRQQLPEKYKEIFFDQSKNGYAGYIDGGASQEEFYKFIKPILEKMDGTEELLVKLNREDLLRKQRTFDNGSIPHQIHLGELHAILRRQEDFYPFLKDNREKIEKILTFRIPYYVGPLARGNSRFAWMTRKSEETITPWNFEEVVDKGASAQSFIERMTNFDKNLPNEKVLPKHSLLYEYFTVYNELTKVKYVTEGMRKPAFLSGEQKKAIVDLLFKTNRKVTVKQLKEDYFKKIECFDSVEISGVEDRFNASLGTYHDLLKIIKDKDFLDNEENEDILEDIVLTLTLFEDREMIEERLKTYAHLFDDKVMKQLKRRRYTGWGRLSRKLINGIRDKQSGKTILDFLKSDGFANRNFMQLIHDDSLTFKEDIQKAQVSGQGDSLHEHIANLAGSPAIKKGILQTVKVVDELVKVMGRHKPENIVIEMARENQTTQKGQKNSRERMKRIEEGIKELGSQILKEHPVENTQLQNEKLYLYYLQNGRDMYVDQELDINRLSDYDVDHIVPQSFLKDDSIDNKVLTRSDKARGKSDNVPSEEVVKKMKNYWRQLLNAKLITQRKFDNLTKAERGGLSELDKAGFIKRQLVETRQITKHVAQILDSRMNTKYDENDKLIREVKVITLKSKLVSDFRKDFQFYKVREINNYHHAHDAYLNAVVGTALIKKYPKLESEFVYGDYKVYDVRKMIAKSEQEIGKATAKYFFYSNIMNFFKTEITLANGEIRKRPLIETNGETGEIVWDKGRDFATVRKVLSMPQVNIVKKTEVQTGGFSKESILPKRNSDKLIARKKDWDPKKYGGFDSPTVAYSVLVVAKVEKGKSKKLKSVKELLGITIMERSSFEKNPIDFLEAKGYKEVKKDLIIKLPKYSLFELENGRKRMLASAGELQKGNELALPSKYVNFLYLASHYEKLKGSPEDNEQKQLFVEQHKHYLDEIIEQISEFSKRVILADANLDKVLSAYNKHRDKPIREQAENIIHLFTLTNLGAPAAFKYFDTTIDRKRYTSTKEVLDATLIHQSITGLYETRIDLSQLGGDGGPAPGSSGGTLNIEDEHRLHETSKEPDVSLGSTWLSDFPQAWAETGGMGLAVRQAPLIIPLKATSTPVSIKQYPMSQEARLGIKPHIQRLLDQGILVPCQSPWNTPLLPVKKPGTNDYRPVQDLREVNKRVEDIHPTVPNPYNLLSGLPPSHQWYTVLDLKDAFFCLRLHPTSQPLFAFEWRDPEMGISGQLTWTRLPQGFKNSPTLFNEALHRDLADFRIQHPDLILLQYVDDLLLAATSELDCQQGTRALLQTLGNLGYRASAKKAQICQKQVKYLGYLLKEGQRWLTEARKETVMGQPTPKTPRQLREFLGTAGFCRLWIPGFAEMAAPLYPLTKPGTLFNWGPDQQKAYQEIKQALLTAPALGLPDLTKPFELFVDEKQGYAKGVLTQKLGPWRRPVAYLSKKLDPVAAGWPPCLRMVAAIAVLTKDAGKLTMGQPLVILAPHAVEALVKQPPDRWLSNARMTHYQALLLDTDRVQFGPVVALNPATLLPLPEEGLQHNCLDILAEAHGTRPDLTDQPLPDADHTWYTDGSSLLQEGQRKAGAAVTTETEVIWAKALPAGTSAQRAELIALTQALKMAEGKKLNVYTDSRYAFATAHIHGEIYRRRGWLTSEGKEIKNKDEILALLKALFLPKRLSIIHCPGHQKGHSAEARGNRMADQAARKAAITETPDTSTLLAGKRTADGSEFEKRTADGSEFESPKKKAKVE

SEQ ID NO: 2997 - protein, 2096 aa, synthetic construct
MPAAKRVKLDGGDKKYSIGLDIGTNSVGWAVITDEYKVPSKKFKVLGNTDRHSIKKNLIGALLFDSGETAEATRLKRTARRRYTRRKNRICYLQEIFSNEMAKVDDSFFHRLEESFLVEEDKKHERHPIFGNIVDEVAYHEKYPTIYHLRKKLVDSTDKADLRLIYLALAHMIKFRGHFLIEGDLNPDNSDVDKLFIQLVQTYNQLFEENPINASGVDAKAILSARLSKSRRLENLIAQLPGEKKNGLFGNLIALSLGLTPNFKSNFDLAEDAKLQLSKDTYDDDLDNLLAQIGDQYADLFLAAKNLSDAILLSDILRVNTEITKAPLSASMIKRYDEHHQDLTLLKALVRQQLPEKYKEIFFDQSKNGYAGYIDGGASQEEFYKFIKPILEKMDGTEELLVKLNREDLLRKQRTFDNGSIPHQIHLGELHAILRRQEDFYPFLKDNREKIEKILTFRIPYYVGPLARGNSRFAWMTRKSEETITPWNFEEVVDKGASAQSFIERMTNFDKNLPNEKVLPKHSLLYEYFTVYNELTKVKYVTEGMRKPAFLSGEQKKAIVDLLFKTNRKVTVKQLKEDYFKKIECFDSVEISGVEDRFNASLGTYHDLLKIIKDKDFLDNEENEDILEDIVLTLTLFEDREMIEERLKTYAHLFDDKVMKQLKRRRYTGWGRLSRKLINGIRDKQSGKTILDFLKSDGFANRNFMQLIHDDSLTFKEDIQKAQVSGQGDSLHEHIANLAGSPAIKKGILQTVKVVDELVKVMGRHKPENIVIEMARENQTTQKGQKNSRERMKRIEEGIKELGSQILKEHPVENTQLQNEKLYLYYLQNGRDMYVDQELDINRLSDYDVDHIVPQSFLKDDSIDNKVLTRSDKARGKSDNVPSEEVVKKMKNYWRQLLNAKLITQRKFDNLTKAERGGLSELDKAGFIKRQLVETRQITKHVAQILDSRMNTKYDENDKLIREVKVITLKSKLVSDFRKDFQFYKVREINNYHHAHDAYLNAVVGTALIKKYPKLESEFVYGDYKVYDVRKMIAKSEQEIGKATAKYFFYSNIMNFFKTEITLANGEIRKRPLIETNGETGEIVWDKGRDFATVRKVLSMPQVNIVKKTEVQTGGFSKESILPKRNSDKLIARKKDWDPKKYGGFDSPTVAYSVLVVAKVEKGKSKKLKSVKELLGITIMERSSFEKNPIDFLEAKGYKEVKKDLIIKLPKYSLFELENGRKRMLASAGELQKGNELALPSKYVNFLYLASHYEKLKGSPEDNEQKQLFVEQHKHYLDEIIEQISEFSKRVILADANLDKVLSAYNKHRDKPIREQAENIIHLFTLTNLGAPAAFKYFDTTIDRKRYTSTKEVLDATLIHQSITGLYETRIDLSQLGGDGGEAAAKGGGGSSGGTLNIEDEHRLHETSKEPDVSLGSTWLSDFPQAWAETGGMGLAVRQAPLIIPLKATSTPVSIKQYPMSQEARLGIKPHIQRLLDQGILVPCQSPWNTPLLPVKKPGTNDYRPVQDLREVNKRVEDIHPTVPNPYNLLSGLPPSHQWYTVLDLKDAFFCLRLHPTSQPLFAFEWRDPEMGISGQLTWTRLPQGFKNSPTLFNEALHRDLADFRIQHPDLILLQYVDDLLLAATSELDCQQGTRALLQTLGNLGYRASAKKAQICQKQVKYLGYLLKEGQRWLTEARKETVMGQPTPKTPRQLREFLGTAGFCRLWIPGFAEMAAPLYPLTKPGTLFNWGPDQQKAYQEIKQALLTAPALGLPDLTKPFELFVDEKQGYAKGVLTQKLGPWRRPVAYLSKKLDPVAAGWPPCLRMVAAIAVLTKDAGKLTMGQPLVILAPHAVEALVKQPPDRWLSNARMTHYQALLLDTDRVQFGPVVALNPATLLPLPEEGLQHNCLDILAEAHGTRPDLTDQPLPDADHTWYTDGSSLLQEGQRKAGAAVTTETEVIWAKALPAGTSAQRAELIALTQALKMAEGKKLNVYTDSRYAFATAHIHGEIYRRRGWLTSEGKEIKNKDEILALLKALFLPKRLSIIHCPGHQKGHSAEARGNRMADQAARKAAITETPDTSTLLAGKRTADGSEFEKRTADGSEFESPKKKAKVE

SEQ ID NO: 2998 - protein, 2100 aa, synthetic construct
MPAAKRVKLDGGDKKYSIGLDIGTNSVGWAVITDEYKVPSKKFKVLGNTDRHSIKKNLIGALLFDSGETAEATRLKRTARRRYTRRKNRICYLQEIFSNEMAKVDDSFFHRLEESFLVEEDKKHERHPIFGNIVDEVAYHEKYPTIYHLRKKLVDSTDKADLRLIYLALAHMIKFRGHFLIEGDLNPDNSDVDKLFIQLVQTYNQLFEENPINASGVDAKAILSARLSKSRRLENLIAQLPGEKKNGLFGNLIALSLGLTPNFKSNFDLAEDAKLQLSKDTYDDDLDNLLAQIGDQYADLFLAAKNLSDAILLSDILRVNTEITKAPLSASMIKRYDEHHQDLTLLKALVRQQLPEKYKEIFFDQSKNGYAGYIDGGASQEEFYKFIKPILEKMDGTEELLVKLNREDLLRKQRTFDNGSIPHQIHLGELHAILRRQEDFYPFLKDNREKIEKILTFRIPYYVGPLARGNSRFAWMTRKSEETITPWNFEEVVDKGASAQSFIERMTNFDKNLPNEKVLPKHSLLYEYFTVYNELTKVKYVTEGMRKPAFLSGEQKKAIVDLLFKTNRKVTVKQLKEDYFKKIECFDSVEISGVEDRFNASLGTYHDLLKIIKDKDFLDNEENEDILEDIVLTLTLFEDREMIEERLKTYAHLFDDKVMKQLKRRRYTGWGRLSRKLINGIRDKQSGKTILDFLKSDGFANRNFMQLIHDDSLTFKEDIQKAQVSGQGDSLHEHIANLAGSPAIKKGILQTVKVVDELVKVMGRHKPENIVIEMARENQTTQKGQKNSRERMKRIEEGIKELGSQILKEHPVENTQLQNEKLYLYYLQNGRDMYVDQELDINRLSDYDVDHIVPQSFLKDDSIDNKVLTRSDKARGKSDNVPSEEVVKKMKNYWRQLLNAKLITQRKFDNLTKAERGGLSELDKAGFIKRQLVETRQITKHVAQILDSRMNTKYDENDKLIREVKVITLKSKLVSDFRKDFQFYKVREINNYHHAHDAYLNAVVGTALIKKYPKLESEFVYGDYKVYDVRKMIAKSEQEIGKATAKYFFYSNIMNFFKTEITLANGEIRKRPLIETNGETGEIVWDKGRDFATVRKVLSMPQVNIVKKTEVQTGGFSKESILPKRNSDKLIARKKDWDPKKYGGFDSPTVAYSVLVVAKVEKGKSKKLKSVKELLGITIMERSSFEKNPIDFLEAKGYKEVKKDLIIKLPKYSLFELENGRKRMLASAGELQKGNELALPSKYVNFLYLASHYEKLKGSPEDNEQKQLFVEQHKHYLDEIIEQISEFSKRVILADANLDKVLSAYNKHRDKPIREQAENIIHLFTLTNLGAPAAFKYFDTTIDRKRYTSTKEVLDATLIHQSITGLYETRIDLSQLGGDGGGSSGSSGSSGSSGSSGGTLNIEDEHRLHETSKEPDVSLGSTWLSDFPQAWAETGGMGLAVRQAPLIIPLKATSTPVSIKQYPMSQEARLGIKPHIQRLLDQGILVPCQSPWNTPLLPVKKPGTNDYRPVQDLREVNKRVEDIHPTVPNPYNLLSGLPPSHQWYTVLDLKDAFFCLRLHPTSQPLFAFEWRDPEMGISGQLTWTRLPQGFKNSPTLFNEALHRDLADFRIQHPDLILLQYVDDLLLAATSELDCQQGTRALLQTLGNLGYRASAKKAQICQKQVKYLGYLLKEGQRWLTEARKETVMGQPTPKTPRQLREFLGTAGFCRLWIPGFAEMAAPLYPLTKPGTLFNWGPDQQKAYQEIKQALLTAPALGLPDLTKPFELFVDEKQGYAKGVLTQKLGPWRRPVAYLSKKLDPVAAGWPPCLRMVAAIAVLTKDAGKLTMGQPLVILAPHAVEALVKQPPDRWLSNARMTHYQALLLDTDRVQFGPVVALNPATLLPLPEEGLQHNCLDILAEAHGTRPDLTDQPLPDADHTWYTDGSSLLQEGQRKAGAAVTTETEVIWAKALPAGTSAQRAELIALTQALKMAEGKKLNVYTDSRYAFATAHIHGEIYRRRGWLTSEGKEIKNKDEILALLKALFLPKRLSIIHCPGHQKGHSAEARGNRMADQAARKAAITETPDTSTLLAGKRTADGSEFEKRTADGSEFESPKKKAKVE

SEQ ID NO: 2999 - protein, 2096 aa, synthetic construct; identical to SEQ ID NO: 2719

SEQ ID NO: 3000 - protein, 2088 aa, synthetic construct
MPAAKRVKLDGGDKKYSIGLDIGTNSVGWAVITDEYKVPSKKFKVLGNTDRHSIKKNLIGALLFDSGETAEATRLKRTARRRYTRRKNRICYLQEIFSNEMAKVDDSFFHRLEESFLVEEDKKHERHPIFGNIVDEVAYHEKYPTIYHLRKKLVDSTDKADLRLIYLALAHMIKFRGHFLIEGDLNPDNSDVDKLFIQLVQTYNQLFEENPINASGVDAKAILSARLSKSRRLENLIAQLPGEKKNGLFGNLIALSLGLTPNFKSNFDLAEDAKLQLSKDTYDDDLDNLLAQIGDQYADLFLAAKNLSDAILLSDILRVNTEITKAPLSASMIKRYDEHHQDLTLLKALVRQQLPEKYKEIFFDQSKNGYAGYIDGGASQEEFYKFIKPILEKMDGTEELLVKLNREDLLRKQRTFDNGSIPHQIHLGELHAILRRQEDFYPFLKDNREKIEKILTFRIPYYVGPLARGNSRFAWMTRKSEETITPWNFEEVVDKGASAQSFIERMTNFDKNLPNEKVLPKHSLLYEYFTVYNELTKVKYVTEGMRKPAFLSGEQKKAIVDLLFKTNRKVTVKQLKEDYFKKIECFDSVEISGVEDRFNASLGTYHDLLKIIKDKDFLDNEENEDILEDIVLTLTLFEDREMIEERLKTYAHLFDDKVMKQLKRRRYTGWGRLSRKLINGIRDKQSGKTILDFLKSDGFANRNFMQLIHDDSLTFKEDIQKAQVSGQGDSLHEHIANLAGSPAIKKGILQTVKVVDELVKVMGRHKPENIVIEMARENQTTQKGQKNSRERMKRIEEGIKELGSQILKEHPVENTQLQNEKLYLYYLQNGRDMYVDQELDINRLSDYDVDHIVPQSFLKDDSIDNKVLTRSDKARGKSDNVPSEEVVKKMKNYWRQLLNAKLITQRKFDNLTKAERGGLSELDKAGFIKRQLVETRQITKHVAQILDSRMNTKYDENDKLIREVKVITLKSKLVSDFRKDFQFYKVREINNYHHAHDAYLNAVVGTALIKKYPKLESEFVYGDYKVYDVRKMIAKSEQEIGKATAKYFFYSNIMNFFKTEITLANGEIRKRPLIETNGETGEIVWDKGRDFATVRKVLSMPQVNIVKKTEVQTGGFSKESILPKRNSDKLIARKKDWDPKKYGGFDSPTVAYSVLVVAKVEKGKSKKLKSVKELLGITIMERSSFEKNPIDFLEAKGYKEVKKDLIIKLPKYSLFELENGRKRMLASAGELQKGNELALPSKYVNFLYLASHYEKLKGSPEDNEQKQLFVEQHKHYLDEIIEQISEFSKRVILADANLDKVLSAYNKHRDKPIREQAENIIHLFTLTNLGAPAAFKYFDTTIDRKRYTSTKEVLDATLIHQSITGLYETRIDLSQLGGDGGGGSGGTLNIEDEHRLHETSKEPDVSLGSTWLSDFPQAWAETGGMGLAVRQAPLIIPLKATSTPVSIKQYPMSQEARLGIKPHIQRLLDQGILVPCQSPWNTPLLPVKKPGTNDYRPVQDLREVNKRVEDIHPTVPNPYNLLSGLPPSHQWYTVLDLKDAFFCLRLHPTSQPLFAFEWRDPEMGISGQLTWTRLPQGFKNSPTLFNEALHRDLADFRIQHPDLILLQYVDDLLLAATSELDCQQGTRALLQTLGNLGYRASAKKAQICQKQVKYLGYLLKEGQRWLTEARKETVMGQPTPKTPRQLREFLGTAGFCRLWIPGFAEMAAPLYPLTKPGTLFNWGPDQQKAYQEIKQALLTAPALGLPDLTKPFELFVDEKQGYAKGVLTQKLGPWRRPVAYLSKKLDPVAAGWPPCLRMVAAIAVLTKDAGKLTMGQPLVILAPHAVEALVKQPPDRWLSNARMTHYQALLLDTDRVQFGPVVALNPATLLPLPEEGLQHNCLDILAEAHGTRPDLTDQPLPDADHTWYTDGSSLLQEGQRKAGAAVTTETEVIWAKALPAGTSAQRAELIALTQALKMAEGKKLNVYTDSRYAFATAHIHGEIYRRRGWLTSEGKEIKNKDEILALLKALFLPKRLSIIHCPGHQKGHSAEARGNRMADQAARKAAITETPDTSTLLAGKRTADGSEFEKRTADGSEFESPKKKAKVE

SEQ ID NO: 3001 - protein, 2100 aa, synthetic construct; identical to SEQ ID NO: 2725

SEQ ID NO: 3002 - protein, 2093 aa, synthetic construct; identical to SEQ ID NO: 2740

SEQ ID NO: 3003 - protein, 2094 aa, synthetic construct; identical to SEQ ID NO: 2752

SEQ ID NO: 3004 - protein, 2097 aa, synthetic construct; identical to SEQ ID NO: 2763

SEQ ID NO: 3005 - protein, 2096 aa, synthetic construct
MPAAKRVKLDGGDKKYSIGLDIGTNSVGWAVITDEYKVPSKKFKVLGNTDRHSIKKNLIGALLFDSGETAEATRLKRTARRRYTRRKNRICYLQEIFSNEMAKVDDSFFHRLEESFLVEEDKKHERHPIFGNIVDEVAYHEKYPTIYHLRKKLVDSTDKADLRLIYLALAHMIKFRGHFLIEGDLNPDNSDVDKLFIQLVQTYNQLFEENPINASGVDAKAILSARLSKSRRLENLIAQLPGEKKNGLFGNLIALSLGLTPNFKSNFDLAEDAKLQLSKDTYDDDLDNLLAQIGDQYADLFLAAKNLSDAILLSDILRVNTEITKAPLSASMIKRYDEHHQDLTLLKALVRQQLPEKYKEIFFDQSKNGYAGYIDGGASQEEFYKFIKPILEKMDGTEELLVKLNREDLLRKQRTFDNGSIPHQIHLGELHAILRRQEDFYPFLKDNREKIEKILTFRIPYYVGPLARGNSRFAWMTRKSEETITPWNFEEVVDKGASAQSFIERMTNFDKNLPNEKVLPKHSLLYEYFTVYNELTKVKYVTEGMRKPAFLSGEQKKAIVDLLFKTNRKVTVKQLKEDYFKKIECFDSVEISGVEDRFNASLGTYHDLLKIIKDKDFLDNEENEDILEDIVLTLTLFEDREMIEERLKTYAHLFDDKVMKQLKRRRYTGWGRLSRKLINGIRDKQSGKTILDFLKSDGFANRNFMQLIHDDSLTFKEDIQKAQVSGQGDSLHEHIANLAGSPAIKKGILQTVKVVDELVKVMGRHKPENIVIEMARENQTTQKGQKNSRERMKRIEEGIKELGSQILKEHPVENTQLQNEKLYLYYLQNGRDMYVDQELDINRLSDYDVDHIVPQSFLKDDSIDNKVLTRSDKARGKSDNVPSEEVVKKMKNYWRQLLNAKLITQRKFDNLTKAERGGLSELDKAGFIKRQLVETRQITKHVAQILDSRMNTKYDENDKLIREVKVITLKSKLVSDFRKDFQFYKVREINNYHHAHDAYLNAVVGTALIKKYPKLESEFVYGDYKVYDVRKMIAKSEQEIGKATAKYFFYSNIMNFFKTEITLANGEIRKRPLIETNGETGEIVWDKGRDFATVRKVLSMPQVNIVKKTEVQTGGFSKESILPKRNSDKLIARKKDWDPKKYGGFDSPTVAYSVLVVAKVEKGKSKKLKSVKELLGITIMERSSFEKNPIDFLEAKGYKEVKKDLIIKLPKYSLFELENGRKRMLASAGELQKGNELALPSKYVNFLYLASHYEKLKGSPEDNEQKQLFVEQHKHYLDEIIEQISEFSKRVILADANLDKVLSAYNKHRDKPIREQAENIIHLFTLTNLGAPAAFKYFDTTIDRKRYTSTKEVLDATLIHQSITGLYETRIDLSQLGGDGGEAAAKPAPGSSGGTLNIEDEHRLHETSKEPDVSLGSTWLSDFPQAWAETGGMGLAVRQAPLIIPLKATSTPVSIKQYPMSQEARLGIKPHIQRLLDQGILVPCQSPWNTPLLPVKKPGTNDYRPVQDLREVNKRVEDIHPTVPNPYNLLSGLPPSHQWYTVLDLKDAFFCLRLHPTSQPLFAFEWRDPEMGISGQLTWTRLPQGFKNSPTLFNEALHRDLADFRIQHPDLILLQYVDDLLLAATSELDCQQGTRALLQTLGNLGYRASAKKAQICQKQVKYLGYLLKEGQRWLTEARKETVMGQPTPKTPRQLREFLGTAGFCRLWIPGFAEMAAPLYPLTKPGTLFNWGPDQQKAYQEIKQALLTAPALGLPDLTKPFELFVDEKQGYAKGVLTQKLGPWRRPVAYLSKKLDPVAAGWPPCLRMVAAIAVLTKDAGKLTMGQPLVILAPHAVEALVKQPPDRWLSNARMTHYQALLLDTDRVQFGPVVALNPATLLPLPEEGLQHNCLDILAEAHGTRPDLTDQPLPDADHTWYTDGSSLLQEGQRKAGAAVTTETEVIWAKALPAGTSAQRAELIALTQALKMAEGKKLNVYTDSRYAFATAHIHGEIYRRRGWLTSEGKEIKNKDEILALLKALFLPKRLSIIHCPGHQKGHSAEARGNRMADQAARKAAITETPDTSTLLAGKRTADGSEFEKRTADGSEFESPKKKAKVE

SEQ ID NO: 3006 - protein, 2089 aa, synthetic construct
MPAAKRVKLDGGDKKYSIGLDIGTNSVGWAVITDEYKVPSKKFKVLGNTDRHSIKKNLIGALLFDSGETAEATRLKRTARRRYTRRKNRICYLQEIFSNEMAKVDDSFFHRLEESFLVEEDKKHERHPIFGNIVDEVAYHEKYPTIYHLRKKLVDSTDKADLRLIYLALAHMIKFRGHFLIEGDLNPDNSDVDKLFIQLVQTYNQLFEENPINASGVDAKAILSARLSKSRRLENLIAQLPGEKKNGLFGNLIALSLGLTPNFKSNFDLAEDAKLQLSKDTYDDDLDNLLAQIGDQYADLFLAAKNLSDAILLSDILRVNTEITKAPLSASMIKRYDEHHQDLTLLKALVRQQLPEKYKEIFFDQSKNGYAGYIDGGASQEEFYKFIKPILEKMDGTEELLVKLNREDLLRKQRTFDNGSIPHQIHLGELHAILRRQEDFYPFLKDNREKIEKILTFRIPYYVGPLARGNSRFAWMTRKSEETITPWNFEEVVDKGASAQSFIERMTNFDKNLPNEKVLPKHSLLYEYFTVYNELTKVKYVTEGMRKPAFLSGEQKKAIVDLLFKTNRKVTVKQLKEDYFKKIECFDSVEISGVEDRFNASLGTYHDLLKIIKDKDFLDNEENEDILEDIVLTLTLFEDREMIEERLKTYAHLFDDKVMKQLKRRRYTGWGRLSRKLINGIRDKQSGKTILDFLKSDGFANRNFMQLIHDDSLTFKEDIQKAQVSGQGDSLHEHIANLAGSPAIKKGILQTVKVVDELVKVMGRHKPENIVIEMARENQTTQKGQKNSRERMKRIEEGIKELGSQILKEHPVENTQLQNEKLYLYYLQNGRDMYVDQELDINRLSDYDVDHIVPQSFLKDDSIDNKVLTRSDKARGKSDNVPSEEVVKKMKNYWRQLLNAKLITQRKFDNLTKAERGGLSELDKAGFIKRQLVETRQITKHVAQILDSRMNTKYDENDKLIREVKVITLKSKLVSDFRKDFQFYKVREINNYHHAHDAYLNAVVGTALIKKYPKLESEFVYGDYKVYDVRKMIAKSEQEIGKATAKYFFYSNIMNFFKTEITLANGEIRKRPLIETNGETGEIVWDKGRDFATVRKVLSMPQVNIVKKTEVQTGGFSKESILPKRNSDKLIARKKDWDPKKYGGFDSPTVAYSVLVVAKVEKGKSKKLKSVKELLGITIMERSSFEKNPIDFLEAKGYKEVKKDLIIKLPKYSLFELENGRKRMLASAGELQKGNELALPSKYVNFLYLASHYEKLKGSPEDNEQKQLFVEQHKHYLDEIIEQISEFSKRVILADANLDKVLSAYNKHRDKPIREQAENIIHLFTLTNLGAPAAFKYFDTTIDRKRYTSTKEVLDATLIHQSITGLYETRIDLSQLGGDGGGGGGGGTLNIEDEHRLHETSKEPDVSLGSTWLSDFPQAWAETGGMGLAVRQAPLIIPLKATSTPVSIKQYPMSQEARLGIKPHIQRLLDQGILVPCQSPWNTPLLPVKKPGTNDYRPVQDLREVNKRVEDIHPTVPNPYNLLSGLPPSHQWYTVLDLKDAFFCLRLHPTSQPLFAFEWRDPEMGISGQLTWTRLPQGFKNSPTLFNEALHRDLADFRIQHPDLILLQYVDDLLLAATSELDCQQGTRALLQTLGNLGYRASAKKAQICQKQVKYLGYLLKEGQRWLTEARKETVMGQPTPKTPRQLREFLGTAGFCRLWIPGFAEMAAPLYPLTKPGTLFNWGPDQQKAYQEIKQALLTAPALGLPDLTKPFELFVDEKQGYAKGVLTQKLGPWRRPVAYLSKKLDPVAAGWPPCLRMVAAIAVLTKDAGKLTMGQPLVILAPHAVEALVKQPPDRWLSNARMTHYQALLLDTDRVQFGPVVALNPATLLPLPEEGLQHNCLDILAEAHGTRPDLTDQPLPDADHTWYTDGSSLLQEGQRKAGAAVTTETEVIWAKALPAGTSAQRAELIALTQALKMAEGKKLNVYTDSRYAFATAHIHGEIYRRRGWLTSEGKEIKNKDEILALLKALFLPKRLSIIHCPGHQKGHSAEARGNRMADQAARKAAITETPDTSTLLAGKRTADGSEFEKRTADGSEFESPKKKAKVE

SEQ ID NO: 3007 - protein, 2096 aa, synthetic construct; identical to SEQ ID NO: 2748

SEQ ID NO: 3008 - protein, 2090 aa, synthetic construct; identical to SEQ ID NO: 2730

SEQ ID NO: 3009 - protein, 2096 aa, synthetic construct
MPAAKRVKLDGGDKKYSIGLDIGTNSVGWAVITDEYKVPSKKFKVLGNTDRHSIKKNLIGALLFDSGETAEATRLKRTARRRYTRRKNRICYLQEIFSNEMAKVDDSFFHRLEESFLVEEDKKHERHPIFGNIVDEVAYHEKYPTIYHLRKKLVDSTDKADLRLIYLALAHMIKFRGHFLIEGDLNPDNSDVDKLFIQLVQTYNQLFEENPINASGVDAKAILSARLSKSRRLENLIAQLPGEKKNGLFGNLIALSLGLTPNFKSNFDLAEDAKLQLSKDTYDDDLDNLLAQIGDQYADLFLAAKNLSDAILLSDILRVNTEITKAPLSASMIKRYDEHHQDLTLLKALVRQQLPEKYKEIFFDQSKNGYAGYIDGGASQEEFYKFIKPILEKMDGTEELLVKLNREDLLRKQRTFDNGSIPHQIHLGELHAILRRQEDFYPFLKDNREKIEKILTFRIPYYVGPLARGNSRFAWMTRKSEETITPWNFEEVVDKGASAQSFIERMTNFDKNLPNEKVLPKHSLLYEYFTVYNELTKVKYVTEGMRKPAFLSGEQKKAIVDLLFKTNRKVTVKQLKEDYFKKIECFDSVEISGVEDRFNASLGTYHDLLKIIKDKDFLDNEENEDILEDIVLTLTLFEDREMIEERLKTYAHLFDDKVMKQLKRRRYTGWGRLSRKLINGIRDKQSGKTILDFLKSDGFANRNFMQLIHDDSLTFKEDIQKAQVSGQGDSLHEHIANLAGSPAIKKGILQTVKVVDELVKVMGRHKPENIVIEMARENQTTQKGQKNSRERMKRIEEGIKELGSQILKEHPVENTQLQNEKLYLYYLQNGRDMYVDQELDINRLSDYDVDHIVPQSFLKDDSIDNKVLTRSDKARGKSDNVPSEEVVKKMKNYWRQLLNAKLITQRKFDNLTKAERGGLSELDKAGFIKRQLVETRQITKHVAQILDSRMNTKYDENDKLIREVKVITLKSKLVSDFRKDFQFYKVREINNYHHAHDAYLNAVVGTALIKKYPKLESEFVYGDYKVYDVRKMIAKSEQEIGKATAKYFFYSNIMNFFKTEITLANGEIRKRPLIETNGETGEIVWDKGRDFATVRKVLSMPQVNIVKKTEVQTGGFSKESILPKRNSDKLIARKKDWDPKKYGGFDSPTVAYSVLVVAKVEKGKSKKLKSVKELLGITIMERSSFEKNPIDFLEAKGYKEVKKDLIIKLPKYSLFELENGRKRMLASAGELQKGNELALPSKYVNFLYLASHYEKLKGSPEDNEQKQLFVEQHKHYLDEIIEQISEFSKRVILADANLDKVLSAYNKHRDKPIREQAENIIHLFTLTNLGAPAAFKYFDTTIDRKRYTSTKEVLDATLIHQSITGLYETRIDLSQLGGDGGPAPEAAAKGGGGGTLNIEDEHRLHETSKEPDVSLGSTWLSDFPQAWAETGGMGLAVRQAPLIIPLKATSTPVSIKQYPMSQEARLGIKPHIQRLLDQGILVPCQSPWNTPLLPVKKPGTNDYRPVQDLREVNKRVEDIHPTVPNPYNLLSGLPPSHQWYTVLDLKDAFFCLRLHPTSQPLFAFEWRDPEMGISGQLTWTRLPQGFKNSPTLFNEALHRDLADFRIQHPDLILLQYVDDLLLAATSELDCQQGTRALLQTLGNLGYRASAKKAQICQKQVKYLGYLLKEGQRWLTEARKETVMGQPTPKTPRQLREFLGTAGFCRLWIPGFAEMAAPLYPLTKPGTLFNWGPDQQKAYQEIKQALLTAPALGLPDLTKPFELFVDEKQGYAKGVLTQKLGPWRRPVAYLSKKLDPVAAGWPPCLRMVAAIAVLTKDAGKLTMGQPLVILAPHAVEALVKQPPDRWLSNARMTHYQALLLDTDRVQFGPVVALNPATLLPLPEEGLQHNCLDILAEAHGTRPDLTDQPLPDADHTWYTDGSSLLQEGQRKAGAAVTTETEVIWAKALPAGTSAQRAELIALTQALKMAEGKKLNVYTDSRYAFATAHIHGEIYRRRGWLTSEGKEIKNKDEILALLKALFLPKRLSIIHCPGHQKGHSAEARGNRMADQAARKAAITETPDTSTLLAGKRTADGSEFEKRTADGSEFESPKKKAKVE

SEQ ID NO: 3010 - protein, 2101 aa, synthetic construct
MPAAKRVKLDGGDKKYSIGLDIGTNSVGWAVITDEYKVPSKKFKVLGNTDRHSIKKNLIGALLFDSGETAEATRLKRTARRRYTRRKNRICYLQEIFSNEMAKVDDSFFHRLEESFLVEEDKKHERHPIFGNIVDEVAYHEKYPTIYHLRKKLVDSTDKADLRLIYLALAHMIKFRGHFLIEGDLNPDNSDVDKLFIQLVQTYNQLFEENPINASGVDAKAILSARLSKSRRLENLIAQLPGEKKNGLFGNLIALSLGLTPNFKSNFDLAEDAKLQLSKDTYDDDLDNLLAQIGDQYADLFLAAKNLSDAILLSDILRVNTEITKAPLSASMIKRYDEHHQDLTLLKALVRQQLPEKYKEIFFDQSKNGYAGYIDGGASQEEFYKFIKPILEKMDGTEELLVKLNREDLLRKQRTFDNGSIPHQIHLGELHAILRRQEDFYPFLKDNREKIEKILTFRIPYYVGPLARGNSRFAWMTRKSEETITPWNFEEVVDKGASAQSFIERMTNFDKNLPNEKVLPKHSLLYEYFTVYNELTKVKYVTEGMRKPAFLSGEQKKAIVDLLFKTNRKVTVKQLKEDYFKKIECFDSVEISGVEDRFNASLGTYHDLLKIIKDKDFLDNEENEDILEDIVLTLTLFEDREMIEERLKTYAHLFDDKVMKQLKRRRYTGWGRLSRKLINGIRDKQSGKTILDFLKSDGFANRNFMQLIHDDSLTFKEDIQKAQVSGQGDSLHEHIANLAGSPAIKKGILQTVKVVDELVKVMGRHKPENIVIEMARENQTTQKGQKNSRERMKRIEEGIKELGSQILKEHPVENTQLQNEKLYLYYLQNGRDMYVDQELDINRLSDYDVDHIVPQSFLKDDSIDNKVLTRSDKARGKSDNVPSEEVVKKMKNYWRQLLNAKLITQRKFDNLTKAERGGLSELDKAGFIKRQLVETRQITKHVAQILDSRMNTKYDENDKLIREVKVITLKSKLVSDFRKDFQFYKVREINNYHHAHDAYLNAVVGTALIKKYPKLESEFVYGDYKVYDVRKMIAKSEQEIGKATAKYFFYSNIMNFFKTEITLANGEIRKRPLIETNGETGEIVWDKGRDFATVRKVLSMPQVNIVKKTEVQTGGFSKESILPKRNSDKLIARKKDWDPKKYGGFDSPTVAYSVLVVAKVEKGKSKKLKSVKELLGITIMERSSFEKNPIDFLEAKGYKEVKKDLIIKLPKYSLFELENGRKRMLASAGELQKGNELALPSKYVNFLYLASHYEKLKGSPEDNEQKQLFVEQHKHYLDEIIEQISEFSKRVILADANLDKVLSAYNKHRDKPIREQAENIIHLFTLTNLGAPAAFKYFDTTIDRKRYTSTKEVLDATLIHQSITGLYETRIDLSQLGGDGGSGSETPGTSESATPESGGTLNIEDEHRLHETSKEPDVSLGSTWLSDFPQAWAETGGMGLAVRQAPLIIPLKATSTPVSIKQYPMSQEARLGIKPHIQRLLDQGILVPCQSPWNTPLLPVKKPGTNDYRPVQDLREVNKRVEDIHPTVPNPYNLLSGLPPSHQWYTVLDLKDAFFCLRLHPTSQPLFAFEWRDPEMGISGQLTWTRLPQGFKNSPTLFNEALHRDLADFRIQHPDLILLQYVDDLLLAATSELDCQQGTRALLQTLGNLGYRASAKKAQICQKQVKYLGYLLKEGQRWLTEARKETVMGQPTPKTPRQLREFLGTAGFCRLWIPGFAEMAAPLYPLTKPGTLFNWGPDQQKAYQEIKQALLTAPALGLPDLTKPFELFVDEKQGYAKGVLTQKLGPWRRPVAYLSKKLDPVAAGWPPCLRMVAAIAVLTKDAGKLTMGQPLVILAPHAVEALVKQPPDRWLSNARMTHYQALLLDTDRVQFGPVVALNPATLLPLPEEGLQHNCLDILAEAHGTRPDLTDQPLPDADHTWYTDGSSLLQEGQRKAGAAVTTETEVIWAKALPAGTSAQRAELIALTQALKMAEGKKLNVYTDSRYAFATAHIHGEIYRRRGWLTSEGKEIKNKDEILALLKALFLPKRLSIIHCPGHQKGHSAEARGNRMADQAARKAAITETPDTSTLLAGKRTADGSEFEKRTADGSEFESPKKKAKVE

SEQ ID NO: 3011 - protein, 2091 aa, synthetic construct
MPAAKRVKLDGGDKKYSIGLDIGTNSVGWAVITDEYKVPSKKFKVLGNTDRHSIKKNLIGALLFDSGETAEATRLKRTARRRYTRRKNRICYLQEIFSNEMAKVDDSFFHRLEESFLVEEDKKHERHPIFGNIVDEVAYHEKYPTIYHLRKKLVDSTDKADLRLIYLALAHMIKFRGHFLIEGDLNPDNSDVDKLFIQLVQTYNQLFEENPINASGVDAKAILSARLSKSRRLENLIAQLPGEKKNGLFGNLIALSLGLTPNFKSNFDLAEDAKLQLSKDTYDDDLDNLLAQIGDQYADLFLAAKNLSDAILLSDILRVNTEITKAPLSASMIKRYDEHHQDLTLLKALVRQQLPEKYKEIFFDQSKNGYAGYIDGGASQEEFYKFIKPILEKMDGTEELLVKLNREDLLRKQRTFDNGSIPHQIHLGELHAILRRQEDFYPFLKDNREKIEKILTFRIPYYVGPLARGNSRFAWMTRKSEETITPWNFEEVVDKGASAQSFIERMTNFDKNLPNEKVLPKHSLLYEYFTVYNELTKVKYVTEGMRKPAFLSGEQKKAIVDLLFKTNRKVTVKQLKEDYFKKIECFDSVEISGVEDRFNASLGTYHDLLKIIKDKDFLDNEENEDILEDIVLTLTLFEDREMIEERLKTYAHLFDDKVMKQLKRRRYTGWGRLSRKLINGIRDKQSGKTILDFLKSDGFANRNFMQLIHDDSLTFKEDIQKAQVSGQGDSLHEHIANLAGSPAIKKGILQTVKVVDELVKVMGRHKPENIVIEMARENQTTQKGQKNSRERMKRIEEGIKELGSQILKEHPVENTQLQNEKLYLYYLQNGRDMYVDQELDINRLSDYDVDHIVPQSFLKDDSIDNKVLTRSDKARGKSDNVPSEEVVKKMKNYWRQLLNAKLITQRKFDNLTKAERGGLSELDKAGFIKRQLVETRQITKHVAQILDSRMNTKYDENDKLIREVKVITLKSKLVSDFRKDFQFYKVREINNYHHAHDAYLNAVVGTALIKKYPKLESEFVYGDYKVYDVRKMIAKSEQEIGKATAKYFFYSNIMNFFKTEITLANGEIRKRPLIETNGETGEIVWDKGRDFATVRKVLSMPQVNIVKKTEVQTGGFSKESILPKRNSDKLIARKKDWDPKKYGGFDSPTVAYSVLVVAKVEKGKSKKLKSVKELLGITIMERSSFEKNPIDFLEAKGYKEVKKDLIIKLPKYSLFELENGRKRMLASAGELQKGNELALPSKYVNFLYLASHYEKLKGSPEDNEQKQLFVEQHKHYLDEIIEQISEFSKRVILADANLDKVLSAYNKHRDKPIREQAENIIHLFTLTNLGAPAAFKYFDTTIDRKRYTSTKEVLDATLIHQSITGLYETRIDLSQLGGDGGGGSGSSGGTLNIEDEHRLHETSKEPDVSLGSTWLSDFPQAWAETGGMGLAVRQAPLIIPLKATSTPVSIKQYPMSQEARLGIKPHIQRLLDQGILVPCQSPWNTPLLPVKKPGTNDYRPVQDLREVNKRVEDIHPTVPNPYNLLSGLPPSHQWYTVLDLKDAFFCLRLHPTSQPLFAFEWRDPEMGISGQLTWTRLPQGFKNSPTLFNEALHRDLADFRIQHPDLILLQYVDDLLLAATSELDCQQGTRALLQTLGNLGYRASAKKAQICQKQVKYLGYLLKEGQRWLTEARKETVMGQPTPKTPRQLREFLGTAGFCRLWIPGFAEMAAPLYPLTKPGTLFNWGPDQQKAYQEIKQALLTAPALGLPDLTKPFELFVDEKQGYAKGVLTQKLGPWRRPVAYLSKKLDPVAAGWPPCLRMVAAIAVLTKDAGKLTMGQPLVILAPHAVEALVKQPPDRWLSNARMTHYQALLLDTDRVQFGPVVALNPATLLPLPEEGLQHNCLDILAEAHGTRPDLTDQPLPDADHTWYTDGSSLLQEGQRKAGAAVTTETEVIWAKALPAGTSAQRAELIALTQALKMAEGKKLNVYTDSRYAFATAHIHGEIYRRRGWLTSEGKEIKNKDEILALLKALFLPKRLSIIHCPGHQKGHSAEARGNRMADQAARKAAITETPDTSTLLAGKRTADGSEFEKRTADGSEFESPKKKAKVE

SEQ ID NO: 3012 - protein, 2096 aa, synthetic construct; identical to SEQ ID NO: 2758

SEQ ID NO: 3013 - protein, 2094 aa, synthetic construct
MPAAKRVKLDGGDKKYSIGLDIGTNSVGWAVITDEYKVPSKKFKVLGNTDRHSIKKNLIGALLFDSGETAEATRLKRTARRRYTRRKNRICYLQEIFSNEMAKVDDSFFHRLEESFLVEEDKKHERHPIFGNIVDEVAYHEKYPTIYHLRKKLVDSTDKADLRLIYLALAHMIKFRGHFLIEGDLNPDNSDVDKLFIQLVQTYNQLFEENPINASGVDAKAILSARLSKSRRLENLIAQLPGEKKNGLFGNLIALSLGLTPNFKSNFDLAEDAKLQLSKDTYDDDLDNLLAQIGDQYADLFLAAKNLSDAILLSDILRVNTEITKAPLSASMIKRYDEHHQDLTLLKALVRQQLPEKYKEIFFDQSKNGYAGYIDGGASQEEFYKFIKPILEKMDGTEELLVKLNREDLLRKQRTFDNGSIPHQIHLGELHAILRRQEDFYPFLKDNREKIEKILTFRIPYYVGPLARGNSRFAWMTRKSEETITPWNFEEVVDKGASAQSFIERMTNFDKNLPNEKVLPKHSLLYEYFTVYNELTKVKYVTEGMRKPAFLSGEQKKAIVDLLFKTNRKVTVKQLKEDYFKKIECFDSVEISGVEDRFNASLGTYHDLLKIIKDKDFLDNEENEDILEDIVLTLTLFEDREMIEERLKTYAHLFDDKVMKQLKRRRYTGWGRLSRKLINGIRDKQSGKTILDFLKSDGFANRNFMQLIHDDSLTFKEDIQKAQVSGQGDSLHEHIANLAGSPAIKKGILQTVKVVDELVKVMGRHKPENIVIEMARENQTTQKGQKNSRERMKRIEEGIKELGSQILKEHPVENTQLQNEKLYLYYLQNGRDMYVDQELDINRLSDYDVDHIVPQSFLKDDSIDNKVLTRSDKARGKSDNVPSEEVVKKMKNYWRQLLNAKLITQRKFDNLTKAERGGLSELDKAGFIKRQLVETRQITKHVAQILDSRMNTKYDENDKLIREVKVITLKSKLVSDFRKDFQFYKVREINNYHHAHDAYLNAVVGTALIKKYPKLESEFVYGDYKVYDVRKMIAKSEQEIGKATAKYFFYSNIMNFFKTEITLANGEIRKRPLIETNGETGEIVWDKGRDFATVRKVLSMPQVNIVKKTEVQTGGFSKESILPKRNSDKLIARKKDWDPKKYGGFDSPTVAYSVLVVAKVEKGKSKKLKSVKELLGITIMERSSFEKNPIDFLEAKGYKEVKKDLIIKLPKYSLFELENGRKRMLASAGELQKGNELALPSKYVNFLYLASHYEKLKGSPEDNEQKQLFVEQHKHYLDEIIEQISEFSKRVILADANLDKVLSAYNKHRDKPIREQAENIIHLFTLTNLGAPAAFKYFDTTIDRKRYTSTKEVLDATLIHQSITGLYETRIDLSQLGGDGGPAPGGSGGGGGTLNIEDEHRLHETSKEPDVSLGSTWLSDFPQAWAETGGMGLAVRQAPLIIPLKATSTPVSIKQYPMSQEARLGIKPHIQRLLDQGILVPCQSPWNTPLLPVKKPGTNDYRPVQDLREVNKRVEDIHPTVPNPYNLLSGLPPSHQWYTVLDLKDAFFCLRLHPTSQPLFAFEWRDPEMGISGQLTWTRLPQGFKNSPTLFNEALHRDLADFRIQHPDLILLQYVDDLLLAATSELDCQQGTRALLQTLGNLGYRASAKKAQICQKQVKYLGYLLKEGQRWLTEARKETVMGQPTPKTPRQLREFLGTAGFCRLWIPGFAEMAAPLYPLTKPGTLFNWGPDQQKAYQEIKQALLTAPALGLPDLTKPFELFVDEKQGYAKGVLTQKLGPWRRPVAYLSKKLDPVAAGWPPCLRMVAAIAVLTKDAGKLTMGQPLVILAPHAVEALVKQPPDRWLSNARMTHYQALLLDTDRVQFGPVVALNPATLLPLPEEGLQHNCLDILAEAHGTRPDLTDQPLPDADHTWYTDGSSLLQEGQRKAGAAVTTETEVIWAKALPAGTSAQRAELIALTQALKMAEGKKLNVYTDSRYAFATAHIHGEIYRRRGWLTSEGKEIKNKDEILALLKALFLPKRLSIIHCPGHQKGHSAEARGNRMADQAARKAAITETPDTSTLLAGKRTADGSEFEKRTADGSEFESPKKKAKVE

SEQ ID NO: 3014 - protein, 2096 aa, synthetic construct; identical to SEQ ID NO: 2714

SEQ ID NO: 3015 - protein, 2093 aa, synthetic construct; identical to SEQ ID NO: 2718

SEQ ID NO: 3016 - protein, 2094 aa, synthetic construct; identical to SEQ ID NO: 2762

SEQ ID NO: 3017 - protein, 2095 aa, synthetic construct; identical to SEQ ID NO: 2749

SEQ ID NO: 3018 - protein, 2096 aa, synthetic construct; identical to SEQ ID NO: 2721

SEQ ID NO: 3019 - protein, 2096 aa, synthetic construct; identical to SEQ ID NO: 2747

SEQ ID NO: 3020 - protein, 2096 aa, synthetic construct; identical to SEQ ID NO: 2755

SEQ ID NO: 3021 - protein, 2096 aa, synthetic construct
MPAAKRVKLDGGDKKYSIGLDIGTNSVGWAVITDEYKVPSKKFKVLGNTDRHSIKKNLIGALLFDSGETAEATRLKRTARRRYTRRKNRICYLQEIFSNEMAKVDDSFFHRLEESFLVEEDKKHERHPIFGNIVDEVAYHEKYPTIYHLRKKLVDSTDKADLRLIYLALAHMIKFRGHFLIEGDLNPDNSDVDKLFIQLVQTYNQLFEENPINASGVDAKAILSARLSKSRRLENLIAQLPGEKKNGLFGNLIALSLGLTPNFKSNFDLAEDAKLQLSKDTYDDDLDNLLAQIGDQYADLFLAAKNLSDAILLSDILRVNTEITKAPLSASMIKRYDEHHQDLTLLKALVRQQLPEKYKEIFFDQSKNGYAGYIDGGASQEEFYKFIKPILEKMDGTEELLVKLNREDLLRKQRTFDNGSIPHQIHLGELHAILRRQEDFYPFLKDNREKIEKILTFRIPYYVGPLARGNSRFAWMTRKSEETITPWNFEEVVDKGASAQSFIERMTNFDKNLPNEKVLPKHSLLYEYFTVYNELTKVKYVTEGMRKPAFLSGEQKKAIVDLLFKTNRKVTVKQLKEDYFKKIECFDSVEISGVEDRFNASLGTYHDLLKIIKDKDFLDNEENEDILEDIVLTLTLFEDREMIEERLKTYAHLFDDKVMKQLKRRRYTGWGRLSRKLINGIRDKQSGKTILDFLKSDGFANRNFMQLIHDDSLTFKEDIQKAQVSGQGDSLHEHIANLAGSPAIKKGILQTVKVVDELVKVMGRHKPENIVIEMARENQTTQKGQKNSRERMKRIEEGIKELGSQILKEHPVENTQLQNEKLYLYYLQNGRDMYVDQELDINRLSDYDVDHIVPQSFLKDDSIDNKVLTRSDKARGKSDNVPSEEVVKKMKNYWRQLLNAKLITQRKFDNLTKAERGGLSELDKAGFIKRQLVETRQITKHVAQILDSRMNTKYDENDKLIREVKVITLKSKLVSDFRKDFQFYKVREINNYHHAHDAYLNAVVGTALIKKYPKLESEFVYGDYKVYDVRKMIAKSEQEIGKATAKYFFYSNIMNFFKTEITLANGEIRKRPLIETNGETGEIVWDKGRDFATVRKVLSMPQVNIVKKTEVQTGGFSKESILPKRNSDKLIARKKDWDPKKYGGFDSPTVAYSVLVVAKVEKGKSKKLKSVKELLGITIMERSSFEKNPIDFLEAKGYKEVKKDLIIKLPKYSLFELENGRKRMLASAGELQKGNELALPSKYVNFLYLASHYEKLKGSPEDNEQKQLFVEQHKHYLDEIIEQISEFSKRVILADANLDKVLSAYNKHRDKPIREQAENIIHLFTLTNLGAPAAFKYFDTTIDRKRYTSTKEVLDATLIHQSITGLYETRIDLSQLGGDGGEAAAKGSSGGSGGTLNIEDEHRLHETSKEPDVSLGSTWLSDFPQAWAETGGMGLAVRQAPLIIPLKATSTPVSIKQYPMSQEARLGIKPHIQRLLDQGILVPCQSPWNTPLLPVKKPGTNDYRPVQDLREVNKRVEDIHPTVPNPYNLLSGLPPSHQWYTVLDLKDAFFCLRLHPTSQPLFAFEWRDPEMGISGQLTWTRLPQGFKNSPTLFNEALHRDLADFRIQHPDLILLQYVDDLLLAATSELDCQQGTRALLQTLGNLGYRASAKKAQICQKQVKYLGYLLKEGQRWLTEARKETVMGQPTPKTPRQLREFLGTAGFCRLWIPGFAEMAAPLYPLTKPGTLFNWGPDQQKAYQEIKQALLTAPALGLPDLTKPFELFVDEKQGYAKGVLTQKLGPWRRPVAYLSKKLDPVAAGWPPCLRMVAAIAVLTKDAGKLTMGQPLVILAPHAVEALVKQPPDRWLSNARMTHYQALLLDTDRVQFGPVVALNPATLLPLPEEGLQHNCLDILAEAHGTRPDLTDQPLPDADHTWYTDGSSLLQEGQRKAGAAVTTETEVIWAKALPAGTSAQRAELIALTQALKMAEGKKLNVYTDSRYAFATAHIHGEIYRRRGWLTSEGKEIKNKDEILALLKALFLPKRLSIIHCPGHQKGHSAEARGNRMADQAARKAAITETPDTSTLLAGKRTADGSEFEKRTADGSEFESPKKKAKVE

SEQ ID NO: 3022 - protein, 2094 aa, synthetic construct
MPAAKRVKLDGGDKKYSIGLDIGTNSVGWAVITDEYKVPSKKFKVLGNTDRHSIKKNLIGALLFDSGETAEATRLKRTARRRYTRRKNRICYLQEIFSNEMAKVDDSFFHRLEESFLVEEDKKHERHPIFGNIVDEVAYHEKYPTIYHLRKKLVDSTDKADLRLIYLALAHMIKFRGHFLIEGDLNPDNSDVDKLFIQLVQTYNQLFEENPINASGVDAKAILSARLSKSRRLENLIAQLPGEKKNGLFGNLIALSLGLTPNFKSNFDLAEDAKLQLSKDTYDDDLDNLLAQIGDQYADLFLAAKNLSDAILLSDILRVNTEITKAPLSASMIKRYDEHHQDLTLLKALVRQQLPEKYKEIFFDQSKNGYAGYIDGGASQEEFYKFIKPILEKMDGTEELLVKLNREDLLRKQRTFDNGSIPHQIHLGELHAILRRQEDFYPFLKDNREKIEKILTFRIPYYVGPLARGNSRFAWMTRKSEETITPWNFEEVVDKGASAQSFIERMTNFDKNLPNEKVLPKHSLLYEYFTVYNELTKVKYVTEGMRKPAFLSGEQKKAIVDLLFKTNRKVTVKQLKEDYFKKIECFDSVEISGVEDRFNASLGTYHDLLKIIKDKDFLDNEENEDILEDIVLTLTLFEDREMIEERLKTYAHLFDDKVMKQLKRRRYTGWGRLSRKLINGIRDKQSGKTILDFLKSDGFANRNFMQLIHDDSLTFKEDIQKAQVSGQGDSLHEHIANLAGSPAIKKGILQTVKVVDELVKVMGRHKPENIVIEMARENQTTQKGQKNSRERMKRIEEGIKELGSQILKEHPVENTQLQNEKLYLYYLQNGRDMYVDQELDINRLSDYDVDHIVPQSFLKDDSIDNKVLTRSDKARGKSDNVPSEEVVKKMKNYWRQLLNAKLITQRKFDNLTKAERGGLSELDKAGFIKRQLVETRQITKHVAQILDSRMNTKYDENDKLIREVKVITLKSKLVSDFRKDFQFYKVREINNYHHAHDAYLNAVVGTALIKKYPKLESEFVYGDYKVYDVRKMIAKSEQEIGKATAKYFFYSNIMNFFKTEITLANGEIRKRPLIETNGETGEIVWDKGRDFATVRKVLSMPQVNIVKKTEVQTGGFSKESILPKRNSDKLIARKKDWDPKKYGGFDSPTVAYSVLVVAKVEKGKSKKLKSVKELLGITIMERSSFEKNPIDFLEAKGYKEVKKDLIIKLPKYSLFELENGRKRMLASAGELQKGNELALPSKYVNFLYLASHYEKLKGSPEDNEQKQLFVEQHKHYLDEIIEQISEFSKRVILADANLDKVLSAYNKHRDKPIREQAENIIHLFTLTNLGAPAAFKYFDTTIDRKRYTSTKEVLDATLIHQSITGLYETRIDLSQLGGDGGGGGGSSGGSGGTLNIEDEHRLHETSKEPDVSLGSTWLSDFPQAWAETGGMGLAVRQAPLIIPLKATSTPVSIKQYPMSQEARLGIKPHIQRLLDQGILVPCQSPWNTPLLPVKKPGTNDYRPVQDLREVNKRVEDIHPTVPNPYNLLSGLPPSHQWYTVLDLKDAFFCLRLHPTSQPLFAFEWRDPEMGISGQLTWTRLPQGFKNSPTLFNEALHRDLADFRIQHPDLILLQYVDDLLLAATSELDCQQGTRALLQTLGNLGYRASAKKAQICQKQVKYLGYLLKEGQRWLTEARKETVMGQPTPKTPRQLREFLGTAGFCRLWIPGFAEMAAPLYPLTKPGTLFNWGPDQQKAYQEIKQALLTAPALGLPDLTKPFELFVDEKQGYAKGVLTQKLGPWRRPVAYLSKKLDPVAAGWPPCLRMVAAIAVLTKDAGKLTMGQPLVILAPHAVEALVKQPPDRWLSNARMTHYQALLLDTDRVQFGPVVALNPATLLPLPEEGLQHNCLDILAEAHGTRPDLTDQPLPDADHTWYTDGSSLLQEGQRKAGAAVTTETEVIWAKALPAGTSAQRAELIALTQALKMAEGKKLNVYTDSRYAFATAHIHGEIYRRRGWLTSEGKEIKNKDEILALLKALFLPKRLSIIHCPGHQKGHSAEARGNRMADQAARKAAITETPDTSTLLAGKRTADGSEFEKRTADGSEFESPKKKAKVE

SEQ ID NO: 3023 - protein, 2096 aa, synthetic construct; identical to SEQ ID NO: 2759

SEQ ID NO: 3024 - protein, 2092 aa, synthetic construct
MPAAKRVKLDGGDKKYSIGLDIGTNSVGWAVITDEYKVPSKKFKVLGNTDRHSIKKNLIGALLFDSGETAEATRLKRTARRRYTRRKNRICYLQEIFSNEMAKVDDSFFHRLEESFLVEEDKKHERHPIFGNIVDEVAYHEKYPTIYHLRKKLVDSTDKADLRLIYLALAHMIKFRGHFLIEGDLNPDNSDVDKLFIQLVQTYNQLFEENPINASGVDAKAILSARLSKSRRLENLIAQLPGEKKNGLFGNLIALSLGLTPNFKSNFDLAEDAKLQLSKDTYDDDLDNLLAQIGDQYADLFLAAKNLSDAILLSDILRVNTEITKAPLSASMIKRYDEHHQDLTLLKALVRQQLPEKYKEIFFDQSKNGYAGYIDGGASQEEFYKFIKPILEKMDGTEELLVKLNREDLLRKQRTFDNGSIPHQIHLGELHAILRRQEDFYPFLKDNREKIEKILTFRIPYYVGPLARGNSRFAWMTRKSEETITPWNFEEVVDKGASAQSFIERMTNFDKNLPNEKVLPKHSLLYEYFTVYNELTKVKYVTEGMRKPAFLSGEQKKAIVDLLFKTNRKVTVKQLKEDYFKKIECFDSVEISGVEDRFNASLGTYHDLLKIIKDKDFLDNEENEDILEDIVLTLTLFEDREMIEERLKTYAHLFDDKVMKQLKRRRYTGWGRLSRKLINGIRDKQSGKTILDFLKSDGFANRNFMQLIHDDSLTFKEDIQKAQVSGQGDSLHEHIANLAGSPAIKKGILQTVKVVDELVKVMGRHKPENIVIEMARENQTTQKGQKNSRERMKRIEEGIKELGSQILKEHPVENTQLQNEKLYLYYLQNGRDMYVDQELDINRLSDYDVDHIVPQSFLKDDSIDNKVLTRSDKARGKSDNVPSEEVVKKMKNYWRQLLNAKLITQRKFDNLTKAERGGLSELDKAGFIKRQLVETRQITKHVAQILDSRMNTKYDENDKLIREVKVITLKSKLVSDFRKDFQFYKVREINNYHHAHDAYLNAVVGTALIKKYPKLESEFVYGDYKVYDVRKMIAKSEQEIGKATAKYFFYSNIMNFFKTEITLANGEIRKRPLIETNGETGEIVWDKGRDFATVRKVLSMPQVNIVKKTEVQTGGFSKESILPKRNSDKLIARKKDWDPKKYGGFDSPTVAYSVLVVAKVEKGKSKKLKSVKELLGITIMERSSFEKNPIDFLEAKGYKEVKKDLIIKLPKYSLFELENGRKRMLASAGELQKGNELALPSKYVNFLYLASHYEKLKGSPEDNEQKQLFVEQHKHYLDEIIEQISEFSKRVILADANLDKVLSAYNKHRDKPIREQAENIIHLFTLTNLGAPAAFKYFDTTIDRKRYTSTKEVLDATLIHQSITGLYETRIDLSQLGGDGGGGGGGGGGGTLNIEDEHRLHETSKEPDVSLGSTWLSDFPQAWAETGGMGLAVRQAPLIIPLKATSTPVSIKQYPMSQEARLGIKPHIQRLLDQGILVPCQSPWNTPLLPVKKPGTNDYRPVQDLREVNKRVEDIHPTVPNPYNLLSGLPPSHQWYTVLDLKDAFFCLRLHPTSQPLFAFEWRDPEMGISGQLTWTRLPQGFKNSPTLFNEALHRDLADFRIQHPDLILLQYVDDLLLAATSELDCQQGTRALLQTLGNLGYRASAKKAQICQKQVKYLGYLLKEGQRWLTEARKETVMGQPTPKTPRQLREFLGTAGFCRLWIPGFAEMAAPLYPLTKPGTLFNWGPDQQKAYQEIKQALLTAPALGLPDLTKPFELFVDEKQGYAKGVLTQKLGPWRRPVAYLSKKLDPVAAGWPPCLRMVAAIAVLTKDAGKLTMGQPLVILAPHAVEALVKQPPDRWLSNARMTHYQALLLDTDRVQFGPVVALNPATLLPLPEEGLQHNCLDILAEAHGTRPDLTDQPLPDADHTWYTDGSSLLQEGQRKAGAAVTTETEVIWAKALPAGTSAQRAELIALTQALKMAEGKKLNVYTDSRYAFATAHIHGEIYRRRGWLTSEGKEIKNKDEILALLKALFLPKRLSIIHCPGHQKGHSAEARGNRMADQAARKAAITETPDTSTLLAGKRTADGSEFEKRTADGSEFESPKKKAKVE

SEQ ID NO: 3025 - protein, 2094 aa, synthetic construct; identical to SEQ ID NO: 2742

SEQ ID NO: 3026 - protein, 2094 aa, synthetic construct; identical to SEQ ID NO: 2715

SEQ ID NO: 3027 - protein, 2097 aa, synthetic construct; identical to SEQ ID NO: 2728

SEQ ID NO: 3028 - protein, 2091 aa, synthetic construct; identical to SEQ ID NO: 2743

SEQ ID NO: 3029 - protein, 2090 aa, synthetic construct
MPAAKRVKLDGGDKKYSIGLDIGTNSVGWAVITDEYKVPSKKFKVLGNTDRHSIKKNLIGALLFDSGETAEATRLKRTARRRYTRRKNRICYLQEIFSNEMAKVDDSFFHRLEESFLVEEDKKHERHPIFGNIVDEVAYHEKYPTIYHLRKKLVDSTDKADLRLIYLALAHMIKFRGHFLIEGDLNPDNSDVDKLFIQLVQTYNQLFEENPINASGVDAKAILSARLSKSRRLENLIAQLPGEKKNGLFGNLIALSLGLTPNFKSNFDLAEDAKLQLSKDTYDDDLDNLLAQIGDQYADLFLAAKNLSDAILLSDILRVNTEITKAPLSASMIKRYDEHHQDLTLLKALVRQQLPEKYKEIFFDQSKNGYAGYIDGGASQEEFYKFIKPILEKMDGTEELLVKLNREDLLRKQRTFDNGSIPHQIHLGELHAILRRQEDFYPFLKDNREKIEKILTFRIPYYVGPLARGNSRFAWMTRKSEETITPWNFEEVVDKGASAQSFIERMTNFDKNLPNEKVLPKHSLLYEYFTVYNELTKVKYVTEGMRKPAFLSGEQKKAIVDLLFKTNRKVTVKQLKEDYFKKIECFDSVEISGVEDRFNASLGTYHDLLKIIKDKDFLDNEENEDILEDIVLTLTLFEDREMIEERLKTYAHLFDDKVMKQLKRRRYTGWGRLSRKLINGIRDKQSGKTILDFLKSDGFANRNFMQLIHDDSLTFKEDIQKAQVSGQGDSLHEHIANLAGSPAIKKGILQTVKVVDELVKVMGRHKPENIVIEMARENQTTQKGQKNSRERMKRIEEGIKELGSQILKEHPVENTQLQNEKLYLYYLQNGRDMYVDQELDINRLSDYDVDHIVPQSFLKDDSIDNKVLTRSDKARGKSDNVPSEEVVKKMKNYWRQLLNAKLITQRKFDNLTKAERGGLSELDKAGFIKRQLVETRQITKHVAQILDSRMNTKYDENDKLIREVKVITLKSKLVSDFRKDFQFYKVREINNYHHAHDAYLNAVVGTALIKKYPKLESEFVYGDYKVYDVRKMIAKSEQEIGKATAKYFFYSNIMNFFKTEITLANGEIRKRPLIETNGETGEIVWDKGRDFATVRKVLSMPQVNIVKKTEVQTGGFSKESILPKRNSDKLIARKKDWDPKKYGGFDSPTVAYSVLVVAKVEKGKSKKLKSVKELLGITIMERSSFEKNPIDFLEAKGYKEVKKDLIIKLPKYSLFELENGRKRMLASAGELQKGNELALPSKYVNFLYLASHYEKLKGSPEDNEQKQLFVEQHKHYLDEIIEQISEFSKRVILADANLDKVLSAYNKHRDKPIREQAENIIHLFTLTNLGAPAAFKYFDTTIDRKRYTSTKEVLDATLIHQSITGLYETRIDLSQLGGDGGPAPAPGGTLNIEDEHRLHETSKEPDVSLGSTWLSDFPQAWAETGGMGLAVRQAPLIIPLKATSTPVSIKQYPMSQEARLGIKPHIQRLLDQGILVPCQSPWNTPLLPVKKPGTNDYRPVQDLREVNKRVEDIHPTVPNPYNLLSGLPPSHQWYTVLDLKDAFFCLRLHPTSQPLFAFEWRDPEMGISGQLTWTRLPQGFKNSPTLFNEALHRDLADFRIQHPDLILLQYVDDLLLAATSELDCQQGTRALLQTLGNLGYRASAKKAQICQKQVKYLGYLLKEGQRWLTEARKETVMGQPTPKTPRQLREFLGTAGFCRLWIPGFAEMAAPLYPLTKPGTLFNWGPDQQKAYQEIKQALLTAPALGLPDLTKPFELFVDEKQGYAKGVLTQKLGPWRRPVAYLSKKLDPVAAGWPPCLRMVAAIAVLTKDAGKLTMGQPLVILAPHAVEALVKQPPDRWLSNARMTHYQALLLDTDRVQFGPVVALNPATLLPLPEEGLQHNCLDILAEAHGTRPDLTDQPLPDADHTWYTDGSSLLQEGQRKAGAAVTTETEVIWAKALPAGTSAQRAELIALTQALKMAEGKKLNVYTDSRYAFATAHIHGEIYRRRGWLTSEGKEIKNKDEILALLKALFLPKRLSIIHCPGHQKGHSAEARGNRMADQAARKAAITETPDTSTLLAGKRTADGSEFEKRTADGSEFESPKKKAKVE

SEQ ID NO: 3030 - protein, 2091 aa, synthetic construct; identical to SEQ ID NO: 2750

SEQ ID NO: 3031 - protein, 2094 aa, synthetic construct; identical to SEQ ID NO: 2768

SEQ ID NO: 3032 - protein, 2094 aa, synthetic construct; identical to SEQ ID NO: 2770

SEQ ID NO: 3033 - protein, 2091 aa, synthetic construct; identical to SEQ ID NO: 2779

SEQ ID NO: 3034 - protein, 2093 aa, synthetic construct; identical to SEQ ID NO: 2774

SEQ ID NO: 3035 - protein, 2103 aa, synthetic construct
MPAAKRVKLDGGDKKYSIGLDIGTNSVGWAVITDEYKVPSKKFKVLGNTDRHSIKKNLIGALLFDSGETAEATRLKRTARRRYTRRKNRICYLQEIFSNEMAKVDDSFFHRLEESFLVEEDKKHERHPIFGNIVDEVAYHEKYPTIYHLRKKLVDSTDKADLRLIYLALAHMIKFRGHFLIEGDLNPDNSDVDKLFIQLVQTYNQLFEENPINASGVDAKAILSARLSKSRRLENLIAQLPGEKKNGLFGNLIALSLGLTPNFKSNFDLAEDAKLQLSKDTYDDDLDNLLAQIGDQYADLFLAAKNLSDAILLSDILRVNTEITKAPLSASMIKRYDEHHQDLTLLKALVRQQLPEKYKEIFFDQSKNGYAGYIDGGASQEEFYKFIKPILEKMDGTEELLVKLNREDLLRKQRTFDNGSIPHQIHLGELHAILRRQEDFYPFLKDNREKIEKILTFRIPYYVGPLARGNSRFAWMTRKSEETITPWNFEEVVDKGASAQSFIERMTNFDKNLPNEKVLPKHSLLYEYFTVYNELTKVKYVTEGMRKPAFLSGEQKKAIVDLLFKTNRKVTVKQLKEDYFKKIECFDSVEISGVEDRFNASLGTYHDLLKIIKDKDFLDNEENEDILEDIVLTLTLFEDREMIEERLKTYAHLFDDKVMKQLKRRRYTGWGRLSRKLINGIRDKQSGKTILDFLKSDGFANRNFMQLIHDDSLTFKEDIQKAQVSGQGDSLHEHIANLAGSPAIKKGILQTVKVVDELVKVMGRHKPENIVIEMARENQTTQKGQKNSRERMKRIEEGIKELGSQILKEHPVENTQLQNEKLYLYYLQNGRDMYVDQELDINRLSDYDVDHIVPQSFLKDDSIDNKVLTRSDKARGKSDNVPSEEVVKKMKNYWRQLLNAKLITQRKFDNLTKAERGGLSELDKAGFIKRQLVETRQITKHVAQILDSRMNTKYDENDKLIREVKVITLKSKLVSDFRKDFQFYKVREINNYHHAHDAYLNAVVGTALIKKYPKLESEFVYGDYKVYDVRKMIAKSEQEIGKATAKYFFYSNIMNFFKTEITLANGEIRKRPLIETNGETGEIVWDKGRDFATVRKVLSMPQVNIVKKTEVQTGGFSKESILPKRNSDKLIARKKDWDPKKYGGFDSPTVAYSVLVVAKVEKGKSKKLKSVKELLGITIMERSSFEKNPIDFLEAKGYKEVKKDLIIKLPKYSLFELENGRKRMLASAGELQKGNELALPSKYVNFLYLASHYEKLKGSPEDNEQKQLFVEQHKHYLDEIIEQISEFSKRVILADANLDKVLSAYNKHRDKPIREQAENIIHLFTLTNLGAPAAFKYFDTTIDRKRYTSTKEVLDATLIHQSITGLYETRIDLSQLGGDGGGGSGGSGGSGGSGGSGGSGGTLNIEDEHRLHETSKEPDVSLGSTWLSDFPQAWAETGGMGLAVRQAPLIIPLKATSTPVSIKQYPMSQEARLGIKPHIQRLLDQGILVPCQSPWNTPLLPVKKPGTNDYRPVQDLREVNKRVEDIHPTVPNPYNLLSGLPPSHQWYTVLDLKDAFFCLRLHPTSQPLFAFEWRDPEMGISGQLTWTRLPQGFKNSPTLFNEALHRDLADFRIQHPDLILLQYVDDLLLAATSELDCQQGTRALLQTLGNLGYRASAKKAQICQKQVKYLGYLLKEGQRWLTEARKETVMGQPTPKTPRQLREFLGKAGFCRLFIPGFAEMAAPLYPLTKPGTLFNWGPDQQKAYQEIKQALLTAPALGLPDLTKPFELFVDEKQGYAKGVLTQKLGPWRRPVAYLSKKLDPVAAGWPPCLRMVAAIAVLTKDAGKLTMGQPLVILAPHAVEALVKQPPDRWLSNARMTHYQALLLDTDRVQFGPVVALNPATLLPLPEEGLQHNCLDILAEAHGTRPDLTDQPLPDADHTWYTDGSSLLQEGQRKAGAAVTTETEVIWAKALPAGTSAQRAELIALTQALKMAEGKKLNVYTDSRYAFATAHIHGEIYRRRGWLTSEGKEIKNKDEILALLKALFLPKRLSIIHCPGHQKGHSAEARGNRMADQAARKAAITETPDTSTLLAGKRTADGSEFEKRTADGSEFESPKKKAKVE

SEQ ID NO: 3036 - protein, 2105 aa, synthetic construct; identical to SEQ ID NO: 2844

SEQ ID NO: 3037 - protein, 2088 aa, synthetic construct; identical to SEQ ID NO: 2812

SEQ ID NO: 3038 - protein, 2103 aa, synthetic construct; identical to SEQ ID NO: 2816

SEQ ID NO: 3039 - protein, 2097 aa, synthetic construct; identical to SEQ ID NO: 2795

SEQ ID NO: 3040 - protein, 2096 aa, synthetic construct; identical to SEQ ID NO: 2831

SEQ ID NO: 3041 - protein, 2095 aa, synthetic construct; identical to SEQ ID NO: 2845

SEQ ID NO: 3042 - protein, 2094 aa, synthetic construct; identical to SEQ ID NO: 2818

SEQ ID NO: 3043 - protein, 2110 aa, synthetic construct; identical to SEQ ID NO: 2803

SEQ ID NO: 3044 - protein, 2091 aa, synthetic construct
MPAAKRVKLDGGDKKYSIGLDIGTNSVGWAVITDEYKVPSKKFKVLGNTDRHSIKKNLIGALLFDSGETAEATRLKRTARRRYTRRKNRICYLQEIFSNEMAKVDDSFFHRLEESFLVEEDKKHERHPIFGNIVDEVAYHEKYPTIYHLRKKLVDSTDKADLRLIYLALAHMIKFRGHFLIEGDLNPDNSDVDKLFIQLVQTYNQLFEENPINASGVDAKAILSARLSKSRRLENLIAQLPGEKKNGLFGNLIALSLGLTPNFKSNFDLAEDAKLQLSKDTYDDDLDNLLAQIGDQYADLFLAAKNLSDAILLSDILRVNTEITKAPLSASMIKRYDEHHQDLTLLKALVRQQLPEKYKEIFFDQSKNGYAGYIDGGASQEEFYKFIKPILEKMDGTEELLVKLNREDLLRKQRTFDNGSIPHQIHLGELHAILRRQEDFYPFLKDNREKIEKILTFRIPYYVGPLARGNSRFAWMTRKSEETITPWNFEEVVDKGASAQSFIERMTNFDKNLPNEKVLPKHSLLYEYFTVYNELTKVKYVTEGMRKPAFLSGEQKKAIVDLLFKTNRKVTVKQLKEDYFKKIECFDSVEISGVEDRFNASLGTYHDLLKIIKDKDFLDNEENEDILEDIVLTLTLFEDREMIEERLKTYAHLFDDKVMKQLKRRRYTGWGRLSRKLINGIRDKQSGKTILDFLKSDGFANRNFMQLIHDDSLTFKEDIQKAQVSGQGDSLHEHIANLAGSPAIKKGILQTVKVVDELVKVMGRHKPENIVIEMARENQTTQKGQKNSRERMKRIEEGIKELGSQILKEHPVENTQLQNEKLYLYYLQNGRDMYVDQELDINRLSDYDVDHIVPQSFLKDDSIDNKVLTRSDKARGKSDNVPSEEVVKKMKNYWRQLLNAKLITQRKFDNLTKAERGGLSELDKAGFIKRQLVETRQITKHVAQILDSRMNTKYDENDKLIREVKVITLKSKLVSDFRKDFQFYKVREINNYHHAHDAYLNAVVGTALIKKYPKLESEFVYGDYKVYDVRKMIAKSEQEIGKATAKYFFYSNIMNFFKTEITLANGEIRKRPLIETNGETGEIVWDKGRDFATVRKVLSMPQVNIVKKTEVQTGGFSKESILPKRNSDKLIARKKDWDPKKYGGFDSPTVAYSVLVVAKVEKGKSKKLKSVKELLGITIMERSSFEKNPIDFLEAKGYKEVKKDLIIKLPKYSLFELENGRKRMLASAGELQKGNELALPSKYVNFLYLASHYEKLKGSPEDNEQKQLFVEQHKHYLDEIIEQISEFSKRVILADANLDKVLSAYNKHRDKPIREQAENIIHLFTLTNLGAPAAFKYFDTTIDRKRYTSTKEVLDATLIHQSITGLYETRIDLSQLGGDGGGGGGGGGGTLNIEDEHRLHETSKEPDVSLGSTWLSDFPQAWAETGGMGLAVRQAPLIIPLKATSTPVSIKQYPMSQEARLGIKPHIQRLLDQGILVPCQSPWNTPLLPVKKPGTNDYRPVQDLREVNKRVEDIHPTVPNPYNLLSGLPPSHQWYTVLDLKDAFFCLRLHPTSQPLFAFEWRDPEMGISGQLTWTRLPQGFKNSPTLFNEALHRDLADFRIQHPDLILLQYVDDLLLAATSELDCQQGTRALLQTLGNLGYRASAKKAQICQKQVKYLGYLLKEGQRWLTEARKETVMGQPTPKTPRQLREFLGKAGFCRLFIPGFAEMAAPLYPLTKPGTLFNWGPDQQKAYQEIKQALLTAPALGLPDLTKPFELFVDEKQGYAKGVLTQKLGPWRRPVAYLSKKLDPVAAGWPPCLRMVAAIAVLTKDAGKLTMGQPLVILAPHAVEALVKQPPDRWLSNARMTHYQALLLDTDRVQFGPVVALNPATLLPLPEEGLQHNCLDILAEAHGTRPDLTDQPLPDADHTWYTDGSSLLQEGQRKAGAAVTTETEVIWAKALPAGTSAQRAELIALTQALKMAEGKKLNVYTDSRYAFATAHIHGEIYRRRGWLTSEGKEIKNKDEILALLKALFLPKRLSIIHCPGHQKGHSAEARGNRMADQAARKAAITETPDTSTLLAGKRTADGSEFEKRTADGSEFESPKKKAKVE

SEQ ID NO: 3045 - protein, 2096 aa, synthetic construct
MPAAKRVKLDGGDKKYSIGLDIGTNSVGWAVITDEYKVPSKKFKVLGNTDRHSIKKNLIGALLFDSGETAEATRLKRTARRRYTRRKNRICYLQEIFSNEMAKVDDSFFHRLEESFLVEEDKKHERHPIFGNIVDEVAYHEKYPTIYHLRKKLVDSTDKADLRLIYLALAHMIKFRGHFLIEGDLNPDNSDVDKLFIQLVQTYNQLFEENPINASGVDAKAILSARLSKSRRLENLIAQLPGEKKNGLFGNLIALSLGLTPNFKSNFDLAEDAKLQLSKDTYDDDLDNLLAQIGDQYADLFLAAKNLSDAILLSDILRVNTEITKAPLSASMIKRYDEHHQDLTLLKALVRQQLPEKYKEIFFDQSKNGYAGYIDGGASQEEFYKFIKPILEKMDGTEELLVKLNREDLLRKQRTFDNGSIPHQIHLGELHAILRRQEDFYPFLKDNREKIEKILTFRIPYYVGPLARGNSRFAWMTRKSEETITPWNFEEVVDKGASAQSFIERMTNFDKNLPNEKVLPKHSLLYEYFTVYNELTKVKYVTEGMRKPAFLSGEQKKAIVDLLFKTNRKVTVKQLKEDYFKKIECFDSVEISGVEDRFNASLGTYHDLLKIIKDKDFLDNEENEDILEDIVLTLTLFEDREMIEERLKTYAHLFDDKVMKQLKRRRYTGWGRLSRKLINGIRDKQSGKTILDFLKSDGFANRNFMQLIHDDSLTFKEDIQKAQVSGQGDSLHEHIANLAGSPAIKKGILQTVKVVDELVKVMGRHKPENIVIEMARENQTTQKGQKNSRERMKRIEEGIKELGSQILKEHPVENTQLQNEKLYLYYLQNGRDMYVDQELDINRLSDYDVDHIVPQSFLKDDSIDNKVLTRSDKARGKSDNVPSEEVVKKMKNYWRQLLNAKLITQRKFDNLTKAERGGLSELDKAGFIKRQLVETRQITKHVAQILDSRMNTKYDENDKLIREVKVITLKSKLVSDFRKDFQFYKVREINNYHHAHDAYLNAVVGTALIKKYPKLESEFVYGDYKVYDVRKMIAKSEQEIGKATAKYFFYSNIMNFFKTEITLANGEIRKRPLIETNGETGEIVWDKGRDFATVRKVLSMPQVNIVKKTEVQTGGFSKESILPKRNSDKLIARKKDWDPKKYGGFDSPTVAYSVLVVAKVEKGKSKKLKSVKELLGITIMERSSFEKNPIDFLEAKGYKEVKKDLIIKLPKYSLFELENGRKRMLASAGELQKGNELALPSKYVNFLYLASHYEKLKGSPEDNEQKQLFVEQHKHYLDEIIEQISEFSKRVILADANLDKVLSAYNKHRDKPIREQAENIIHLFTLTNLGAPAAFKYFDTTIDRKRYTSTKEVLDATLIHQSITGLYETRIDLSQLGGDGGGGGEAAAKGGSGGTLNIEDEHRLHETSKEPDVSLGSTWLSDFPQAWAETGGMGLAVRQAPLIIPLKATSTPVSIKQYPMSQEARLGIKPHIQRLLDQGILVPCQSPWNTPLLPVKKPGTNDYRPVQDLREVNKRVEDIHPTVPNPYNLLSGLPPSHQWYTVLDLKDAFFCLRLHPTSQPLFAFEWRDPEMGISGQLTWTRLPQGFKNSPTLFNEALHRDLADFRIQHPDLILLQYVDDLLLAATSELDCQQGTRALLQTLGNLGYRASAKKAQICQKQVKYLGYLLKEGQRWLTEARKETVMGQPTPKTPRQLREFLGKAGFCRLFIPGFAEMAAPLYPLTKPGTLFNWGPDQQKAYQEIKQALLTAPALGLPDLTKPFELFVDEKQGYAKGVLTQKLGPWRRPVAYLSKKLDPVAAGWPPCLRMVAAIAVLTKDAGKLTMGQPLVILAPHAVEALVKQPPDRWLSNARMTHYQALLLDTDRVQFGPVVALNPATLLPLPEEGLQHNCLDILAEAHGTRPDLTDQPLPDADHTWYTDGSSLLQEGQRKAGAAVTTETEVIWAKALPAGTSAQRAELIALTQALKMAEGKKLNVYTDSRYAFATAHIHGEIYRRRGWLTSEGKEIKNKDEILALLKALFLPKRLSIIHCPGHQKGHSAEARGNRMADQAARKAAITETPDTSTLLAGKRTADGSEFEKRTADGSEFESPKKKAKVE

SEQ ID NO: 3046 - protein, 2096 aa, synthetic construct; identical to SEQ ID NO: 2829

SEQ ID NO: 3047 - protein, 2094 aa, synthetic construct
MPAAKRVKLDGGDKKYSIGLDIGTNSVGWAVITDEYKVPSKKFKVLGNTDRHSIKKNLIGALLFDSGETAEATRLKRTARRRYTRRKNRICYLQEIFSNEMAKVDDSFFHRLEESFLVEEDKKHERHPIFGNIVDEVAYHEKYPTIYHLRKKLVDSTDKADLRLIYLALAHMIKFRGHFLIEGDLNPDNSDVDKLFIQLVQTYNQLFEENPINASGVDAKAILSARLSKSRRLENLIAQLPGEKKNGLFGNLIALSLGLTPNFKSNFDLAEDAKLQLSKDTYDDDLDNLLAQIGDQYADLFLAAKNLSDAILLSDILRVNTEITKAPLSASMIKRYDEHHQDLTLLKALVRQQLPEKYKEIFFDQSKNGYAGYIDGGASQEEFYKFIKPILEKMDGTEELLVKLNREDLLRKQRTFDNGSIPHQIHLGELHAILRRQEDFYPFLKDNREKIEKILTFRIPYYVGPLARGNSRFAWMTRKSEETITPWNFEEVVDKGASAQSFIERMTNFDKNLPNEKVLPKHSLLYEYFTVYNELTKVKYVTEGMRKPAFLSGEQKKAIVDLLFKTNRKVTVKQLKEDYFKKIECFDSVEISGVEDRFNASLGTYHDLLKIIKDKDFLDNEENEDILEDIVLTLTLFEDREMIEERLKTYAHLFDDKVMKQLKRRRYTGWGRLSRKLINGIRDKQSGKTILDFLKSDGFANRNFMQLIHDDSLTFKEDIQKAQVSGQGDSLHEHIANLAGSPAIKKGILQTVKVVDELVKVMGRHKPENIVIEMARENQTTQKGQKNSRERMKRIEEGIKELGSQILKEHPVENTQLQNEKLYLYYLQNGRDMYVDQELDINRLSDYDVDHIVPQSFLKDDSIDNKVLTRSDKARGKSDNVPSEEVVKKMKNYWRQLLNAKLITQRKFDNLTKAERGGLSELDKAGFIKRQLVETRQITKHVAQILDSRMNTKYDENDKLIREVKVITLKSKLVSDFRKDFQFYKVREINNYHHAHDAYLNAVVGTALIKKYPKLESEFVYGDYKVYDVRKMIAKSEQEIGKATAKYFFYSNIMNFFKTEITLANGEIRKRPLIETNGETGEIVWDKGRDFATVRKVLSMPQVNIVKKTEVQTGGFSKESILPKRNSDKLIARKKDWDPKKYGGFDSPTVAYSVLVVAKVEKGKSKKLKSVKELLGITIMERSSFEKNPIDFLEAKGYKEVKKDLIIKLPKYSLFELENGRKRMLASAGELQKGNELALPSKYVNFLYLASHYEKLKGSPEDNEQKQLFVEQHKHYLDEIIEQISEFSKRVILADANLDKVLSAYNKHRDKPIREQAENIIHLFTLTNLGAPAAFKYFDTTIDRKRYTSTKEVLDATLIHQSITGLYETRIDLSQLGGDGGGSSGGGGGSGGTLNIEDEHRLHETSKEPDVSLGSTWLSDFPQAWAETGGMGLAVRQAPLIIPLKATSTPVSIKQYPMSQEARLGIKPHIQRLLDQGILVPCQSPWNTPLLPVKKPGTNDYRPVQDLREVNKRVEDIHPTVPNPYNLLSGLPPSHQWYTVLDLKDAFFCLRLHPTSQPLFAFEWRDPEMGISGQLTWTRLPQGFKNSPTLFNEALHRDLADFRIQHPDLILLQYVDDLLLAATSELDCQQGTRALLQTLGNLGYRASAKKAQICQKQVKYLGYLLKEGQRWLTEARKETVMGQPTPKTPRQLREFLGKAGFCRLFIPGFAEMAAPLYPLTKPGTLFNWGPDQQKAYQEIKQALLTAPALGLPDLTKPFELFVDEKQGYAKGVLTQKLGPWRRPVAYLSKKLDPVAAGWPPCLRMVAAIAVLTKDAGKLTMGQPLVILAPHAVEALVKQPPDRWLSNARMTHYQALLLDTDRVQFGPVVALNPATLLPLPEEGLQHNCLDILAEAHGTRPDLTDQPLPDADHTWYTDGSSLLQEGQRKAGAAVTTETEVIWAKALPAGTSAQRAELIALTQALKMAEGKKLNVYTDSRYAFATAHIHGEIYRRRGWLTSEGKEIKNKDEILALLKALFLPKRLSIIHCPGHQKGHSAEARGNRMADQAARKAAITETPDTSTLLAGKRTADGSEFEKRTADGSEFESPKKKAKVE

SEQ ID NO: 3048 - protein, 2094 aa, synthetic construct; identical to SEQ ID NO: 2852

SEQ ID NO: 3049 - protein, 2097 aa, synthetic construct; identical to SEQ ID NO: 2814

SEQ ID NO: 3050 - protein, 2096 aa, synthetic construct
MPAAKRVKLDGGDKKYSIGLDIGTNSVGWAVITDEYKVPSKKFKVLGNTDRHSIKKNLIGALLFDSGETAEATRLKRTARRRYTRRKNRICYLQEIFSNEMAKVDDSFFHRLEESFLVEEDKKHERHPIFGNIVDEVAYHEKYPTIYHLRKKLVDSTDKADLRLIYLALAHMIKFRGHFLIEGDLNPDNSDVDKLFIQLVQTYNQLFEENPINASGVDAKAILSARLSKSRRLENLIAQLPGEKKNGLFGNLIALSLGLTPNFKSNFDLAEDAKLQLSKDTYDDDLDNLLAQIGDQYADLFLAAKNLSDAILLSDILRVNTEITKAPLSASMIKRYDEHHQDLTLLKALVRQQLPEKYKEIFFDQSKNGYAGYIDGGASQEEFYKFIKPILEKMDGTEELLVKLNREDLLRKQRTFDNGSIPHQIHLGELHAILRRQEDFYPFLKDNREKIEKILTFRIPYYVGPLARGNSRFAWMTRKSEETITPWNFEEVVDKGASAQSFIERMTNFDKNLPNEKVLPKHSLLYEYFTVYNELTKVKYVTEGMRKPAFLSGEQKKAIVDLLFKTNRKVTVKQLKEDYFKKIECFDSVEISGVEDRFNASLGTYHDLLKIIKDKDFLDNEENEDILEDIVLTLTLFEDREMIEERLKTYAHLFDDKVMKQLKRRRYTGWGRLSRKLINGIRDKQSGKTILDFLKSDGFANRNFMQLIHDDSLTFKEDIQKAQVSGQGDSLHEHIANLAGSPAIKKGILQTVKVVDELVKVMGRHKPENIVIEMARENQTTQKGQKNSRERMKRIEEGIKELGSQILKEHPVENTQLQNEKLYLYYLQNGRDMYVDQELDINRLSDYDVDHIVPQSFLKDDSIDNKVLTRSDKARGKSDNVPSEEVVKKMKNYWRQLLNAKLITQRKFDNLTKAERGGLSELDKAGFIKRQLVETRQITKHVAQILDSRMNTKYDENDKLIREVKVITLKSKLVSDFRKDFQFYKVREINNYHHAHDAYLNAVVGTALIKKYPKLESEFVYGDYKVYDVRKMIAKSEQEIGKATAKYFFYSNIMNFFKTEITLANGEIRKRPLIETNGETGEIVWDKGRDFATVRKVLSMPQVNIVKKTEVQTGGFSKESILPKRNSDKLIARKKDWDPKKYGGFDSPTVAYSVLVVAKVEKGKSKKLKSVKELLGITIMERSSFEKNPIDFLEAKGYKEVKKDLIIKLPKYSLFELENGRKRMLASAGELQKGNELALPSKYVNFLYLASHYEKLKGSPEDNEQKQLFVEQHKHYLDEIIEQISEFSKRVILADANLDKVLSAYNKHRDKPIREQAENIIHLFTLTNLGAPAAFKYFDTTIDRKRYTSTKEVLDATLIHQSITGLYETRIDLSQLGGDGGGGGEAAAKGSSGGTLNIEDEHRLHETSKEPDVSLGSTWLSDFPQAWAETGGMGLAVRQAPLIIPLKATSTPVSIKQYPMSQEARLGIKPHIQRLLDQGILVPCQSPWNTPLLPVKKPGTNDYRPVQDLREVNKRVEDIHPTVPNPYNLLSGLPPSHQWYTVLDLKDAFFCLRLHPTSQPLFAFEWRDPEMGISGQLTWTRLPQGFKNSPTLFNEALHRDLADFRIQHPDLILLQYVDDLLLAATSELDCQQGTRALLQTLGNLGYRASAKKAQICQKQVKYLGYLLKEGQRWLTEARKETVMGQPTPKTPRQLREFLGKAGFCRLFIPGFAEMAAPLYPLTKPGTLFNWGPDQQKAYQEIKQALLTAPALGLPDLTKPFELFVDEKQGYAKGVLTQKLGPWRRPVAYLSKKLDPVAAGWPPCLRMVAAIAVLTKDAGKLTMGQPLVILAPHAVEALVKQPPDRWLSNARMTHYQALLLDTDRVQFGPVVALNPATLLPLPEEGLQHNCLDILAEAHGTRPDLTDQPLPDADHTWYTDGSSLLQEGQRKAGAAVTTETEVIWAKALPAGTSAQRAELIALTQALKMAEGKKLNVYTDSRYAFATAHIHGEIYRRRGWLTSEGKEIKNKDEILALLKALFLPKRLSIIHCPGHQKGHSAEARGNRMADQAARKAAITETPDTSTLLAGKRTADGSEFEKRTADGSEFESPKKKAKVE

SEQ ID NO: 3051 - protein, 2096 aa, synthetic construct; identical to SEQ ID NO: 2785

SEQ ID NO: 3052 - protein, 2096 aa, synthetic construct; identical to SEQ ID NO: 2822

SEQ ID NO: 3053 - protein, 2096 aa, synthetic construct; identical to SEQ ID NO: 2817

SEQ ID NO: 3054 - protein, 2096 aa, synthetic construct; identical to SEQ ID NO: 2851

SEQ ID NO: 3055 - protein, 2091 aa, synthetic construct
MPAAKRVKLDGGDKKYSIGLDIGTNSVGWAVITDEYKVPSKKFKVLGNTDRHSIKKNLIGALLFDSGETAEATRLKRTARRRYTRRKNRICYLQEIFSNEMAKVDDSFFHRLEESFLVEEDKKHERHPIFGNIVDEVAYHEKYPTIYHLRKKLVDSTDKADLRLIYLALAHMIKFRGHFLIEGDLNPDNSDVDKLFIQLVQTYNQLFEENPINASGVDAKAILSARLSKSRRLENLIAQLPGEKKNGLFGNLIALSLGLTPNFKSNFDLAEDAKLQLSKDTYDDDLDNLLAQIGDQYADLFLAAKNLSDAILLSDILRVNTEITKAPLSASMIKRYDEHHQDLTLLKALVRQQLPEKYKEIFFDQSKNGYAGYIDGGASQEEFYKFIKPILEKMDGTEELLVKLNREDLLRKQRTFDNGSIPHQIHLGELHAILRRQEDFYPFLKDNREKIEKILTFRIPYYVGPLARGNSRFAWMTRKSEETITPWNFEEVVDKGASAQSFIERMTNFDKNLPNEKVLPKHSLLYEYFTVYNELTKVKYVTEGMRKPAFLSGEQKKAIVDLLFKTNRKVTVKQLKEDYFKKIECFDSVEISGVEDRFNASLGTYHDLLKIIKDKDFLDNEENEDILEDIVLTLTLFEDREMIEERLKTYAHLFDDKVMKQLKRRRYTGWGRLSRKLINGIRDKQSGKTILDFLKSDGFANRNFMQLIHDDSLTFKEDIQKAQVSGQGDSLHEHIANLAGSPAIKKGILQTVKVVDELVKVMGRHKPENIVIEMARENQTTQKGQKNSRERMKRIEEGIKELGSQILKEHPVENTQLQNEKLYLYYLQNGRDMYVDQELDINRLSDYDVDHIVPQSFLKDDSIDNKVLTRSDKARGKSDNVPSEEVVKKMKNYWRQLLNAKLITQRKFDNLTKAERGGLSELDKAGFIKRQLVETRQITKHVAQILDSRMNTKYDENDKLIREVKVITLKSKLVSDFRKDFQFYKVREINNYHHAHDAYLNAVVGTALIKKYPKLESEFVYGDYKVYDVRKMIAKSEQEIGKATAKYFFYSNIMNFFKTEITLANGEIRKRPLIETNGETGEIVWDKGRDFATVRKVLSMPQVNIVKKTEVQTGGFSKESILPKRNSDKLIARKKDWDPKKYGGFDSPTVAYSVLVVAKVEKGKSKKLKSVKELLGITIMERSSFEKNPIDFLEAKGYKEVKKDLIIKLPKYSLFELENGRKRMLASAGELQKGNELALPSKYVNFLYLASHYEKLKGSPEDNEQKQLFVEQHKHYLDEIIEQISEFSKRVILADANLDKVLSAYNKHRDKPIREQAENIIHLFTLTNLGAPAAFKYFDTTIDRKRYTSTKEVLDATLIHQSITGLYETRIDLSQLGGDGGGSSPAPGGTLNIEDEHRLHETSKEPDVSLGSTWLSDFPQAWAETGGMGLAVRQAPLIIPLKATSTPVSIKQYPMSQEARLGIKPHIQRLLDQGILVPCQSPWNTPLLPVKKPGTNDYRPVQDLREVNKRVEDIHPTVPNPYNLLSGLPPSHQWYTVLDLKDAFFCLRLHPTSQPLFAFEWRDPEMGISGQLTWTRLPQGFKNSPTLFNEALHRDLADFRIQHPDLILLQYVDDLLLAATSELDCQQGTRALLQTLGNLGYRASAKKAQICQKQVKYLGYLLKEGQRWLTEARKETVMGQPTPKTPRQLREFLGKAGFCRLFIPGFAEMAAPLYPLTKPGTLFNWGPDQQKAYQEIKQALLTAPALGLPDLTKPFELFVDEKQGYAKGVLTQKLGPWRRPVAYLSKKLDPVAAGWPPCLRMVAAIAVLTKDAGKLTMGQPLVILAPHAVEALVKQPPDRWLSNARMTHYQALLLDTDRVQFGPVVALNPATLLPLPEEGLQHNCLDILAEAHGTRPDLTDQPLPDADHTWYTDGSSLLQEGQRKAGAAVTTETEVIWAKALPAGTSAQRAELIALTQALKMAEGKKLNVYTDSRYAFATAHIHGEIYRRRGWLTSEGKEIKNKDEILALLKALFLPKRLSIIHCPGHQKGHSAEARGNRMADQAARKAAITETPDTSTLLAGKRTADGSEFEKRTADGSEFESPKKKAKVE

SEQ ID NO: 3056 - protein, 2094 aa, synthetic construct
MPAAKRVKLDGGDKKYSIGLDIGTNSVGWAVITDEYKVPSKKFKVLGNTDRHSIKKNLIGALLFDSGETAEATRLKRTARRRYTRRKNRICYLQEIFSNEMAKVDDSFFHRLEESFLVEEDKKHERHPIFGNIVDEVAYHEKYPTIYHLRKKLVDSTDKADLRLIYLALAHMIKFRGHFLIEGDLNPDNSDVDKLFIQLVQTYNQLFEENPINASGVDAKAILSARLSKSRRLENLIAQLPGEKKNGLFGNLIALSLGLTPNFKSNFDLAEDAKLQLSKDTYDDDLDNLLAQIGDQYADLFLAAKNLSDAILLSDILRVNTEITKAPLSASMIKRYDEHHQDLTLLKALVRQQLPEKYKEIFFDQSKNGYAGYIDGGASQEEFYKFIKPILEKMDGTEELLVKLNREDLLRKQRTFDNGSIPHQIHLGELHAILRRQEDFYPFLKDNREKIEKILTFRIPYYVGPLARGNSRFAWMTRKSEETITPWNFEEVVDKGASAQSFIERMTNFDKNLPNEKVLPKHSLLYEYFTVYNELTKVKYVTEGMRKPAFLSGEQKKAIVDLLFKTNRKVTVKQLKEDYFKKIECFDSVEISGVEDRFNASLGTYHDLLKIIKDKDFLDNEENEDILEDIVLTLTLFEDREMIEERLKTYAHLFDDKVMKQLKRRRYTGWGRLSRKLINGIRDKQSGKTILDFLKSDGFANRNFMQLIHDDSLTFKEDIQKAQVSGQGDSLHEHIANLAGSPAIKKGILQTVKVVDELVKVMGRHKPENIVIEMARENQTTQKGQKNSRERMKRIEEGIKELGSQILKEHPVENTQLQNEKLYLYYLQNGRDMYVDQELDINRLSDYDVDHIVPQSFLKDDSIDNKVLTRSDKARGKSDNVPSEEVVKKMKNYWRQLLNAKLITQRKFDNLTKAERGGLSELDKAGFIKRQLVETRQITKHVAQILDSRMNTKYDENDKLIREVKVITLKSKLVSDFRKDFQFYKVREINNYHHAHDAYLNAVVGTALIKKYPKLESEFVYGDYKVYDVRKMIAKSEQEIGKATAKYFFYSNIMNFFKTEITLANGEIRKRPLIETNGETGEIVWDKGRDFATVRKVLSMPQVNIVKKTEVQTGGFSKESILPKRNSDKLIARKKDWDPKKYGGFDSPTVAYSVLVVAKVEKGKSKKLKSVKELLGITIMERSSFEKNPIDFLEAKGYKEVKKDLIIKLPKYSLFELENGRKRMLASAGELQKGNELALPSKYVNFLYLASHYEKLKGSPEDNEQKQLFVEQHKHYLDEIIEQISEFSKRVILADANLDKVLSAYNKHRDKPIREQAENIIHLFTLTNLGAPAAFKYFDTTIDRKRYTSTKEVLDATLIHQSITGLYETRIDLSQLGGDGGGSSGGGPAPGGTLNIEDEHRLHETSKEPDVSLGSTWLSDFPQAWAETGGMGLAVRQAPLIIPLKATSTPVSIKQYPMSQEARLGIKPHIQRLLDQGILVPCQSPWNTPLLPVKKPGTNDYRPVQDLREVNKRVEDIHPTVPNPYNLLSGLPPSHQWYTVLDLKDAFFCLRLHPTSQPLFAFEWRDPEMGISGQLTWTRLPQGFKNSPTLFNEALHRDLADFRIQHPDLILLQYVDDLLLAATSELDCQQGTRALLQTLGNLGYRASAKKAQICQKQVKYLGYLLKEGQRWLTEARKETVMGQPTPKTPRQLREFLGKAGFCRLFIPGFAEMAAPLYPLTKPGTLFNWGPDQQKAYQEIKQALLTAPALGLPDLTKPFELFVDEKQGYAKGVLTQKLGPWRRPVAYLSKKLDPVAAGWPPCLRMVAAIAVLTKDAGKLTMGQPLVILAPHAVEALVKQPPDRWLSNARMTHYQALLLDTDRVQFGPVVALNPATLLPLPEEGLQHNCLDILAEAHGTRPDLTDQPLPDADHTWYTDGSSLLQEGQRKAGAAVTTETEVIWAKALPAGTSAQRAELIALTQALKMAEGKKLNVYTDSRYAFATAHIHGEIYRRRGWLTSEGKEIKNKDEILALLKALFLPKRLSIIHCPGHQKGHSAEARGNRMADQAARKAAITETPDTSTLLAGKRTADGSEFEKRTADGSEFESPKKKAKVE

SEQ ID NO: 3057 - protein, 2096 aa, synthetic construct; identical to SEQ ID NO: 2810

SEQ ID NO: 3058 - protein, 2091 aa, synthetic construct
MPAAKRVKLDGGDKKYSIGLDIGTNSVGWAVITDEYKVPSKKFKVLGNTDRHSIKKNLIGALLFDSGETAEATRLKRTARRRYTRRKNRICYLQEIFSNEMAKVDDSFFHRLEESFLVEEDKKHERHPIFGNIVDEVAYHEKYPTIYHLRKKLVDSTDKADLRLIYLALAHMIKFRGHFLIEGDLNPDNSDVDKLFIQLVQTYNQLFEENPINASGVDAKAILSARLSKSRRLENLIAQLPGEKKNGLFGNLIALSLGLTPNFKSNFDLAEDAKLQLSKDTYDDDLDNLLAQIGDQYADLFLAAKNLSDAILLSDILRVNTEITKAPLSASMIKRYDEHHQDLTLLKALVRQQLPEKYKEIFFDQSKNGYAGYIDGGASQEEFYKFIKPILEKMDGTEELLVKLNREDLLRKQRTFDNGSIPHQIHLGELHAILRRQEDFYPFLKDNREKIEKILTFRIPYYVGPLARGNSRFAWMTRKSEETITPWNFEEVVDKGASAQSFIERMTNFDKNLPNEKVLPKHSLLYEYFTVYNELTKVKYVTEGMRKPAFLSGEQKKAIVDLLFKTNRKVTVKQLKEDYFKKIECFDSVEISGVEDRFNASLGTYHDLLKIIKDKDFLDNEENEDILEDIVLTLTLFEDREMIEERLKTYAHLFDDKVMKQLKRRRYTGWGRLSRKLINGIRDKQSGKTILDFLKSDGFANRNFMQLIHDDSLTFKEDIQKAQVSGQGDSLHEHIANLAGSPAIKKGILQTVKVVDELVKVMGRHKPENIVIEMARENQTTQKGQKNSRERMKRIEEGIKELGSQILKEHPVENTQLQNEKLYLYYLQNGRDMYVDQELDINRLSDYDVDHIVPQSFLKDDSIDNKVLTRSDKARGKSDNVPSEEVVKKMKNYWRQLLNAKLITQRKFDNLTKAERGGLSELDKAGFIKRQLVETRQITKHVAQILDSRMNTKYDENDKLIREVKVITLKSKLVSDFRKDFQFYKVREINNYHHAHDAYLNAVVGTALIKKYPKLESEFVYGDYKVYDVRKMIAKSEQEIGKATAKYFFYSNIMNFFKTEITLANGEIRKRPLIETNGETGEIVWDKGRDFATVRKVLSMPQVNIVKKTEVQTGGFSKESILPKRNSDKLIARKKDWDPKKYGGFDSPTVAYSVLVVAKVEKGKSKKLKSVKELLGITIMERSSFEKNPIDFLEAKGYKEVKKDLIIKLPKYSLFELENGRKRMLASAGELQKGNELALPSKYVNFLYLASHYEKLKGSPEDNEQKQLFVEQHKHYLDEIIEQISEFSKRVILADANLDKVLSAYNKHRDKPIREQAENIIHLFTLTNLGAPAAFKYFDTTIDRKRYTSTKEVLDATLIHQSITGLYETRIDLSQLGGDGGGSSGGGGGTLNIEDEHRLHETSKEPDVSLGSTWLSDFPQAWAETGGMGLAVRQAPLIIPLKATSTPVSIKQYPMSQEARLGIKPHIQRLLDQGILVPCQSPWNTPLLPVKKPGTNDYRPVQDLREVNKRVEDIHPTVPNPYNLLSGLPPSHQWYTVLDLKDAFFCLRLHPTSQPLFAFEWRDPEMGISGQLTWTRLPQGFKNSPTLFNEALHRDLADFRIQHPDLILLQYVDDLLLAATSELDCQQGTRALLQTLGNLGYRASAKKAQICQKQVKYLGYLLKEGQRWLTEARKETVMGQPTPKTPRQLREFLGKAGFCRLFIPGFAEMAAPLYPLTKPGTLFNWGPDQQKAYQEIKQALLTAPALGLPDLTKPFELFVDEKQGYAKGVLTQKLGPWRRPVAYLSKKLDPVAAGWPPCLRMVAAIAVLTKDAGKLTMGQPLVILAPHAVEALVKQPPDRWLSNARMTHYQALLLDTDRVQFGPVVALNPATLLPLPEEGLQHNCLDILAEAHGTRPDLTDQPLPDADHTWYTDGSSLLQEGQRKAGAAVTTETEVIWAKALPAGTSAQRAELIALTQALKMAEGKKLNVYTDSRYAFATAHIHGEIYRRRGWLTSEGKEIKNKDEILALLKALFLPKRLSIIHCPGHQKGHSAEARGNRMADQAARKAAITETPDTSTLLAGKRTADGSEFEKRTADGSEFESPKKKAKVE

SEQ ID NO: 3059 - protein, 2094 aa, synthetic construct; identical to SEQ ID NO: 2804

SEQ ID NO: 3060 - protein, 2091 aa, synthetic construct
MPAAKRVKLDGGDKKYSIGLDIGTNSVGWAVITDEYKVPSKKFKVLGNTDRHSIKKNLIGALLFDSGETAEATRLKRTARRRYTRRKNRICYLQEIFSNEMAKVDDSFFHRLEESFLVEEDKKHERHPIFGNIVDEVAYHEKYPTIYHLRKKLVDSTDKADLRLIYLALAHMIKFRGHFLIEGDLNPDNSDVDKLFIQLVQTYNQLFEENPINASGVDAKAILSARLSKSRRLENLIAQLPGEKKNGLFGNLIALSLGLTPNFKSNFDLAEDAKLQLSKDTYDDDLDNLLAQIGDQYADLFLAAKNLSDAILLSDILRVNTEITKAPLSASMIKRYDEHHQDLTLLKALVRQQLPEKYKEIFFDQSKNGYAGYIDGGASQEEFYKFIKPILEKMDGTEELLVKLNREDLLRKQRTFDNGSIPHQIHLGELHAILRRQEDFYPFLKDNREKIEKILTFRIPYYVGPLARGNSRFAWMTRKSEETITPWNFEEVVDKGASAQSFIERMTNFDKNLPNEKVLPKHSLLYEYFTVYNELTKVKYVTEGMRKPAFLSGEQKKAIVDLLFKTNRKVTVKQLKEDYFKKIECFDSVEISGVEDRFNASLGTYHDLLKIIKDKDFLDNEENEDILEDIVLTLTLFEDREMIEERLKTYAHLFDDKVMKQLKRRRYTGWGRLSRKLINGIRDKQSGKTILDFLKSDGFANRNFMQLIHDDSLTFKEDIQKAQVSGQGDSLHEHIANLAGSPAIKKGILQTVKVVDELVKVMGRHKPENIVIEMARENQTTQKGQKNSRERMKRIEEGIKELGSQILKEHPVENTQLQNEKLYLYYLQNGRDMYVDQELDINRLSDYDVDHIVPQSFLKDDSIDNKVLTRSDKARGKSDNVPSEEVVKKMKNYWRQLLNAKLITQRKFDNLTKAERGGLSELDKAGFIKRQLVETRQITKHVAQILDSRMNTKYDENDKLIREVKVITLKSKLVSDFRKDFQFYKVREINNYHHAHDAYLNAVVGTALIKKYPKLESEFVYGDYKVYDVRKMIAKSEQEIGKATAKYFFYSNIMNFFKTEITLANGEIRKRPLIETNGETGEIVWDKGRDFATVRKVLSMPQVNIVKKTEVQTGGFSKESILPKRNSDKLIARKKDWDPKKYGGFDSPTVAYSVLVVAKVEKGKSKKLKSVKELLGITIMERSSFEKNPIDFLEAKGYKEVKKDLIIKLPKYSLFELENGRKRMLASAGELQKGNELALPSKYVNFLYLASHYEKLKGSPEDNEQKQLFVEQHKHYLDEIIEQISEFSKRVILADANLDKVLSAYNKHRDKPIREQAENIIHLFTLTNLGAPAAFKYFDTTIDRKRYTSTKEVLDATLIHQSITGLYETRIDLSQLGGDGGPAPGGSGGTLNIEDEHRLHETSKEPDVSLGSTWLSDFPQAWAETGGMGLAVRQAPLIIPLKATSTPVSIKQYPMSQEARLGIKPHIQRLLDQGILVPCQSPWNTPLLPVKKPGTNDYRPVQDLREVNKRVEDIHPTVPNPYNLLSGLPPSHQWYTVLDLKDAFFCLRLHPTSQPLFAFEWRDPEMGISGQLTWTRLPQGFKNSPTLFNEALHRDLADFRIQHPDLILLQYVDDLLLAATSELDCQQGTRALLQTLGNLGYRASAKKAQICQKQVKYLGYLLKEGQRWLTEARKETVMGQPTPKTPRQLREFLGKAGFCRLFIPGFAEMAAPLYPLTKPGTLFNWGPDQQKAYQEIKQALLTAPALGLPDLTKPFELFVDEKQGYAKGVLTQKLGPWRRPVAYLSKKLDPVAAGWPPCLRMVAAIAVLTKDAGKLTMGQPLVILAPHAVEALVKQPPDRWLSNARMTHYQALLLDTDRVQFGPVVALNPATLLPLPEEGLQHNCLDILAEAHGTRPDLTDQPLPDADHTWYTDGSSLLQEGQRKAGAAVTTETEVIWAKALPAGTSAQRAELIALTQALKMAEGKKLNVYTDSRYAFATAHIHGEIYRRRGWLTSEGKEIKNKDEILALLKALFLPKRLSIIHCPGHQKGHSAEARGNRMADQAARKAAITETPDTSTLLAGKRTADGSEFEKRTADGSEFESPKKKAKVE

SEQ ID NO: 3061 - protein, 2093 aa, synthetic construct
MPAAKRVKLDGGDKKYSIGLDIGTNSVGWAVITDEYKVPSKKFKVLGNTDRHSIKKNLIGALLFDSGETAEATRLKRTARRRYTRRKNRICYLQEIFSNEMAKVDDSFFHRLEESFLVEEDKKHERHPIFGNIVDEVAYHEKYPTIYHLRKKLVDSTDKADLRLIYLALAHMIKFRGHFLIEGDLNPDNSDVDKLFIQLVQTYNQLFEENPINASGVDAKAILSARLSKSRRLENLIAQLPGEKKNGLFGNLIALSLGLTPNFKSNFDLAEDAKLQLSKDTYDDDLDNLLAQIGDQYADLFLAAKNLSDAILLSDILRVNTEITKAPLSASMIKRYDEHHQDLTLLKALVRQQLPEKYKEIFFDQSKNGYAGYIDGGASQEEFYKFIKPILEKMDGTEELLVKLNREDLLRKQRTFDNGSIPHQIHLGELHAILRRQEDFYPFLKDNREKIEKILTFRIPYYVGPLARGNSRFAWMTRKSEETITPWNFEEVVDKGASAQSFIERMTNFDKNLPNEKVLPKHSLLYEYFTVYNELTKVKYVTEGMRKPAFLSGEQKKAIVDLLFKTNRKVTVKQLKEDYFKKIECFDSVEISGVEDRFNASLGTYHDLLKIIKDKDFLDNEENEDILEDIVLTLTLFEDREMIEERLKTYAHLFDDKVMKQLKRRRYTGWGRLSRKLINGIRDKQSGKTILDFLKSDGFANRNFMQLIHDDSLTFKEDIQKAQVSGQGDSLHEHIANLAGSPAIKKGILQTVKVVDELVKVMGRHKPENIVIEMARENQTTQKGQKNSRERMKRIEEGIKELGSQILKEHPVENTQLQNEKLYLYYLQNGRDMYVDQELDINRLSDYDVDHIVPQSFLKDDSIDNKVLTRSDKARGKSDNVPSEEVVKKMKNYWRQLLNAKLITQRKFDNLTKAERGGLSELDKAGFIKRQLVETRQITKHVAQILDSRMNTKYDENDKLIREVKVITLKSKLVSDFRKDFQFYKVREINNYHHAHDAYLNAVVGTALIKKYPKLESEFVYGDYKVYDVRKMIAKSEQEIGKATAKYFFYSNIMNFFKTEITLANGEIRKRPLIETNGETGEIVWDKGRDFATVRKVLSMPQVNIVKKTEVQTGGFSKESILPKRNSDKLIARKKDWDPKKYGGFDSPTVAYSVLVVAKVEKGKSKKLKSVKELLGITIMERSSFEKNPIDFLEAKGYKEVKKDLIIKLPKYSLFELENGRKRMLASAGELQKGNELALPSKYVNFLYLASHYEKLKGSPEDNEQKQLFVEQHKHYLDEIIEQISEFSKRVILADANLDKVLSAYNKHRDKPIREQAENIIHLFTLTNLGAPAAFKYFDTTIDRKRYTSTKEVLDATLIHQSITGLYETRIDLSQLGGDGGPAPEAAAKGGTLNIEDEHRLHETSKEPDVSLGSTWLSDFPQAWAETGGMGLAVRQAPLIIPLKATSTPVSIKQYPMSQEARLGIKPHIQRLLDQGILVPCQSPWNTPLLPVKKPGTNDYRPVQDLREVNKRVEDIHPTVPNPYNLLSGLPPSHQWYTVLDLKDAFFCLRLHPTSQPLFAFEWRDPEMGISGQLTWTRLPQGFKNSPTLFNEALHRDLADFRIQHPDLILLQYVDDLLLAATSELDCQQGTRALLQTLGNLGYRASAKKAQICQKQVKYLGYLLKEGQRWLTEARKETVMGQPTPKTPRQLREFLGKAGFCRLFIPGFAEMAAPLYPLTKPGTLFNWGPDQQKAYQEIKQALLTAPALGLPDLTKPFELFVDEKQGYAKGVLTQKLGPWRRPVAYLSKKLDPVAAGWPPCLRMVAAIAVLTKDAGKLTMGQPLVILAPHAVEALVKQPPDRWLSNARMTHYQALLLDTDRVQFGPVVALNPATLLPLPEEGLQHNCLDILAEAHGTRPDLTDQPLPDADHTWYTDGSSLLQEGQRKAGAAVTTETEVIWAKALPAGTSAQRAELIALTQALKMAEGKKLNVYTDSRYAFATAHIHGEIYRRRGWLTSEGKEIKNKDEILALLKALFLPKRLSIIHCPGHQKGHSAEARGNRMADQAARKAAITETPDTSTLLAGKRTADGSEFEKRTADGSEFESPKKKAKVE

SEQ ID NO: 3062 - protein, 2093 aa, synthetic construct; identical to SEQ ID NO: 2828

SEQ ID NO: 3063 - protein, 2105 aa, synthetic construct
MPAAKRVKLDGGDKKYSIGLDIGTNSVGWAVITDEYKVPSKKFKVLGNTDRHSIKKNLIGALLFDSGETAEATRLKRTARRRYTRRKNRICYLQEIFSNEMAKVDDSFFHRLEESFLVEEDKKHERHPIFGNIVDEVAYHEKYPTIYHLRKKLVDSTDKADLRLIYLALAHMIKFRGHFLIEGDLNPDNSDVDKLFIQLVQTYNQLFEENPINASGVDAKAILSARLSKSRRLENLIAQLPGEKKNGLFGNLIALSLGLTPNFKSNFDLAEDAKLQLSKDTYDDDLDNLLAQIGDQYADLFLAAKNLSDAILLSDILRVNTEITKAPLSASMIKRYDEHHQDLTLLKALVRQQLPEKYKEIFFDQSKNGYAGYIDGGASQEEFYKFIKPILEKMDGTEELLVKLNREDLLRKQRTFDNGSIPHQIHLGELHAILRRQEDFYPFLKDNREKIEKILTFRIPYYVGPLARGNSRFAWMTRKSEETITPWNFEEVVDKGASAQSFIERMTNFDKNLPNEKVLPKHSLLYEYFTVYNELTKVKYVTEGMRKPAFLSGEQKKAIVDLLFKTNRKVTVKQLKEDYFKKIECFDSVEISGVEDRFNASLGTYHDLLKIIKDKDFLDNEENEDILEDIVLTLTLFEDREMIEERLKTYAHLFDDKVMKQLKRRRYTGWGRLSRKLINGIRDKQSGKTILDFLKSDGFANRNFMQLIHDDSLTFKEDIQKAQVSGQGDSLHEHIANLAGSPAIKKGILQTVKVVDELVKVMGRHKPENIVIEMARENQTTQKGQKNSRERMKRIEEGIKELGSQILKEHPVENTQLQNEKLYLYYLQNGRDMYVDQELDINRLSDYDVDHIVPQSFLKDDSIDNKVLTRSDKARGKSDNVPSEEVVKKMKNYWRQLLNAKLITQRKFDNLTKAERGGLSELDKAGFIKRQLVETRQITKHVAQILDSRMNTKYDENDKLIREVKVITLKSKLVSDFRKDFQFYKVREINNYHHAHDAYLNAVVGTALIKKYPKLESEFVYGDYKVYDVRKMIAKSEQEIGKATAKYFFYSNIMNFFKTEITLANGEIRKRPLIETNGETGEIVWDKGRDFATVRKVLSMPQVNIVKKTEVQTGGFSKESILPKRNSDKLIARKKDWDPKKYGGFDSPTVAYSVLVVAKVEKGKSKKLKSVKELLGITIMERSSFEKNPIDFLEAKGYKEVKKDLIIKLPKYSLFELENGRKRMLASAGELQKGNELALPSKYVNFLYLASHYEKLKGSPEDNEQKQLFVEQHKHYLDEIIEQISEFSKRVILADANLDKVLSAYNKHRDKPIREQAENIIHLFTLTNLGAPAAFKYFDTTIDRKRYTSTKEVLDATLIHQSITGLYETRIDLSQLGGDGGGGGGSGGGGSGGGGSGGGGSGGTLNIEDEHRLHETSKEPDVSLGSTWLSDFPQAWAETGGMGLAVRQAPLIIPLKATSTPVSIKQYPMSQEARLGIKPHIQRLLDQGILVPCQSPWNTPLLPVKKPGTNDYRPVQDLREVNKRVEDIHPTVPNPYNLLSGLPPSHQWYTVLDLKDAFFCLRLHPTSQPLFAFEWRDPEMGISGQLTWTRLPQGFKNSPTLFNEALHRDLADFRIQHPDLILLQYVDDLLLAATSELDCQQGTRALLQTLGNLGYRASAKKAQICQKQVKYLGYLLKEGQRWLTEARKETVMGQPTPKTPRQLREFLGKAGFCRLFIPGFAEMAAPLYPLTKPGTLFNWGPDQQKAYQEIKQALLTAPALGLPDLTKPFELFVDEKQGYAKGVLTQKLGPWRRPVAYLSKKLDPVAAGWPPCLRMVAAIAVLTKDAGKLTMGQPLVILAPHAVEALVKQPPDRWLSNARMTHYQALLLDTDRVQFGPVVALNPATLLPLPEEGLQHNCLDILAEAHGTRPDLTDQPLPDADHTWYTDGSSLLQEGQRKAGAAVTTETEVIWAKALPAGTSAQRAELIALTQALKMAEGKKLNVYTDSRYAFATAHIHGEIYRRRGWLTSEGKEIKNKDEILALLKALFLPKRLSIIHCPGHQKGHSAEARGNRMADQAARKAAITETPDTSTLLAGKRTADGSEFEKRTADGSEFESPKKKAKVE

SEQ ID NO: 3064 - protein, 2094 aa, synthetic construct
MPAAKRVKLDGGDKKYSIGLDIGTNSVGWAVITDEYKVPSKKFKVLGNTDRHSIKKNLIGALLFDSGETAEATRLKRTARRRYTRRKNRICYLQEIFSNEMAKVDDSFFHRLEESFLVEEDKKHERHPIFGNIVDEVAYHEKYPTIYHLRKKLVDSTDKADLRLIYLALAHMIKFRGHFLIEGDLNPDNSDVDKLFIQLVQTYNQLFEENPINASGVDAKAILSARLSKSRRLENLIAQLPGEKKNGLFGNLIALSLGLTPNFKSNFDLAEDAKLQLSKDTYDDDLDNLLAQIGDQYADLFLAAKNLSDAILLSDILRVNTEITKAPLSASMIKRYDEHHQDLTLLKALVRQQLPEKYKEIFFDQSKNGYAGYIDGGASQEEFYKFIKPILEKMDGTEELLVKLNREDLLRKQRTFDNGSIPHQIHLGELHAILRRQEDFYPFLKDNREKIEKILTFRIPYYVGPLARGNSRFAWMTRKSEETITPWNFEEVVDKGASAQSFIERMTNFDKNLPNEKVLPKHSLLYEYFTVYNELTKVKYVTEGMRKPAFLSGEQKKAIVDLLFKTNRKVTVKQLKEDYFKKIECFDSVEISGVEDRFNASLGTYHDLLKIIKDKDFLDNEENEDILEDIVLTLTLFEDREMIEERLKTYAHLFDDKVMKQLKRRRYTGWGRLSRKLINGIRDKQSGKTILDFLKSDGFANRNFMQLIHDDSLTFKEDIQKAQVSGQGDSLHEHIANLAGSPAIKKGILQTVKVVDELVKVMGRHKPENIVIEMARENQTTQKGQKNSRERMKRIEEGIKELGSQILKEHPVENTQLQNEKLYLYYLQNGRDMYVDQELDINRLSDYDVDHIVPQSFLKDDSIDNKVLTRSDKARGKSDNVPSEEVVKKMKNYWRQLLNAKLITQRKFDNLTKAERGGLSELDKAGFIKRQLVETRQITKHVAQILDSRMNTKYDENDKLIREVKVITLKSKLVSDFRKDFQFYKVREINNYHHAHDAYLNAVVGTALIKKYPKLESEFVYGDYKVYDVRKMIAKSEQEIGKATAKYFFYSNIMNFFKTEITLANGEIRKRPLIETNGETGEIVWDKGRDFATVRKVLSMPQVNIVKKTEVQTGGFSKESILPKRNSDKLIARKKDWDPKKYGGFDSPTVAYSVLVVAKVEKGKSKKLKSVKELLGITIMERSSFEKNPIDFLEAKGYKEVKKDLIIKLPKYSLFELENGRKRMLASAGELQKGNELALPSKYVNFLYLASHYEKLKGSPEDNEQKQLFVEQHKHYLDEIIEQISEFSKRVILADANLDKVLSAYNKHRDKPIREQAENIIHLFTLTNLGAPAAFKYFDTTIDRKRYTSTKEVLDATLIHQSITGLYETRIDLSQLGGDGGPAPGGSGSSGGTLNIEDEHRLHETSKEPDVSLGSTWLSDFPQAWAETGGMGLAVRQAPLIIPLKATSTPVSIKQYPMSQEARLGIKPHIQRLLDQGILVPCQSPWNTPLLPVKKPGTNDYRPVQDLREVNKRVEDIHPTVPNPYNLLSGLPPSHQWYTVLDLKDAFFCLRLHPTSQPLFAFEWRDPEMGISGQLTWTRLPQGFKNSPTLFNEALHRDLADFRIQHPDLILLQYVDDLLLAATSELDCQQGTRALLQTLGNLGYRASAKKAQICQKQVKYLGYLLKEGQRWLTEARKETVMGQPTPKTPRQLREFLGKAGFCRLFIPGFAEMAAPLYPLTKPGTLFNWGPDQQKAYQEIKQALLTAPALGLPDLTKPFELFVDEKQGYAKGVLTQKLGPWRRPVAYLSKKLDPVAAGWPPCLRMVAAIAVLTKDAGKLTMGQPLVILAPHAVEALVKQPPDRWLSNARMTHYQALLLDTDRVQFGPVVALNPATLLPLPEEGLQHNCLDILAEAHGTRPDLTDQPLPDADHTWYTDGSSLLQEGQRKAGAAVTTETEVIWAKALPAGTSAQRAELIALTQALKMAEGKKLNVYTDSRYAFATAHIHGEIYRRRGWLTSEGKEIKNKDEILALLKALFLPKRLSIIHCPGHQKGHSAEARGNRMADQAARKAAITETPDTSTLLAGKRTADGSEFEKRTADGSEFESPKKKAKVE

SEQ ID NO: 3065 - protein, 2090 aa, synthetic construct; identical to SEQ ID NO: 2825

SEQ ID NO: 3066 - protein, 2090 aa, synthetic construct
MPAAKRVKLDGGDKKYSIGLDIGTNSVGWAVITDEYKVPSKKFKVLGNTDRHSIKKNLIGALLFDSGETAEATRLKRTARRRYTRRKNRICYLQEIFSNEMAKVDDSFFHRLEESFLVEEDKKHERHPIFGNIVDEVAYHEKYPTIYHLRKKLVDSTDKADLRLIYLALAHMIKFRGHFLIEGDLNPDNSDVDKLFIQLVQTYNQLFEENPINASGVDAKAILSARLSKSRRLENLIAQLPGEKKNGLFGNLIALSLGLTPNFKSNFDLAEDAKLQLSKDTYDDDLDNLLAQIGDQYADLFLAAKNLSDAILLSDILRVNTEITKAPLSASMIKRYDEHHQDLTLLKALVRQQLPEKYKEIFFDQSKNGYAGYIDGGASQEEFYKFIKPILEKMDGTEELLVKLNREDLLRKQRTFDNGSIPHQIHLGELHAILRRQEDFYPFLKDNREKIEKILTFRIPYYVGPLARGNSRFAWMTRKSEETITPWNFEEVVDKGASAQSFIERMTNFDKNLPNEKVLPKHSLLYEYFTVYNELTKVKYVTEGMRKPAFLSGEQKKAIVDLLFKTNRKVTVKQLKEDYFKKIECFDSVEISGVEDRFNASLGTYHDLLKIIKDKDFLDNEENEDILEDIVLTLTLFEDREMIEERLKTYAHLFDDKVMKQLKRRRYTGWGRLSRKLINGIRDKQSGKTILDFLKSDGFANRNFMQLIHDDSLTFKEDIQKAQVSGQGDSLHEHIANLAGSPAIKKGILQTVKVVDELVKVMGRHKPENIVIEMARENQTTQKGQKNSRERMKRIEEGIKELGSQILKEHPVENTQLQNEKLYLYYLQNGRDMYVDQELDINRLSDYDVDHIVPQSFLKDDSIDNKVLTRSDKARGKSDNVPSEEVVKKMKNYWRQLLNAKLITQRKFDNLTKAERGGLSELDKAGFIKRQLVETRQITKHVAQILDSRMNTKYDENDKLIREVKVITLKSKLVSDFRKDFQFYKVREINNYHHAHDAYLNAVVGTALIKKYPKLESEFVYGDYKVYDVRKMIAKSEQEIGKATAKYFFYSNIMNFFKTEITLANGEIRKRPLIETNGETGEIVWDKGRDFATVRKVLSMPQVNIVKKTEVQTGGFSKESILPKRNSDKLIARKKDWDPKKYGGFDSPTVAYSVLVVAKVEKGKSKKLKSVKELLGITIMERSSFEKNPIDFLEAKGYKEVKKDLIIKLPKYSLFELENGRKRMLASAGELQKGNELALPSKYVNFLYLASHYEKLKGSPEDNEQKQLFVEQHKHYLDEIIEQISEFSKRVILADANLDKVLSAYNKHRDKPIREQAENIIHLFTLTNLGAPAAFKYFDTTIDRKRYTSTKEVLDATLIHQSITGLYETRIDLSQLGGDGGPAPAPGGTLNIEDEHRLHETSKEPDVSLGSTWLSDFPQAWAETGGMGLAVRQAPLIIPLKATSTPVSIKQYPMSQEARLGIKPHIQRLLDQGILVPCQSPWNTPLLPVKKPGTNDYRPVQDLREVNKRVEDIHPTVPNPYNLLSGLPPSHQWYTVLDLKDAFFCLRLHPTSQPLFAFEWRDPEMGISGQLTWTRLPQGFKNSPTLFNEALHRDLADFRIQHPDLILLQYVDDLLLAATSELDCQQGTRALLQTLGNLGYRASAKKAQICQKQVKYLGYLLKEGQRWLTEARKETVMGQPTPKTPRQLREFLGKAGFCRLFIPGFAEMAAPLYPLTKPGTLFNWGPDQQKAYQEIKQALLTAPALGLPDLTKPFELFVDEKQGYAKGVLTQKLGPWRRPVAYLSKKLDPVAAGWPPCLRMVAAIAVLTKDAGKLTMGQPLVILAPHAVEALVKQPPDRWLSNARMTHYQALLLDTDRVQFGPVVALNPATLLPLPEEGLQHNCLDILAEAHGTRPDLTDQPLPDADHTWYTDGSSLLQEGQRKAGAAVTTETEVIWAKALPAGTSAQRAELIALTQALKMAEGKKLNVYTDSRYAFATAHIHGEIYRRRGWLTSEGKEIKNKDEILALLKALFLPKRLSIIHCPGHQKGHSAEARGNRMADQAARKAAITETPDTSTLLAGKRTADGSEFEKRTADGSEFESPKKKAKVE

SEQ ID NO: 3067 - protein, 2096 aa, synthetic construct; identical to SEQ ID NO: 2787

SEQ ID NO: 3068 - protein, 2096 aa, synthetic construct
MPAAKRVKLDGGDKKYSIGLDIGTNSVGWAVITDEYKVPSKKFKVLGNTDRHSIKKNLIGALLFDSGETAEATRLKRTARRRYTRRKNRICYLQEIFSNEMAKVDDSFFHRLEESFLVEEDKKHERHPIFGNIVDEVAYHEKYPTIYHLRKKLVDSTDKADLRLIYLALAHMIKFRGHFLIEGDLNPDNSDVDKLFIQLVQTYNQLFEENPINASGVDAKAILSARLSKSRRLENLIAQLPGEKKNGLFGNLIALSLGLTPNFKSNFDLAEDAKLQLSKDTYDDDLDNLLAQIGDQYADLFLAAKNLSDAILLSDILRVNTEITKAPLSASMIKRYDEHHQDLTLLKALVRQQLPEKYKEIFFDQSKNGYAGYIDGGASQEEFYKFIKPILEKMDGTEELLVKLNREDLLRKQRTFDNGSIPHQIHLGELHAILRRQEDFYPFLKDNREKIEKILTFRIPYYVGPLARGNSRFAWMTRKSEETITPWNFEEVVDKGASAQSFIERMTNFDKNLPNEKVLPKHSLLYEYFTVYNELTKVKYVTEGMRKPAFLSGEQKKAIVDLLFKTNRKVTVKQLKEDYFKKIECFDSVEISGVEDRFNASLGTYHDLLKIIKDKDFLDNEENEDILEDIVLTLTLFEDREMIEERLKTYAHLFDDKVMKQLKRRRYTGWGRLSRKLINGIRDKQSGKTILDFLKSDGFANRNFMQLIHDDSLTFKEDIQKAQVSGQGDSLHEHIANLAGSPAIKKGILQTVKVVDELVKVMGRHKPENIVIEMARENQTTQKGQKNSRERMKRIEEGIKELGSQILKEHPVENTQLQNEKLYLYYLQNGRDMYVDQELDINRLSDYDVDHIVPQSFLKDDSIDNKVLTRSDKARGKSDNVPSEEVVKKMKNYWRQLLNAKLITQRKFDNLTKAERGGLSELDKAGFIKRQLVETRQITKHVAQILDSRMNTKYDENDKLIREVKVITLKSKLVSDFRKDFQFYKVREINNYHHAHDAYLNAVVGTALIKKYPKLESEFVYGDYKVYDVRKMIAKSEQEIGKATAKYFFYSNIMNFFKTEITLANGEIRKRPLIETNGETGEIVWDKGRDFATVRKVLSMPQVNIVKKTEVQTGGFSKESILPKRNSDKLIARKKDWDPKKYGGFDSPTVAYSVLVVAKVEKGKSKKLKSVKELLGITIMERSSFEKNPIDFLEAKGYKEVKKDLIIKLPKYSLFELENGRKRMLASAGELQKGNELALPSKYVNFLYLASHYEKLKGSPEDNEQKQLFVEQHKHYLDEIIEQISEFSKRVILADANLDKVLSAYNKHRDKPIREQAENIIHLFTLTNLGAPAAFKYFDTTIDRKRYTSTKEVLDATLIHQSITGLYETRIDLSQLGGDGGPAPEAAAKGGGGGTLNIEDEHRLHETSKEPDVSLGSTWLSDFPQAWAETGGMGLAVRQAPLIIPLKATSTPVSIKQYPMSQEARLGIKPHIQRLLDQGILVPCQSPWNTPLLPVKKPGTNDYRPVQDLREVNKRVEDIHPTVPNPYNLLSGLPPSHQWYTVLDLKDAFFCLRLHPTSQPLFAFEWRDPEMGISGQLTWTRLPQGFKNSPTLFNEALHRDLADFRIQHPDLILLQYVDDLLLAATSELDCQQGTRALLQTLGNLGYRASAKKAQICQKQVKYLGYLLKEGQRWLTEARKETVMGQPTPKTPRQLREFLGKAGFCRLFIPGFAEMAAPLYPLTKPGTLFNWGPDQQKAYQEIKQALLTAPALGLPDLTKPFELFVDEKQGYAKGVLTQKLGPWRRPVAYLSKKLDPVAAGWPPCLRMVAAIAVLTKDAGKLTMGQPLVILAPHAVEALVKQPPDRWLSNARMTHYQALLLDTDRVQFGPVVALNPATLLPLPEEGLQHNCLDILAEAHGTRPDLTDQPLPDADHTWYTDGSSLLQEGQRKAGAAVTTETEVIWAKALPAGTSAQRAELIALTQALKMAEGKKLNVYTDSRYAFATAHIHGEIYRRRGWLTSEGKEIKNKDEILALLKALFLPKRLSIIHCPGHQKGHSAEARGNRMADQAARKAAITETPDTSTLLAGKRTADGSEFEKRTADGSEFESPKKKAKVE

SEQ ID NO: 3069 - protein, 2088 aa, synthetic construct
MPAAKRVKLDGGDKKYSIGLDIGTNSVGWAVITDEYKVPSKKFKVLGNTDRHSIKKNLIGALLFDSGETAEATRLKRTARRRYTRRKNRICYLQEIFSNEMAKVDDSFFHRLEESFLVEEDKKHERHPIFGNIVDEVAYHEKYPTIYHLRKKLVDSTDKADLRLIYLALAHMIKFRGHFLIEGDLNPDNSDVDKLFIQLVQTYNQLFEENPINASGVDAKAILSARLSKSRRLENLIAQLPGEKKNGLFGNLIALSLGLTPNFKSNFDLAEDAKLQLSKDTYDDDLDNLLAQIGDQYADLFLAAKNLSDAILLSDILRVNTEITKAPLSASMIKRYDEHHQDLTLLKALVRQQLPEKYKEIFFDQSKNGYAGYIDGGASQEEFYKFIKPILEKMDGTEELLVKLNREDLLRKQRTFDNGSIPHQIHLGELHAILRRQEDFYPFLKDNREKIEKILTFRIPYYVGPLARGNSRFAWMTRKSEETITPWNFEEVVDKGASAQSFIERMTNFDKNLPNEKVLPKHSLLYEYFTVYNELTKVKYVTEGMRKPAFLSGEQKKAIVDLLFKTNRKVTVKQLKEDYFKKIECFDSVEISGVEDRFNASLGTYHDLLKIIKDKDFLDNEENEDILEDIVLTLTLFEDREMIEERLKTYAHLFDDKVMKQLKRRRYTGWGRLSRKLINGIRDKQSGKTILDFLKSDGFANRNFMQLIHDDSLTFKEDIQKAQVSGQGDSLHEHIANLAGSPAIKKGILQTVKVVDELVKVMGRHKPENIVIEMARENQTTQKGQKNSRERMKRIEEGIKELGSQILKEHPVENTQLQNEKLYLYYLQNGRDMYVDQELDINRLSDYDVDHIVPQSFLKDDSIDNKVLTRSDKARGKSDNVPSEEVVKKMKNYWRQLLNAKLITQRKFDNLTKAERGGLSELDKAGFIKRQLVETRQITKHVAQILDSRMNTKYDENDKLIREVKVITLKSKLVSDFRKDFQFYKVREINNYHHAHDAYLNAVVGTALIKKYPKLESEFVYGDYKVYDVRKMIAKSEQEIGKATAKYFFYSNIMNFFKTEITLANGEIRKRPLIETNGETGEIVWDKGRDFATVRKVLSMPQVNIVKKTEVQTGGFSKESILPKRNSDKLIARKKDWDPKKYGGFDSPTVAYSVLVVAKVEKGKSKKLKSVKELLGITIMERSSFEKNPIDFLEAKGYKEVKKDLIIKLPKYSLFELENGRKRMLASAGELQKGNELALPSKYVNFLYLASHYEKLKGSPEDNEQKQLFVEQHKHYLDEIIEQISEFSKRVILADANLDKVLSAYNKHRDKPIREQAENIIHLFTLTNLGAPAAFKYFDTTIDRKRYTSTKEVLDATLIHQSITGLYETRIDLSQLGGDGGGSSGGTLNIEDEHRLHETSKEPDVSLGSTWLSDFPQAWAETGGMGLAVRQAPLIIPLKATSTPVSIKQYPMSQEARLGIKPHIQRLLDQGILVPCQSPWNTPLLPVKKPGTNDYRPVQDLREVNKRVEDIHPTVPNPYNLLSGLPPSHQWYTVLDLKDAFFCLRLHPTSQPLFAFEWRDPEMGISGQLTWTRLPQGFKNSPTLFNEALHRDLADFRIQHPDLILLQYVDDLLLAATSELDCQQGTRALLQTLGNLGYRASAKKAQICQKQVKYLGYLLKEGQRWLTEARKETVMGQPTPKTPRQLREFLGKAGFCRLFIPGFAEMAAPLYPLTKPGTLFNWGPDQQKAYQEIKQALLTAPALGLPDLTKPFELFVDEKQGYAKGVLTQKLGPWRRPVAYLSKKLDPVAAGWPPCLRMVAAIAVLTKDAGKLTMGQPLVILAPHAVEALVKQPPDRWLSNARMTHYQALLLDTDRVQFGPVVALNPATLLPLPEEGLQHNCLDILAEAHGTRPDLTDQPLPDADHTWYTDGSSLLQEGQRKAGAAVTTETEVIWAKALPAGTSAQRAELIALTQALKMAEGKKLNVYTDSRYAFATAHIHGEIYRRRGWLTSEGKEIKNKDEILALLKALFLPKRLSIIHCPGHQKGHSAEARGNRMADQAARKAAITETPDTSTLLAGKRTADGSEFEKRTADGSEFESPKKKAKVE

SEQ ID NO: 3070 - protein, 2094 aa, synthetic construct; identical to SEQ ID NO: 2809

SEQ ID NO: 3071 - protein, 2097 aa, synthetic construct; identical to SEQ ID NO: 2806

SEQ ID NO: 3072 - protein, 2096 aa, synthetic construct
MPAAKRVKLDGGDKKYSIGLDIGTNSVGWAVITDEYKVPSKKFKVLGNTDRHSIKKNLIGALLFDSGETAEATRLKRTARRRYTRRKNRICYLQEIFSNEMAKVDDSFFHRLEESFLVEEDKKHERHPIFGNIVDEVAYHEKYPTIYHLRKKLVDSTDKADLRLIYLALAHMIKFRGHFLIEGDLNPDNSDVDKLFIQLVQTYNQLFEENPINASGVDAKAILSARLSKSRRLENLIAQLPGEKKNGLFGNLIALSLGLTPNFKSNFDLAEDAKLQLSKDTYDDDLDNLLAQIGDQYADLFLAAKNLSDAILLSDILRVNTEITKAPLSASMIKRYDEHHQDLTLLKALVRQQLPEKYKEIFFDQSKNGYAGYIDGGASQEEFYKFIKPILEKMDGTEELLVKLNREDLLRKQRTFDNGSIPHQIHLGELHAILRRQEDFYPFLKDNREKIEKILTFRIPYYVGPLARGNSRFAWMTRKSEETITPWNFEEVVDKGASAQSFIERMTNFDKNLPNEKVLPKHSLLYEYFTVYNELTKVKYVTEGMRKPAFLSGEQKKAIVDLLFKTNRKVTVKQLKEDYFKKIECFDSVEISGVEDRFNASLGTYHDLLKIIKDKDFLDNEENEDILEDIVLTLTLFEDREMIEERLKTYAHLFDDKVMKQLKRRRYTGWGRLSRKLINGIRDKQSGKTILDFLKSDGFANRNFMQLIHDDSLTFKEDIQKAQVSGQGDSLHEHIANLAGSPAIKKGILQTVKVVDELVKVMGRHKPENIVIEMARENQTTQKGQKNSRERMKRIEEGIKELGSQILKEHPVENTQLQNEKLYLYYLQNGRDMYVDQELDINRLSDYDVDHIVPQSFLKDDSIDNKVLTRSDKARGKSDNVPSEEVVKKMKNYWRQLLNAKLITQRKFDNLTKAERGGLSELDKAGFIKRQLVETRQITKHVAQILDSRMNTKYDENDKLIREVKVITLKSKLVSDFRKDFQFYKVREINNYHHAHDAYLNAVVGTALIKKYPKLESEFVYGDYKVYDVRKMIAKSEQEIGKATAKYFFYSNIMNFFKTEITLANGEIRKRPLIETNGETGEIVWDKGRDFATVRKVLSMPQVNIVKKTEVQTGGFSKESILPKRNSDKLIARKKDWDPKKYGGFDSPTVAYSVLVVAKVEKGKSKKLKSVKELLGITIMERSSFEKNPIDFLEAKGYKEVKKDLIIKLPKYSLFELENGRKRMLASAGELQKGNELALPSKYVNFLYLASHYEKLKGSPEDNEQKQLFVEQHKHYLDEIIEQISEFSKRVILADANLDKVLSAYNKHRDKPIREQAENIIHLFTLTNLGAPAAFKYFDTTIDRKRYTSTKEVLDATLIHQSITGLYETRIDLSQLGGDGGGSSEAAAKGGGGGTLNIEDEHRLHETSKEPDVSLGSTWLSDFPQAWAETGGMGLAVRQAPLIIPLKATSTPVSIKQYPMSQEARLGIKPHIQRLLDQGILVPCQSPWNTPLLPVKKPGTNDYRPVQDLREVNKRVEDIHPTVPNPYNLLSGLPPSHQWYTVLDLKDAFFCLRLHPTSQPLFAFEWRDPEMGISGQLTWTRLPQGFKNSPTLFNEALHRDLADFRIQHPDLILLQYVDDLLLAATSELDCQQGTRALLQTLGNLGYRASAKKAQICQKQVKYLGYLLKEGQRWLTEARKETVMGQPTPKTPRQLREFLGKAGFCRLFIPGFAEMAAPLYPLTKPGTLFNWGPDQQKAYQEIKQALLTAPALGLPDLTKPFELFVDEKQGYAKGVLTQKLGPWRRPVAYLSKKLDPVAAGWPPCLRMVAAIAVLTKDAGKLTMGQPLVILAPHAVEALVKQPPDRWLSNARMTHYQALLLDTDRVQFGPVVALNPATLLPLPEEGLQHNCLDILAEAHGTRPDLTDQPLPDADHTWYTDGSSLLQEGQRKAGAAVTTETEVIWAKALPAGTSAQRAELIALTQALKMAEGKKLNVYTDSRYAFATAHIHGEIYRRRGWLTSEGKEIKNKDEILALLKALFLPKRLSIIHCPGHQKGHSAEARGNRMADQAARKAAITETPDTSTLLAGKRTADGSEFEKRTADGSEFESPKKKAKVE

SEQ ID NO: 3073 - protein, 2091 aa, synthetic construct
MPAAKRVKLDGGDKKYSIGLDIGTNSVGWAVITDEYKVPSKKFKVLGNTDRHSIKKNLIGALLFDSGETAEATRLKRTARRRYTRRKNRICYLQEIFSNEMAKVDDSFFHRLEESFLVEEDKKHERHPIFGNIVDEVAYHEKYPTIYHLRKKLVDSTDKADLRLIYLALAHMIKFRGHFLIEGDLNPDNSDVDKLFIQLVQTYNQLFEENPINASGVDAKAILSARLSKSRRLENLIAQLPGEKKNGLFGNLIALSLGLTPNFKSNFDLAEDAKLQLSKDTYDDDLDNLLAQIGDQYADLFLAAKNLSDAILLSDILRVNTEITKAPLSASMIKRYDEHHQDLTLLKALVRQQLPEKYKEIFFDQSKNGYAGYIDGGASQEEFYKFIKPILEKMDGTEELLVKLNREDLLRKQRTFDNGSIPHQIHLGELHAILRRQEDFYPFLKDNREKIEKILTFRIPYYVGPLARGNSRFAWMTRKSEETITPWNFEEVVDKGASAQSFIERMTNFDKNLPNEKVLPKHSLLYEYFTVYNELTKVKYVTEGMRKPAFLSGEQKKAIVDLLFKTNRKVTVKQLKEDYFKKIECFDSVEISGVEDRFNASLGTYHDLLKIIKDKDFLDNEENEDILEDIVLTLTLFEDREMIEERLKTYAHLFDDKVMKQLKRRRYTGWGRLSRKLINGIRDKQSGKTILDFLKSDGFANRNFMQLIHDDSLTFKEDIQKAQVSGQGDSLHEHIANLAGSPAIKKGILQTVKVVDELVKVMGRHKPENIVIEMARENQTTQKGQKNSRERMKRIEEGIKELGSQILKEHPVENTQLQNEKLYLYYLQNGRDMYVDQELDINRLSDYDVDHIVPQSFLKDDSIDNKVLTRSDKARGKSDNVPSEEVVKKMKNYWRQLLNAKLITQRKFDNLTKAERGGLSELDKAGFIKRQLVETRQITKHVAQILDSRMNTKYDENDKLIREVKVITLKSKLVSDFRKDFQFYKVREINNYHHAHDAYLNAVVGTALIKKYPKLESEFVYGDYKVYDVRKMIAKSEQEIGKATAKYFFYSNIMNFFKTEITLANGEIRKRPLIETNGETGEIVWDKGRDFATVRKVLSMPQVNIVKKTEVQTGGFSKESILPKRNSDKLIARKKDWDPKKYGGFDSPTVAYSVLVVAKVEKGKSKKLKSVKELLGITIMERSSFEKNPIDFLEAKGYKEVKKDLIIKLPKYSLFELENGRKRMLASAGELQKGNELALPSKYVNFLYLASHYEKLKGSPEDNEQKQLFVEQHKHYLDEIIEQISEFSKRVILADANLDKVLSAYNKHRDKPIREQAENIIHLFTLTNLGAPAAFKYFDTTIDRKRYTSTKEVLDATLIHQSITGLYETRIDLSQLGGDGGGGGPAPGGTLNIEDEHRLHETSKEPDVSLGSTWLSDFPQAWAETGGMGLAVRQAPLIIPLKATSTPVSIKQYPMSQEARLGIKPHIQRLLDQGILVPCQSPWNTPLLPVKKPGTNDYRPVQDLREVNKRVEDIHPTVPNPYNLLSGLPPSHQWYTVLDLKDAFFCLRLHPTSQPLFAFEWRDPEMGISGQLTWTRLPQGFKNSPTLFNEALHRDLADFRIQHPDLILLQYVDDLLLAATSELDCQQGTRALLQTLGNLGYRASAKKAQICQKQVKYLGYLLKEGQRWLTEARKETVMGQPTPKTPRQLREFLGKAGFCRLFIPGFAEMAAPLYPLTKPGTLFNWGPDQQKAYQEIKQALLTAPALGLPDLTKPFELFVDEKQGYAKGVLTQKLGPWRRPVAYLSKKLDPVAAGWPPCLRMVAAIAVLTKDAGKLTMGQPLVILAPHAVEALVKQPPDRWLSNARMTHYQALLLDTDRVQFGPVVALNPATLLPLPEEGLQHNCLDILAEAHGTRPDLTDQPLPDADHTWYTDGSSLLQEGQRKAGAAVTTETEVIWAKALPAGTSAQRAELIALTQALKMAEGKKLNVYTDSRYAFATAHIHGEIYRRRGWLTSEGKEIKNKDEILALLKALFLPKRLSIIHCPGHQKGHSAEARGNRMADQAARKAAITETPDTSTLLAGKRTADGSEFEKRTADGSEFESPKKKAKVE

SEQ ID NO: 3074 - protein, 2091 aa, synthetic construct; identical to SEQ ID NO: 2853

SEQ ID NO: 3075 - protein, 2094 aa, synthetic construct
MPAAKRVKLDGGDKKYSIGLDIGTNSVGWAVITDEYKVPSKKFKVLGNTDRHSIKKNLIGALLFDSGETAEATRLKRTARRRYTRRKNRICYLQEIFSNEMAKVDDSFFHRLEESFLVEEDKKHERHPIFGNIVDEVAYHEKYPTIYHLRKKLVDSTDKADLRLIYLALAHMIKFRGHFLIEGDLNPDNSDVDKLFIQLVQTYNQLFEENPINASGVDAKAILSARLSKSRRLENLIAQLPGEKKNGLFGNLIALSLGLTPNFKSNFDLAEDAKLQLSKDTYDDDLDNLLAQIGDQYADLFLAAKNLSDAILLSDILRVNTEITKAPLSASMIKRYDEHHQDLTLLKALVRQQLPEKYKEIFFDQSKNGYAGYIDGGASQEEFYKFIKPILEKMDGTEELLVKLNREDLLRKQRTFDNGSIPHQIHLGELHAILRRQEDFYPFLKDNREKIEKILTFRIPYYVGPLARGNSRFAWMTRKSEETITPWNFEEVVDKGASAQSFIERMTNFDKNLPNEKVLPKHSLLYEYFTVYNELTKVKYVTEGMRKPAFLSGEQKKAIVDLLFKTNRKVTVKQLKEDYFKKIECFDSVEISGVEDRFNASLGTYHDLLKIIKDKDFLDNEENEDILEDIVLTLTLFEDREMIEERLKTYAHLFDDKVMKQLKRRRYTGWGRLSRKLINGIRDKQSGKTILDFLKSDGFANRNFMQLIHDDSLTFKEDIQKAQVSGQGDSLHEHIANLAGSPAIKKGILQTVKVVDELVKVMGRHKPENIVIEMARENQTTQKGQKNSRERMKRIEEGIKELGSQILKEHPVENTQLQNEKLYLYYLQNGRDMYVDQELDINRLSDYDVDHIVPQSFLKDDSIDNKVLTRSDKARGKSDNVPSEEVVKKMKNYWRQLLNAKLITQRKFDNLTKAERGGLSELDKAGFIKRQLVETRQITKHVAQILDSRMNTKYDENDKLIREVKVITLKSKLVSDFRKDFQFYKVREINNYHHAHDAYLNAVVGTALIKKYPKLESEFVYGDYKVYDVRKMIAKSEQEIGKATAKYFFYSNIMNFFKTEITLANGEIRKRPLIETNGETGEIVWDKGRDFATVRKVLSMPQVNIVKKTEVQTGGFSKESILPKRNSDKLIARKKDWDPKKYGGFDSPTVAYSVLVVAKVEKGKSKKLKSVKELLGITIMERSSFEKNPIDFLEAKGYKEVKKDLIIKLPKYSLFELENGRKRMLASAGELQKGNELALPSKYVNFLYLASHYEKLKGSPEDNEQKQLFVEQHKHYLDEIIEQISEFSKRVILADANLDKVLSAYNKHRDKPIREQAENIIHLFTLTNLGAPAAFKYFDTTIDRKRYTSTKEVLDATLIHQSITGLYETRIDLSQLGGDGGGSSGGSPAPGGTLNIEDEHRLHETSKEPDVSLGSTWLSDFPQAWAETGGMGLAVRQAPLIIPLKATSTPVSIKQYPMSQEARLGIKPHIQRLLDQGILVPCQSPWNTPLLPVKKPGTNDYRPVQDLREVNKRVEDIHPTVPNPYNLLSGLPPSHQWYTVLDLKDAFFCLRLHPTSQPLFAFEWRDPEMGISGQLTWTRLPQGFKNSPTLFNEALHRDLADFRIQHPDLILLQYVDDLLLAATSELDCQQGTRALLQTLGNLGYRASAKKAQICQKQVKYLGYLLKEGQRWLTEARKETVMGQPTPKTPRQLREFLGKAGFCRLFIPGFAEMAAPLYPLTKPGTLFNWGPDQQKAYQEIKQALLTAPALGLPDLTKPFELFVDEKQGYAKGVLTQKLGPWRRPVAYLSKKLDPVAAGWPPCLRMVAAIAVLTKDAGKLTMGQPLVILAPHAVEALVKQPPDRWLSNARMTHYQALLLDTDRVQFGPVVALNPATLLPLPEEGLQHNCLDILAEAHGTRPDLTDQPLPDADHTWYTDGSSLLQEGQRKAGAAVTTETEVIWAKALPAGTSAQRAELIALTQALKMAEGKKLNVYTDSRYAFATAHIHGEIYRRRGWLTSEGKEIKNKDEILALLKALFLPKRLSIIHCPGHQKGHSAEARGNRMADQAARKAAITETPDTSTLLAGKRTADGSEFEKRTADGSEFESPKKKAKVE

SEQ ID NO: 3076 - protein, 2091 aa, synthetic construct; identical to SEQ ID NO: 2780

SEQ ID NO: 3077 - protein, 2101 aa, synthetic construct; identical to SEQ ID NO: 2858

SEQ ID NO: 3078 - protein, 2093 aa, synthetic construct; identical to SEQ ID NO: 2821

SEQ ID NO: 3079 - protein, 2100 aa, synthetic construct; identical to SEQ ID NO: 2788

SEQ ID NO: 3080 - protein, 2096 aa, synthetic construct
MPAAKRVKLDGGDKKYSIGLDIGTNSVGWAVITDEYKVPSKKFKVLGNTDRHSIKKNLIGALLFDSGETAEATRLKRTARRRYTRRKNRICYLQEIFSNEMAKVDDSFFHRLEESFLVEEDKKHERHPIFGNIVDEVAYHEKYPTIYHLRKKLVDSTDKADLRLIYLALAHMIKFRGHFLIEGDLNPDNSDVDKLFIQLVQTYNQLFEENPINASGVDAKAILSARLSKSRRLENLIAQLPGEKKNGLFGNLIALSLGLTPNFKSNFDLAEDAKLQLSKDTYDDDLDNLLAQIGDQYADLFLAAKNLSDAILLSDILRVNTEITKAPLSASMIKRYDEHHQDLTLLKALVRQQLPEKYKEIFFDQSKNGYAGYIDGGASQEEFYKFIKPILEKMDGTEELLVKLNREDLLRKQRTFDNGSIPHQIHLGELHAILRRQEDFYPFLKDNREKIEKILTFRIPYYVGPLARGNSRFAWMTRKSEETITPWNFEEVVDKGASAQSFIERMTNFDKNLPNEKVLPKHSLLYEYFTVYNELTKVKYVTEGMRKPAFLSGEQKKAIVDLLFKTNRKVTVKQLKEDYFKKIECFDSVEISGVEDRFNASLGTYHDLLKIIKDKDFLDNEENEDILEDIVLTLTLFEDREMIEERLKTYAHLFDDKVMKQLKRRRYTGWGRLSRKLINGIRDKQSGKTILDFLKSDGFANRNFMQLIHDDSLTFKEDIQKAQVSGQGDSLHEHIANLAGSPAIKKGILQTVKVVDELVKVMGRHKPENIVIEMARENQTTQKGQKNSRERMKRIEEGIKELGSQILKEHPVENTQLQNEKLYLYYLQNGRDMYVDQELDINRLSDYDVDHIVPQSFLKDDSIDNKVLTRSDKARGKSDNVPSEEVVKKMKNYWRQLLNAKLITQRKFDNLTKAERGGLSELDKAGFIKRQLVETRQITKHVAQILDSRMNTKYDENDKLIREVKVITLKSKLVSDFRKDFQFYKVREINNYHHAHDAYLNAVVGTALIKKYPKLESEFVYGDYKVYDVRKMIAKSEQEIGKATAKYFFYSNIMNFFKTEITLANGEIRKRPLIETNGETGEIVWDKGRDFATVRKVLSMPQVNIVKKTEVQTGGFSKESILPKRNSDKLIARKKDWDPKKYGGFDSPTVAYSVLVVAKVEKGKSKKLKSVKELLGITIMERSSFEKNPIDFLEAKGYKEVKKDLIIKLPKYSLFELENGRKRMLASAGELQKGNELALPSKYVNFLYLASHYEKLKGSPEDNEQKQLFVEQHKHYLDEIIEQISEFSKRVILADANLDKVLSAYNKHRDKPIREQAENIIHLFTLTNLGAPAAFKYFDTTIDRKRYTSTKEVLDATLIHQSITGLYETRIDLSQLGGDGGEAAAKPAPGGSGGTLNIEDEHRLHETSKEPDVSLGSTWLSDFPQAWAETGGMGLAVRQAPLIIPLKATSTPVSIKQYPMSQEARLGIKPHIQRLLDQGILVPCQSPWNTPLLPVKKPGTNDYRPVQDLREVNKRVEDIHPTVPNPYNLLSGLPPSHQWYTVLDLKDAFFCLRLHPTSQPLFAFEWRDPEMGISGQLTWTRLPQGFKNSPTLFNEALHRDLADFRIQHPDLILLQYVDDLLLAATSELDCQQGTRALLQTLGNLGYRASAKKAQICQKQVKYLGYLLKEGQRWLTEARKETVMGQPTPKTPRQLREFLGKAGFCRLFIPGFAEMAAPLYPLTKPGTLFNWGPDQQKAYQEIKQALLTAPALGLPDLTKPFELFVDEKQGYAKGVLTQKLGPWRRPVAYLSKKLDPVAAGWPPCLRMVAAIAVLTKDAGKLTMGQPLVILAPHAVEALVKQPPDRWLSNARMTHYQALLLDTDRVQFGPVVALNPATLLPLPEEGLQHNCLDILAEAHGTRPDLTDQPLPDADHTWYTDGSSLLQEGQRKAGAAVTTETEVIWAKALPAGTSAQRAELIALTQALKMAEGKKLNVYTDSRYAFATAHIHGEIYRRRGWLTSEGKEIKNKDEILALLKALFLPKRLSIIHCPGHQKGHSAEARGNRMADQAARKAAITETPDTSTLLAGKRTADGSEFEKRTADGSEFESPKKKAKVE

SEQ ID NO: 3081 - protein, 2115 aa, synthetic construct; identical to SEQ ID NO: 2827

SEQ ID NO: 3082 - protein, 2093 aa, synthetic construct; identical to SEQ ID NO: 2856

SEQ ID NO: 3083 - protein, 2096 aa, synthetic construct; identical to SEQ ID NO: 2786

SEQ ID NO: 3084 - protein, 2098 aa, synthetic construct; identical to SEQ ID NO: 2797

SEQ ID NO: 3085 - protein, 2096 aa, synthetic construct; identical to SEQ ID NO: 2830

SEQ ID NO: 3086 - protein, 2094 aa, synthetic construct
MPAAKRVKLDGGDKKYSIGLDIGTNSVGWAVITDEYKVPSKKFKVLGNTDRHSIKKNLIGALLFDSGETAEATRLKRTARRRYTRRKNRICYLQEIFSNEMAKVDDSFFHRLEESFLVEEDKKHERHPIFGNIVDEVAYHEKYPTIYHLRKKLVDSTDKADLRLIYLALAHMIKFRGHFLIEGDLNPDNSDVDKLFIQLVQTYNQLFEENPINASGVDAKAILSARLSKSRRLENLIAQLPGEKKNGLFGNLIALSLGLTPNFKSNFDLAEDAKLQLSKDTYDDDLDNLLAQIGDQYADLFLAAKNLSDAILLSDILRVNTEITKAPLSASMIKRYDEHHQDLTLLKALVRQQLPEKYKEIFFDQSKNGYAGYIDGGASQEEFYKFIKPILEKMDGTEELLVKLNREDLLRKQRTFDNGSIPHQIHLGELHAILRRQEDFYPFLKDNREKIEKILTFRIPYYVGPLARGNSRFAWMTRKSEETITPWNFEEVVDKGASAQSFIERMTNFDKNLPNEKVLPKHSLLYEYFTVYNELTKVKYVTEGMRKPAFLSGEQKKAIVDLLFKTNRKVTVKQLKEDYFKKIECFDSVEISGVEDRFNASLGTYHDLLKIIKDKDFLDNEENEDILEDIVLTLTLFEDREMIEERLKTYAHLFDDKVMKQLKRRRYTGWGRLSRKLINGIRDKQSGKTILDFLKSDGFANRNFMQLIHDDSLTFKEDIQKAQVSGQGDSLHEHIANLAGSPAIKKGILQTVKVVDELVKVMGRHKPENIVIEMARENQTTQKGQKNSRERMKRIEEGIKELGSQILKEHPVENTQLQNEKLYLYYLQNGRDMYVDQELDINRLSDYDVDHIVPQSFLKDDSIDNKVLTRSDKARGKSDNVPSEEVVKKMKNYWRQLLNAKLITQRKFDNLTKAERGGLSELDKAGFIKRQLVETRQITKHVAQILDSRMNTKYDENDKLIREVKVITLKSKLVSDFRKDFQFYKVREINNYHHAHDAYLNAVVGTALIKKYPKLESEFVYGDYKVYDVRKMIAKSEQEIGKATAKYFFYSNIMNFFKTEITLANGEIRKRPLIETNGETGEIVWDKGRDFATVRKVLSMPQVNIVKKTEVQTGGFSKESILPKRNSDKLIARKKDWDPKKYGGFDSPTVAYSVLVVAKVEKGKSKKLKSVKELLGITIMERSSFEKNPIDFLEAKGYKEVKKDLIIKLPKYSLFELENGRKRMLASAGELQKGNELALPSKYVNFLYLASHYEKLKGSPEDNEQKQLFVEQHKHYLDEIIEQISEFSKRVILADANLDKVLSAYNKHRDKPIREQAENIIHLFTLTNLGAPAAFKYFDTTIDRKRYTSTKEVLDATLIHQSITGLYETRIDLSQLGGDGGPAPAPAPAPGGTLNIEDEHRLHETSKEPDVSLGSTWLSDFPQAWAETGGMGLAVRQAPLIIPLKATSTPVSIKQYPMSQEARLGIKPHIQRLLDQGILVPCQSPWNTPLLPVKKPGTNDYRPVQDLREVNKRVEDIHPTVPNPYNLLSGLPPSHQWYTVLDLKDAFFCLRLHPTSQPLFAFEWRDPEMGISGQLTWTRLPQGFKNSPTLFNEALHRDLADFRIQHPDLILLQYVDDLLLAATSELDCQQGTRALLQTLGNLGYRASAKKAQICQKQVKYLGYLLKEGQRWLTEARKETVMGQPTPKTPRQLREFLGKAGFCRLFIPGFAEMAAPLYPLTKPGTLFNWGPDQQKAYQEIKQALLTAPALGLPDLTKPFELFVDEKQGYAKGVLTQKLGPWRRPVAYLSKKLDPVAAGWPPCLRMVAAIAVLTKDAGKLTMGQPLVILAPHAVEALVKQPPDRWLSNARMTHYQALLLDTDRVQFGPVVALNPATLLPLPEEGLQHNCLDILAEAHGTRPDLTDQPLPDADHTWYTDGSSLLQEGQRKAGAAVTTETEVIWAKALPAGTSAQRAELIALTQALKMAEGKKLNVYTDSRYAFATAHIHGEIYRRRGWLTSEGKEIKNKDEILALLKALFLPKRLSIIHCPGHQKGHSAEARGNRMADQAARKAAITETPDTSTLLAGKRTADGSEFEKRTADGSEFESPKKKAKVE

SEQ ID NO: 3087 - protein, 2091 aa, synthetic construct; identical to SEQ ID NO: 2808

SEQ ID NO: 3088 - protein, 2096 aa, synthetic construct; identical to SEQ ID NO: 2857

SEQ ID NO: 3089 - protein, 2091 aa, synthetic construct; identical to SEQ ID NO: 2855

SEQ ID NO: 3090 - protein, 2094 aa, synthetic construct; identical to SEQ ID NO: 2847

SEQ ID NO: 3091 - protein, 2096 aa, synthetic construct; identical to SEQ ID NO: 2798

SEQ ID NO: 3092 - protein, 2100 aa, synthetic construct; identical to SEQ ID NO: 2819

SEQ ID NO: 3093 - protein, 2094 aa, synthetic construct; identical to SEQ ID NO: 2835

SEQ ID NO: 3094 - protein, 2089 aa, synthetic construct
MPAAKRVKLDGGDKKYSIGLDIGTNSVGWAVITDEYKVPSKKFKVLGNTDRHSIKKNLIGALLFDSGETAEATRLKRTARRRYTRRKNRICYLQEIFSNEMAKVDDSFFHRLEESFLVEEDKKHERHPIFGNIVDEVAYHEKYPTIYHLRKKLVDSTDKADLRLIYLALAHMIKFRGHFLIEGDLNPDNSDVDKLFIQLVQTYNQLFEENPINASGVDAKAILSARLSKSRRLENLIAQLPGEKKNGLFGNLIALSLGLTPNFKSNFDLAEDAKLQLSKDTYDDDLDNLLAQIGDQYADLFLAAKNLSDAILLSDILRVNTEITKAPLSASMIKRYDEHHQDLTLLKALVRQQLPEKYKEIFFDQSKNGYAGYIDGGASQEEFYKFIKPILEKMDGTEELLVKLNREDLLRKQRTFDNGSIPHQIHLGELHAILRRQEDFYPFLKDNREKIEKILTFRIPYYVGPLARGNSRFAWMTRKSEETITPWNFEEVVDKGASAQSFIERMTNFDKNLPNEKVLPKHSLLYEYFTVYNELTKVKYVTEGMRKPAFLSGEQKKAIVDLLFKTNRKVTVKQLKEDYFKKIECFDSVEISGVEDRFNASLGTYHDLLKIIKDKDFLDNEENEDILEDIVLTLTLFEDREMIEERLKTYAHLFDDKVMKQLKRRRYTGWGRLSRKLINGIRDKQSGKTILDFLKSDGFANRNFMQLIHDDSLTFKEDIQKAQVSGQGDSLHEHIANLAGSPAIKKGILQTVKVVDELVKVMGRHKPENIVIEMARENQTTQKGQKNSRERMKRIEEGIKELGSQILKEHPVENTQLQNEKLYLYYLQNGRDMYVDQELDINRLSDYDVDHIVPQSFLKDDSIDNKVLTRSDKARGKSDNVPSEEVVKKMKNYWRQLLNAKLITQRKFDNLTKAERGGLSELDKAGFIKRQLVETRQITKHVAQILDSRMNTKYDENDKLIREVKVITLKSKLVSDFRKDFQFYKVREINNYHHAHDAYLNAVVGTALIKKYPKLESEFVYGDYKVYDVRKMIAKSEQEIGKATAKYFFYSNIMNFFKTEITLANGEIRKRPLIETNGETGEIVWDKGRDFATVRKVLSMPQVNIVKKTEVQTGGFSKESILPKRNSDKLIARKKDWDPKKYGGFDSPTVAYSVLVVAKVEKGKSKKLKSVKELLGITIMERSSFEKNPIDFLEAKGYKEVKKDLIIKLPKYSLFELENGRKRMLASAGELQKGNELALPSKYVNFLYLASHYEKLKGSPEDNEQKQLFVEQHKHYLDEIIEQISEFSKRVILADANLDKVLSAYNKHRDKPIREQAENIIHLFTLTNLGAPAAFKYFDTTIDRKRYTSTKEVLDATLIHQSITGLYETRIDLSQLGGDGGGGGGGGTLNIEDEHRLHETSKEPDVSLGSTWLSDFPQAWAETGGMGLAVRQAPLIIPLKATSTPVSIKQYPMSQEARLGIKPHIQRLLDQGILVPCQSPWNTPLLPVKKPGTNDYRPVQDLREVNKRVEDIHPTVPNPYNLLSGLPPSHQWYTVLDLKDAFFCLRLHPTSQPLFAFEWRDPEMGISGQLTWTRLPQGFKNSPTLFNEALHRDLADFRIQHPDLILLQYVDDLLLAATSELDCQQGTRALLQTLGNLGYRASAKKAQICQKQVKYLGYLLKEGQRWLTEARKETVMGQPTPKTPRQLREFLGKAGFCRLFIPGFAEMAAPLYPLTKPGTLFNWGPDQQKAYQEIKQALLTAPALGLPDLTKPFELFVDEKQGYAKGVLTQKLGPWRRPVAYLSKKLDPVAAGWPPCLRMVAAIAVLTKDAGKLTMGQPLVILAPHAVEALVKQPPDRWLSNARMTHYQALLLDTDRVQFGPVVALNPATLLPLPEEGLQHNCLDILAEAHGTRPDLTDQPLPDADHTWYTDGSSLLQEGQRKAGAAVTTETEVIWAKALPAGTSAQRAELIALTQALKMAEGKKLNVYTDSRYAFATAHIHGEIYRRRGWLTSEGKEIKNKDEILALLKALFLPKRLSIIHCPGHQKGHSAEARGNRMADQAARKAAITETPDTSTLLAGKRTADGSEFEKRTADGSEFESPKKKAKVE

SEQ ID NO: 3095 - protein, 2088 aa, synthetic construct
MPAAKRVKLDGGDKKYSIGLDIGTNSVGWAVITDEYKVPSKKFKVLGNTDRHSIKKNLIGALLFDSGETAEATRLKRTARRRYTRRKNRICYLQEIFSNEMAKVDDSFFHRLEESFLVEEDKKHERHPIFGNIVDEVAYHEKYPTIYHLRKKLVDSTDKADLRLIYLALAHMIKFRGHFLIEGDLNPDNSDVDKLFIQLVQTYNQLFEENPINASGVDAKAILSARLSKSRRLENLIAQLPGEKKNGLFGNLIALSLGLTPNFKSNFDLAEDAKLQLSKDTYDDDLDNLLAQIGDQYADLFLAAKNLSDAILLSDILRVNTEITKAPLSASMIKRYDEHHQDLTLLKALVRQQLPEKYKEIFFDQSKNGYAGYIDGGASQEEFYKFIKPILEKMDGTEELLVKLNREDLLRKQRTFDNGSIPHQIHLGELHAILRRQEDFYPFLKDNREKIEKILTFRIPYYVGPLARGNSRFAWMTRKSEETITPWNFEEVVDKGASAQSFIERMTNFDKNLPNEKVLPKHSLLYEYFTVYNELTKVKYVTEGMRKPAFLSGEQKKAIVDLLFKTNRKVTVKQLKEDYFKKIECFDSVEISGVEDRFNASLGTYHDLLKIIKDKDFLDNEENEDILEDIVLTLTLFEDREMIEERLKTYAHLFDDKVMKQLKRRRYTGWGRLSRKLINGIRDKQSGKTILDFLKSDGFANRNFMQLIHDDSLTFKEDIQKAQVSGQGDSLHEHIANLAGSPAIKKGILQTVKVVDELVKVMGRHKPENIVIEMARENQTTQKGQKNSRERMKRIEEGIKELGSQILKEHPVENTQLQNEKLYLYYLQNGRDMYVDQELDINRLSDYDVDHIVPQSFLKDDSIDNKVLTRSDKARGKSDNVPSEEVVKKMKNYWRQLLNAKLITQRKFDNLTKAERGGLSELDKAGFIKRQLVETRQITKHVAQILDSRMNTKYDENDKLIREVKVITLKSKLVSDFRKDFQFYKVREINNYHHAHDAYLNAVVGTALIKKYPKLESEFVYGDYKVYDVRKMIAKSEQEIGKATAKYFFYSNIMNFFKTEITLANGEIRKRPLIETNGETGEIVWDKGRDFATVRKVLSMPQVNIVKKTEVQTGGFSKESILPKRNSDKLIARKKDWDPKKYGGFDSPTVAYSVLVVAKVEKGKSKKLKSVKELLGITIMERSSFEKNPIDFLEAKGYKEVKKDLIIKLPKYSLFELENGRKRMLASAGELQKGNELALPSKYVNFLYLASHYEKLKGSPEDNEQKQLFVEQHKHYLDEIIEQISEFSKRVILADANLDKVLSAYNKHRDKPIREQAENIIHLFTLTNLGAPAAFKYFDTTIDRKRYTSTKEVLDATLIHQSITGLYETRIDLSQLGGDGGGGSGGTLNIEDEHRLHETSKEPDVSLGSTWLSDFPQAWAETGGMGLAVRQAPLIIPLKATSTPVSIKQYPMSQEARLGIKPHIQRLLDQGILVPCQSPWNTPLLPVKKPGTNDYRPVQDLREVNKRVEDIHPTVPNPYNLLSGLPPSHQWYTVLDLKDAFFCLRLHPTSQPLFAFEWRDPEMGISGQLTWTRLPQGFKNSPTLFNEALHRDLADFRIQHPDLILLQYVDDLLLAATSELDCQQGTRALLQTLGNLGYRASAKKAQICQKQVKYLGYLLKEGQRWLTEARKETVMGQPTPKTPRQLREFLGKAGFCRLFIPGFAEMAAPLYPLTKPGTLFNWGPDQQKAYQEIKQALLTAPALGLPDLTKPFELFVDEKQGYAKGVLTQKLGPWRRPVAYLSKKLDPVAAGWPPCLRMVAAIAVLTKDAGKLTMGQPLVILAPHAVEALVKQPPDRWLSNARMTHYQALLLDTDRVQFGPVVALNPATLLPLPEEGLQHNCLDILAEAHGTRPDLTDQPLPDADHTWYTDGSSLLQEGQRKAGAAVTTETEVIWAKALPAGTSAQRAELIALTQALKMAEGKKLNVYTDSRYAFATAHIHGEIYRRRGWLTSEGKEIKNKDEILALLKALFLPKRLSIIHCPGHQKGHSAEARGNRMADQAARKAAITETPDTSTLLAGKRTADGSEFEKRTADGSEFESPKKKAKVE

SEQ ID NO: 3096 - protein, 2092 aa, synthetic construct; identical to SEQ ID NO: 2790

SEQ ID NO: 3097 - protein, 2093 aa, synthetic construct; identical to SEQ ID NO: 2849

SEQ ID NO: 3098 - protein, 2094 aa, synthetic construct; identical to SEQ ID NO: 2793

SEQ ID NO: 3099 - protein, 2100 aa, synthetic construct; identical to SEQ ID NO: 2836

SEQ ID NO: 3100 - protein, 2092 aa, synthetic construct
MPAAKRVKLDGGDKKYSIGLDIGTNSVGWAVITDEYKVPSKKFKVLGNTDRHSIKKNLIGALLFDSGETAEATRLKRTARRRYTRRKNRICYLQEIFSNEMAKVDDSFFHRLEESFLVEEDKKHERHPIFGNIVDEVAYHEKYPTIYHLRKKLVDSTDKADLRLIYLALAHMIKFRGHFLIEGDLNPDNSDVDKLFIQLVQTYNQLFEENPINASGVDAKAILSARLSKSRRLENLIAQLPGEKKNGLFGNLIALSLGLTPNFKSNFDLAEDAKLQLSKDTYDDDLDNLLAQIGDQYADLFLAAKNLSDAILLSDILRVNTEITKAPLSASMIKRYDEHHQDLTLLKALVRQQLPEKYKEIFFDQSKNGYAGYIDGGASQEEFYKFIKPILEKMDGTEELLVKLNREDLLRKQRTFDNGSIPHQIHLGELHAILRRQEDFYPFLKDNREKIEKILTFRIPYYVGPLARGNSRFAWMTRKSEETITPWNFEEVVDKGASAQSFIERMTNFDKNLPNEKVLPKHSLLYEYFTVYNELTKVKYVTEGMRKPAFLSGEQKKAIVDLLFKTNRKVTVKQLKEDYFKKIECFDSVEISGVEDRFNASLGTYHDLLKIIKDKDFLDNEENEDILEDIVLTLTLFEDREMIEERLKTYAHLFDDKVMKQLKRRRYTGWGRLSRKLINGIRDKQSGKTILDFLKSDGFANRNFMQLIHDDSLTFKEDIQKAQVSGQGDSLHEHIANLAGSPAIKKGILQTVKVVDELVKVMGRHKPENIVIEMARENQTTQKGQKNSRERMKRIEEGIKELGSQILKEHPVENTQLQNEKLYLYYLQNGRDMYVDQELDINRLSDYDVDHIVPQSFLKDDSIDNKVLTRSDKARGKSDNVPSEEVVKKMKNYWRQLLNAKLITQRKFDNLTKAERGGLSELDKAGFIKRQLVETRQITKHVAQILDSRMNTKYDENDKLIREVKVITLKSKLVSDFRKDFQFYKVREINNYHHAHDAYLNAVVGTALIKKYPKLESEFVYGDYKVYDVRKMIAKSEQEIGKATAKYFFYSNIMNFFKTEITLANGEIRKRPLIETNGETGEIVWDKGRDFATVRKVLSMPQVNIVKKTEVQTGGFSKESILPKRNSDKLIARKKDWDPKKYGGFDSPTVAYSVLVVAKVEKGKSKKLKSVKELLGITIMERSSFEKNPIDFLEAKGYKEVKKDLIIKLPKYSLFELENGRKRMLASAGELQKGNELALPSKYVNFLYLASHYEKLKGSPEDNEQKQLFVEQHKHYLDEIIEQISEFSKRVILADANLDKVLSAYNKHRDKPIREQAENIIHLFTLTNLGAPAAFKYFDTTIDRKRYTSTKEVLDATLIHQSITGLYETRIDLSQLGGDGGPAPAPAPGGTLNIEDEHRLHETSKEPDVSLGSTWLSDFPQAWAETGGMGLAVRQAPLIIPLKATSTPVSIKQYPMSQEARLGIKPHIQRLLDQGILVPCQSPWNTPLLPVKKPGTNDYRPVQDLREVNKRVEDIHPTVPNPYNLLSGLPPSHQWYTVLDLKDAFFCLRLHPTSQPLFAFEWRDPEMGISGQLTWTRLPQGFKNSPTLFNEALHRDLADFRIQHPDLILLQYVDDLLLAATSELDCQQGTRALLQTLGNLGYRASAKKAQICQKQVKYLGYLLKEGQRWLTEARKETVMGQPTPKTPRQLREFLGKAGFCRLFIPGFAEMAAPLYPLTKPGTLFNWGPDQQKAYQEIKQALLTAPALGLPDLTKPFELFVDEKQGYAKGVLTQKLGPWRRPVAYLSKKLDPVAAGWPPCLRMVAAIAVLTKDAGKLTMGQPLVILAPHAVEALVKQPPDRWLSNARMTHYQALLLDTDRVQFGPVVALNPATLLPLPEEGLQHNCLDILAEAHGTRPDLTDQPLPDADHTWYTDGSSLLQEGQRKAGAAVTTETEVIWAKALPAGTSAQRAELIALTQALKMAEGKKLNVYTDSRYAFATAHIHGEIYRRRGWLTSEGKEIKNKDEILALLKALFLPKRLSIIHCPGHQKGHSAEARGNRMADQAARKAAITETPDTSTLLAGKRTADGSEFEKRTADGSEFESPKKKAKVE

SEQ ID NO: 3101 - protein, 2094 aa, synthetic construct; identical to SEQ ID NO: 2846

SEQ ID NO: 3102 - protein, 2096 aa, synthetic construct; identical to SEQ ID NO: 2842

SEQ ID NO: 3103 - protein, 2096 aa, synthetic construct; identical to SEQ ID NO: 2815

SEQ ID NO: 3104 - protein, 2096 aa, synthetic construct
MPAAKRVKLDGGDKKYSIGLDIGTNSVGWAVITDEYKVPSKKFKVLGNTDRHSIKKNLIGALLFDSGETAEATRLKRTARRRYTRRKNRICYLQEIFSNEMAKVDDSFFHRLEESFLVEEDKKHERHPIFGNIVDEVAYHEKYPTIYHLRKKLVDSTDKADLRLIYLALAHMIKFRGHFLIEGDLNPDNSDVDKLFIQLVQTYNQLFEENPINASGVDAKAILSARLSKSRRLENLIAQLPGEKKNGLFGNLIALSLGLTPNFKSNFDLAEDAKLQLSKDTYDDDLDNLLAQIGDQYADLFLAAKNLSDAILLSDILRVNTEITKAPLSASMIKRYDEHHQDLTLLKALVRQQLPEKYKEIFFDQSKNGYAGYIDGGASQEEFYKFIKPILEKMDGTEELLVKLNREDLLRKQRTFDNGSIPHQIHLGELHAILRRQEDFYPFLKDNREKIEKILTFRIPYYVGPLARGNSRFAWMTRKSEETITPWNFEEVVDKGASAQSFIERMTNFDKNLPNEKVLPKHSLLYEYFTVYNELTKVKYVTEGMRKPAFLSGEQKKAIVDLLFKTNRKVTVKQLKEDYFKKIECFDSVEISGVEDRFNASLGTYHDLLKIIKDKDFLDNEENEDILEDIVLTLTLFEDREMIEERLKTYAHLFDDKVMKQLKRRRYTGWGRLSRKLINGIRDKQSGKTILDFLKSDGFANRNFMQLIHDDSLTFKEDIQKAQVSGQGDSLHEHIANLAGSPAIKKGILQTVKVVDELVKVMGRHKPENIVIEMARENQTTQKGQKNSRERMKRIEEGIKELGSQILKEHPVENTQLQNEKLYLYYLQNGRDMYVDQELDINRLSDYDVDHIVPQSFLKDDSIDNKVLTRSDKARGKSDNVPSEEVVKKMKNYWRQLLNAKLITQRKFDNLTKAERGGLSELDKAGFIKRQLVETRQITKHVAQILDSRMNTKYDENDKLIREVKVITLKSKLVSDFRKDFQFYKVREINNYHHAHDAYLNAVVGTALIKKYPKLESEFVYGDYKVYDVRKMIAKSEQEIGKATAKYFFYSNIMNFFKTEITLANGEIRKRPLIETNGETGEIVWDKGRDFATVRKVLSMPQVNIVKKTEVQTGGFSKESILPKRNSDKLIARKKDWDPKKYGGFDSPTVAYSVLVVAKVEKGKSKKLKSVKELLGITIMERSSFEKNPIDFLEAKGYKEVKKDLIIKLPKYSLFELENGRKRMLASAGELQKGNELALPSKYVNFLYLASHYEKLKGSPEDNEQKQLFVEQHKHYLDEIIEQISEFSKRVILADANLDKVLSAYNKHRDKPIREQAENIIHLFTLTNLGAPAAFKYFDTTIDRKRYTSTKEVLDATLIHQSITGLYETRIDLSQLGGDGGPAPEAAAKGSSGGTLNIEDEHRLHETSKEPDVSLGSTWLSDFPQAWAETGGMGLAVRQAPLIIPLKATSTPVSIKQYPMSQEARLGIKPHIQRLLDQGILVPCQSPWNTPLLPVKKPGTNDYRPVQDLREVNKRVEDIHPTVPNPYNLLSGLPPSHQWYTVLDLKDAFFCLRLHPTSQPLFAFEWRDPEMGISGQLTWTRLPQGFKNSPTLFNEALHRDLADFRIQHPDLILLQYVDDLLLAATSELDCQQGTRALLQTLGNLGYRASAKKAQICQKQVKYLGYLLKEGQRWLTEARKETVMGQPTPKTPRQLREFLGKAGFCRLFIPGFAEMAAPLYPLTKPGTLFNWGPDQQKAYQEIKQALLTAPALGLPDLTKPFELFVDEKQGYAKGVLTQKLGPWRRPVAYLSKKLDPVAAGWPPCLRMVAAIAVLTKDAGKLTMGQPLVILAPHAVEALVKQPPDRWLSNARMTHYQALLLDTDRVQFGPVVALNPATLLPLPEEGLQHNCLDILAEAHGTRPDLTDQPLPDADHTWYTDGSSLLQEGQRKAGAAVTTETEVIWAKALPAGTSAQRAELIALTQALKMAEGKKLNVYTDSRYAFATAHIHGEIYRRRGWLTSEGKEIKNKDEILALLKALFLPKRLSIIHCPGHQKGHSAEARGNRMADQAARKAAITETPDTSTLLAGKRTADGSEFEKRTADGSEFESPKKKAKVE

SEQ ID NO: 3105 - protein, 2096 aa, synthetic construct
MPAAKRVKLDGGDKKYSIGLDIGTNSVGWAVITDEYKVPSKKFKVLGNTDRHSIKKNLIGALLFDSGETAEATRLKRTARRRYTRRKNRICYLQEIFSNEMAKVDDSFFHRLEESFLVEEDKKHERHPIFGNIVDEVAYHEKYPTIYHLRKKLVDSTDKADLRLIYLALAHMIKFRGHFLIEGDLNPDNSDVDKLFIQLVQTYNQLFEENPINASGVDAKAILSARLSKSRRLENLIAQLPGEKKNGLFGNLIALSLGLTPNFKSNFDLAEDAKLQLSKDTYDDDLDNLLAQIGDQYADLFLAAKNLSDAILLSDILRVNTEITKAPLSASMIKRYDEHHQDLTLLKALVRQQLPEKYKEIFFDQSKNGYAGYIDGGASQEEFYKFIKPILEKMDGTEELLVKLNREDLLRKQRTFDNGSIPHQIHLGELHAILRRQEDFYPFLKDNREKIEKILTFRIPYYVGPLARGNSRFAWMTRKSEETITPWNFEEVVDKGASAQSFIERMTNFDKNLPNEKVLPKHSLLYEYFTVYNELTKVKYVTEGMRKPAFLSGEQKKAIVDLLFKTNRKVTVKQLKEDYFKKIECFDSVEISGVEDRFNASLGTYHDLLKIIKDKDFLDNEENEDILEDIVLTLTLFEDREMIEERLKTYAHLFDDKVMKQLKRRRYTGWGRLSRKLINGIRDKQSGKTILDFLKSDGFANRNFMQLIHDDSLTFKEDIQKAQVSGQGDSLHEHIANLAGSPAIKKGILQTVKVVDELVKVMGRHKPENIVIEMARENQTTQKGQKNSRERMKRIEEGIKELGSQILKEHPVENTQLQNEKLYLYYLQNGRDMYVDQELDINRLSDYDVDHIVPQSFLKDDSIDNKVLTRSDKARGKSDNVPSEEVVKKMKNYWRQLLNAKLITQRKFDNLTKAERGGLSELDKAGFIKRQLVETRQITKHVAQILDSRMNTKYDENDKLIREVKVITLKSKLVSDFRKDFQFYKVREINNYHHAHDAYLNAVVGTALIKKYPKLESEFVYGDYKVYDVRKMIAKSEQEIGKATAKYFFYSNIMNFFKTEITLANGEIRKRPLIETNGETGEIVWDKGRDFATVRKVLSMPQVNIVKKTEVQTGGFSKESILPKRNSDKLIARKKDWDPKKYGGFDSPTVAYSVLVVAKVEKGKSKKLKSVKELLGITIMERSSFEKNPIDFLEAKGYKEVKKDLIIKLPKYSLFELENGRKRMLASAGELQKGNELALPSKYVNFLYLASHYEKLKGSPEDNEQKQLFVEQHKHYLDEIIEQISEFSKRVILADANLDKVLSAYNKHRDKPIREQAENIIHLFTLTNLGAPAAFKYFDTTIDRKRYTSTKEVLDATLIHQSITGLYETRIDLSQLGGDGGGSSEAAAKPAPGGTLNIEDEHRLHETSKEPDVSLGSTWLSDFPQAWAETGGMGLAVRQAPLIIPLKATSTPVSIKQYPMSQEARLGIKPHIQRLLDQGILVPCQSPWNTPLLPVKKPGTNDYRPVQDLREVNKRVEDIHPTVPNPYNLLSGLPPSHQWYTVLDLKDAFFCLRLHPTSQPLFAFEWRDPEMGISGQLTWTRLPQGFKNSPTLFNEALHRDLADFRIQHPDLILLQYVDDLLLAATSELDCQQGTRALLQTLGNLGYRASAKKAQICQKQVKYLGYLLKEGQRWLTEARKETVMGQPTPKTPRQLREFLGKAGFCRLFIPGFAEMAAPLYPLTKPGTLFNWGPDQQKAYQEIKQALLTAPALGLPDLTKPFELFVDEKQGYAKGVLTQKLGPWRRPVAYLSKKLDPVAAGWPPCLRMVAAIAVLTKDAGKLTMGQPLVILAPHAVEALVKQPPDRWLSNARMTHYQALLLDTDRVQFGPVVALNPATLLPLPEEGLQHNCLDILAEAHGTRPDLTDQPLPDADHTWYTDGSSLLQEGQRKAGAAVTTETEVIWAKALPAGTSAQRAELIALTQALKMAEGKKLNVYTDSRYAFATAHIHGEIYRRRGWLTSEGKEIKNKDEILALLKALFLPKRLSIIHCPGHQKGHSAEARGNRMADQAARKAAITETPDTSTLLAGKRTADGSEFEKRTADGSEFESPKKKAKVE

SEQ ID NO: 3106 - protein, 2094 aa, synthetic construct
MPAAKRVKLDGGDKKYSIGLDIGTNSVGWAVITDEYKVPSKKFKVLGNTDRHSIKKNLIGALLFDSGETAEATRLKRTARRRYTRRKNRICYLQEIFSNEMAKVDDSFFHRLEESFLVEEDKKHERHPIFGNIVDEVAYHEKYPTIYHLRKKLVDSTDKADLRLIYLALAHMIKFRGHFLIEGDLNPDNSDVDKLFIQLVQTYNQLFEENPINASGVDAKAILSARLSKSRRLENLIAQLPGEKKNGLFGNLIALSLGLTPNFKSNFDLAEDAKLQLSKDTYDDDLDNLLAQIGDQYADLFLAAKNLSDAILLSDILRVNTEITKAPLSASMIKRYDEHHQDLTLLKALVRQQLPEKYKEIFFDQSKNGYAGYIDGGASQEEFYKFIKPILEKMDGTEELLVKLNREDLLRKQRTFDNGSIPHQIHLGELHAILRRQEDFYPFLKDNREKIEKILTFRIPYYVGPLARGNSRFAWMTRKSEETITPWNFEEVVDKGASAQSFIERMTNFDKNLPNEKVLPKHSLLYEYFTVYNELTKVKYVTEGMRKPAFLSGEQKKAIVDLLFKTNRKVTVKQLKEDYFKKIECFDSVEISGVEDRFNASLGTYHDLLKIIKDKDFLDNEENEDILEDIVLTLTLFEDREMIEERLKTYAHLFDDKVMKQLKRRRYTGWGRLSRKLINGIRDKQSGKTILDFLKSDGFANRNFMQLIHDDSLTFKEDIQKAQVSGQGDSLHEHIANLAGSPAIKKGILQTVKVVDELVKVMGRHKPENIVIEMARENQTTQKGQKNSRERMKRIEEGIKELGSQILKEHPVENTQLQNEKLYLYYLQNGRDMYVDQELDINRLSDYDVDHIVPQSFLKDDSIDNKVLTRSDKARGKSDNVPSEEVVKKMKNYWRQLLNAKLITQRKFDNLTKAERGGLSELDKAGFIKRQLVETRQITKHVAQILDSRMNTKYDENDKLIREVKVITLKSKLVSDFRKDFQFYKVREINNYHHAHDAYLNAVVGTALIKKYPKLESEFVYGDYKVYDVRKMIAKSEQEIGKATAKYFFYSNIMNFFKTEITLANGEIRKRPLIETNGETGEIVWDKGRDFATVRKVLSMPQVNIVKKTEVQTGGFSKESILPKRNSDKLIARKKDWDPKKYGGFDSPTVAYSVLVVAKVEKGKSKKLKSVKELLGITIMERSSFEKNPIDFLEAKGYKEVKKDLIIKLPKYSLFELENGRKRMLASAGELQKGNELALPSKYVNFLYLASHYEKLKGSPEDNEQKQLFVEQHKHYLDEIIEQISEFSKRVILADANLDKVLSAYNKHRDKPIREQAENIIHLFTLTNLGAPAAFKYFDTTIDRKRYTSTKEVLDATLIHQSITGLYETRIDLSQLGGDGGPAPGSSGGSGGTLNIEDEHRLHETSKEPDVSLGSTWLSDFPQAWAETGGMGLAVRQAPLIIPLKATSTPVSIKQYPMSQEARLGIKPHIQRLLDQGILVPCQSPWNTPLLPVKKPGTNDYRPVQDLREVNKRVEDIHPTVPNPYNLLSGLPPSHQWYTVLDLKDAFFCLRLHPTSQPLFAFEWRDPEMGISGQLTWTRLPQGFKNSPTLFNEALHRDLADFRIQHPDLILLQYVDDLLLAATSELDCQQGTRALLQTLGNLGYRASAKKAQICQKQVKYLGYLLKEGQRWLTEARKETVMGQPTPKTPRQLREFLGKAGFCRLFIPGFAEMAAPLYPLTKPGTLFNWGPDQQKAYQEIKQALLTAPALGLPDLTKPFELFVDEKQGYAKGVLTQKLGPWRRPVAYLSKKLDPVAAGWPPCLRMVAAIAVLTKDAGKLTMGQPLVILAPHAVEALVKQPPDRWLSNARMTHYQALLLDTDRVQFGPVVALNPATLLPLPEEGLQHNCLDILAEAHGTRPDLTDQPLPDADHTWYTDGSSLLQEGQRKAGAAVTTETEVIWAKALPAGTSAQRAELIALTQALKMAEGKKLNVYTDSRYAFATAHIHGEIYRRRGWLTSEGKEIKNKDEILALLKALFLPKRLSIIHCPGHQKGHSAEARGNRMADQAARKAAITETPDTSTLLAGKRTADGSEFEKRTADGSEFESPKKKAKVE

SEQ ID NO: 3107 - protein, 2091 aa, synthetic construct; identical to SEQ ID NO: 2820

SEQ ID NO: 3108 - protein, 2096 aa, synthetic construct; identical to SEQ ID NO: 2782

SEQ ID NO: 3109 - protein, 2096 aa, synthetic construct; identical to SEQ ID NO: 2860

SEQ ID NO: 3110 - protein, 2095 aa, synthetic construct
MPAAKRVKLDGGDKKYSIGLDIGTNSVGWAVITDEYKVPSKKFKVLGNTDRHSIKKNLIGALLFDSGETAEATRLKRTARRRYTRRKNRICYLQEIFSNEMAKVDDSFFHRLEESFLVEEDKKHERHPIFGNIVDEVAYHEKYPTIYHLRKKLVDSTDKADLRLIYLALAHMIKFRGHFLIEGDLNPDNSDVDKLFIQLVQTYNQLFEENPINASGVDAKAILSARLSKSRRLENLIAQLPGEKKNGLFGNLIALSLGLTPNFKSNFDLAEDAKLQLSKDTYDDDLDNLLAQIGDQYADLFLAAKNLSDAILLSDILRVNTEITKAPLSASMIKRYDEHHQDLTLLKALVRQQLPEKYKEIFFDQSKNGYAGYIDGGASQEEFYKFIKPILEKMDGTEELLVKLNREDLLRKQRTFDNGSIPHQIHLGELHAILRRQEDFYPFLKDNREKIEKILTFRIPYYVGPLARGNSRFAWMTRKSEETITPWNFEEVVDKGASAQSFIERMTNFDKNLPNEKVLPKHSLLYEYFTVYNELTKVKYVTEGMRKPAFLSGEQKKAIVDLLFKTNRKVTVKQLKEDYFKKIECFDSVEISGVEDRFNASLGTYHDLLKIIKDKDFLDNEENEDILEDIVLTLTLFEDREMIEERLKTYAHLFDDKVMKQLKRRRYTGWGRLSRKLINGIRDKQSGKTILDFLKSDGFANRNFMQLIHDDSLTFKEDIQKAQVSGQGDSLHEHIANLAGSPAIKKGILQTVKVVDELVKVMGRHKPENIVIEMARENQTTQKGQKNSRERMKRIEEGIKELGSQILKEHPVENTQLQNEKLYLYYLQNGRDMYVDQELDINRLSDYDVDHIVPQSFLKDDSIDNKVLTRSDKARGKSDNVPSEEVVKKMKNYWRQLLNAKLITQRKFDNLTKAERGGLSELDKAGFIKRQLVETRQITKHVAQILDSRMNTKYDENDKLIREVKVITLKSKLVSDFRKDFQFYKVREINNYHHAHDAYLNAVVGTALIKKYPKLESEFVYGDYKVYDVRKMIAKSEQEIGKATAKYFFYSNIMNFFKTEITLANGEIRKRPLIETNGETGEIVWDKGRDFATVRKVLSMPQVNIVKKTEVQTGGFSKESILPKRNSDKLIARKKDWDPKKYGGFDSPTVAYSVLVVAKVEKGKSKKLKSVKELLGITIMERSSFEKNPIDFLEAKGYKEVKKDLIIKLPKYSLFELENGRKRMLASAGELQKGNELALPSKYVNFLYLASHYEKLKGSPEDNEQKQLFVEQHKHYLDEIIEQISEFSKRVILADANLDKVLSAYNKHRDKPIREQAENIIHLFTLTNLGAPAAFKYFDTTIDRKRYTSTKEVLDATLIHQSITGLYETRIDLSQLGGDGGGGGGSGGGGSGGTLNIEDEHRLHETSKEPDVSLGSTWLSDFPQAWAETGGMGLAVRQAPLIIPLKATSTPVSIKQYPMSQEARLGIKPHIQRLLDQGILVPCQSPWNTPLLPVKKPGTNDYRPVQDLREVNKRVEDIHPTVPNPYNLLSGLPPSHQWYTVLDLKDAFFCLRLHPTSQPLFAFEWRDPEMGISGQLTWTRLPQGFKNSPTLFNEALHRDLADFRIQHPDLILLQYVDDLLLAATSELDCQQGTRALLQTLGNLGYRASAKKAQICQKQVKYLGYLLKEGQRWLTEARKETVMGQPTPKTPRQLREFLGKAGFCRLFIPGFAEMAAPLYPLTKPGTLFNWGPDQQKAYQEIKQALLTAPALGLPDLTKPFELFVDEKQGYAKGVLTQKLGPWRRPVAYLSKKLDPVAAGWPPCLRMVAAIAVLTKDAGKLTMGQPLVILAPHAVEALVKQPPDRWLSNARMTHYQALLLDTDRVQFGPVVALNPATLLPLPEEGLQHNCLDILAEAHGTRPDLTDQPLPDADHTWYTDGSSLLQEGQRKAGAAVTTETEVIWAKALPAGTSAQRAELIALTQALKMAEGKKLNVYTDSRYAFATAHIHGEIYRRRGWLTSEGKEIKNKDEILALLKALFLPKRLSIIHCPGHQKGHSAEARGNRMADQAARKAAITETPDTSTLLAGKRTADGSEFEKRTADGSEFESPKKKAKVE

SEQ ID NO: 3111 - protein, 2094 aa, synthetic construct; identical to SEQ ID NO: 2800

SEQ ID NO: 3112 - protein, 2096 aa, synthetic construct; identical to SEQ ID NO: 2792

SEQ ID NO: 3113 - protein, 2091 aa, synthetic construct
MPAAKRVKLDGGDKKYSIGLDIGTNSVGWAVITDEYKVPSKKFKVLGNTDRHSIKKNLIGALLFDSGETAEATRLKRTARRRYTRRKNRICYLQEIFSNEMAKVDDSFFHRLEESFLVEEDKKHERHPIFGNIVDEVAYHEKYPTIYHLRKKLVDSTDKADLRLIYLALAHMIKFRGHFLIEGDLNPDNSDVDKLFIQLVQTYNQLFEENPINASGVDAKAILSARLSKSRRLENLIAQLPGEKKNGLFGNLIALSLGLTPNFKSNFDLAEDAKLQLSKDTYDDDLDNLLAQIGDQYADLFLAAKNLSDAILLSDILRVNTEITKAPLSASMIKRYDEHHQDLTLLKALVRQQLPEKYKEIFFDQSKNGYAGYIDGGASQEEFYKFIKPILEKMDGTEELLVKLNREDLLRKQRTFDNGSIPHQIHLGELHAILRRQEDFYPFLKDNREKIEKILTFRIPYYVGPLARGNSRFAWMTRKSEETITPWNFEEVVDKGASAQSFIERMTNFDKNLPNEKVLPKHSLLYEYFTVYNELTKVKYVTEGMRKPAFLSGEQKKAIVDLLFKTNRKVTVKQLKEDYFKKIECFDSVEISGVEDRFNASLGTYHDLLKIIKDKDFLDNEENEDILEDIVLTLTLFEDREMIEERLKTYAHLFDDKVMKQLKRRRYTGWGRLSRKLINGIRDKQSGKTILDFLKSDGFANRNFMQLIHDDSLTFKEDIQKAQVSGQGDSLHEHIANLAGSPAIKKGILQTVKVVDELVKVMGRHKPENIVIEMARENQTTQKGQKNSRERMKRIEEGIKELGSQILKEHPVENTQLQNEKLYLYYLQNGRDMYVDQELDINRLSDYDVDHIVPQSFLKDDSIDNKVLTRSDKARGKSDNVPSEEVVKKMKNYWRQLLNAKLITQRKFDNLTKAERGGLSELDKAGFIKRQLVETRQITKHVAQILDSRMNTKYDENDKLIREVKVITLKSKLVSDFRKDFQFYKVREINNYHHAHDAYLNAVVGTALIKKYPKLESEFVYGDYKVYDVRKMIAKSEQEIGKATAKYFFYSNIMNFFKTEITLANGEIRKRPLIETNGETGEIVWDKGRDFATVRKVLSMPQVNIVKKTEVQTGGFSKESILPKRNSDKLIARKKDWDPKKYGGFDSPTVAYSVLVVAKVEKGKSKKLKSVKELLGITIMERSSFEKNPIDFLEAKGYKEVKKDLIIKLPKYSLFELENGRKRMLASAGELQKGNELALPSKYVNFLYLASHYEKLKGSPEDNEQKQLFVEQHKHYLDEIIEQISEFSKRVILADANLDKVLSAYNKHRDKPIREQAENIIHLFTLTNLGAPAAFKYFDTTIDRKRYTSTKEVLDATLIHQSITGLYETRIDLSQLGGDGGGGSGSSGGTLNIEDEHRLHETSKEPDVSLGSTWLSDFPQAWAETGGMGLAVRQAPLIIPLKATSTPVSIKQYPMSQEARLGIKPHIQRLLDQGILVPCQSPWNTPLLPVKKPGTNDYRPVQDLREVNKRVEDIHPTVPNPYNLLSGLPPSHQWYTVLDLKDAFFCLRLHPTSQPLFAFEWRDPEMGISGQLTWTRLPQGFKNSPTLFNEALHRDLADFRIQHPDLILLQYVDDLLLAATSELDCQQGTRALLQTLGNLGYRASAKKAQICQKQVKYLGYLLKEGQRWLTEARKETVMGQPTPKTPRQLREFLGKAGFCRLFIPGFAEMAAPLYPLTKPGTLFNWGPDQQKAYQEIKQALLTAPALGLPDLTKPFELFVDEKQGYAKGVLTQKLGPWRRPVAYLSKKLDPVAAGWPPCLRMVAAIAVLTKDAGKLTMGQPLVILAPHAVEALVKQPPDRWLSNARMTHYQALLLDTDRVQFGPVVALNPATLLPLPEEGLQHNCLDILAEAHGTRPDLTDQPLPDADHTWYTDGSSLLQEGQRKAGAAVTTETEVIWAKALPAGTSAQRAELIALTQALKMAEGKKLNVYTDSRYAFATAHIHGEIYRRRGWLTSEGKEIKNKDEILALLKALFLPKRLSIIHCPGHQKGHSAEARGNRMADQAARKAAITETPDTSTLLAGKRTADGSEFEKRTADGSEFESPKKKAKVE

SEQ ID NO: 3114 - protein, 2090 aa, synthetic construct; identical to SEQ ID NO: 2834

SEQ ID NO: 3115 - protein, 2096 aa, synthetic construct
MPAAKRVKLDGGDKKYSIGLDIGTNSVGWAVITDEYKVPSKKFKVLGNTDRHSIKKNLIGALLFDSGETAEATRLKRTARRRYTRRKNRICYLQEIFSNEMAKVDDSFFHRLEESFLVEEDKKHERHPIFGNIVDEVAYHEKYPTIYHLRKKLVDSTDKADLRLIYLALAHMIKFRGHFLIEGDLNPDNSDVDKLFIQLVQTYNQLFEENPINASGVDAKAILSARLSKSRRLENLIAQLPGEKKNGLFGNLIALSLGLTPNFKSNFDLAEDAKLQLSKDTYDDDLDNLLAQIGDQYADLFLAAKNLSDAILLSDILRVNTEITKAPLSASMIKRYDEHHQDLTLLKALVRQQLPEKYKEIFFDQSKNGYAGYIDGGASQEEFYKFIKPILEKMDGTEELLVKLNREDLLRKQRTFDNGSIPHQIHLGELHAILRRQEDFYPFLKDNREKIEKILTFRIPYYVGPLARGNSRFAWMTRKSEETITPWNFEEVVDKGASAQSFIERMTNFDKNLPNEKVLPKHSLLYEYFTVYNELTKVKYVTEGMRKPAFLSGEQKKAIVDLLFKTNRKVTVKQLKEDYFKKIECFDSVEISGVEDRFNASLGTYHDLLKIIKDKDFLDNEENEDILEDIVLTLTLFEDREMIEERLKTYAHLFDDKVMKQLKRRRYTGWGRLSRKLINGIRDKQSGKTILDFLKSDGFANRNFMQLIHDDSLTFKEDIQKAQVSGQGDSLHEHIANLAGSPAIKKGILQTVKVVDELVKVMGRHKPENIVIEMARENQTTQKGQKNSRERMKRIEEGIKELGSQILKEHPVENTQLQNEKLYLYYLQNGRDMYVDQELDINRLSDYDVDHIVPQSFLKDDSIDNKVLTRSDKARGKSDNVPSEEVVKKMKNYWRQLLNAKLITQRKFDNLTKAERGGLSELDKAGFIKRQLVETRQITKHVAQILDSRMNTKYDENDKLIREVKVITLKSKLVSDFRKDFQFYKVREINNYHHAHDAYLNAVVGTALIKKYPKLESEFVYGDYKVYDVRKMIAKSEQEIGKATAKYFFYSNIMNFFKTEITLANGEIRKRPLIETNGETGEIVWDKGRDFATVRKVLSMPQVNIVKKTEVQTGGFSKESILPKRNSDKLIARKKDWDPKKYGGFDSPTVAYSVLVVAKVEKGKSKKLKSVKELLGITIMERSSFEKNPIDFLEAKGYKEVKKDLIIKLPKYSLFELENGRKRMLASAGELQKGNELALPSKYVNFLYLASHYEKLKGSPEDNEQKQLFVEQHKHYLDEIIEQISEFSKRVILADANLDKVLSAYNKHRDKPIREQAENIIHLFTLTNLGAPAAFKYFDTTIDRKRYTSTKEVLDATLIHQSITGLYETRIDLSQLGGDGGGGGGGSEAAAKGGTLNIEDEHRLHETSKEPDVSLGSTWLSDFPQAWAETGGMGLAVRQAPLIIPLKATSTPVSIKQYPMSQEARLGIKPHIQRLLDQGILVPCQSPWNTPLLPVKKPGTNDYRPVQDLREVNKRVEDIHPTVPNPYNLLSGLPPSHQWYTVLDLKDAFFCLRLHPTSQPLFAFEWRDPEMGISGQLTWTRLPQGFKNSPTLFNEALHRDLADFRIQHPDLILLQYVDDLLLAATSELDCQQGTRALLQTLGNLGYRASAKKAQICQKQVKYLGYLLKEGQRWLTEARKETVMGQPTPKTPRQLREFLGKAGFCRLFIPGFAEMAAPLYPLTKPGTLFNWGPDQQKAYQEIKQALLTAPALGLPDLTKPFELFVDEKQGYAKGVLTQKLGPWRRPVAYLSKKLDPVAAGWPPCLRMVAAIAVLTKDAGKLTMGQPLVILAPHAVEALVKQPPDRWLSNARMTHYQALLLDTDRVQFGPVVALNPATLLPLPEEGLQHNCLDILAEAHGTRPDLTDQPLPDADHTWYTDGSSLLQEGQRKAGAAVTTETEVIWAKALPAGTSAQRAELIALTQALKMAEGKKLNVYTDSRYAFATAHIHGEIYRRRGWLTSEGKEIKNKDEILALLKALFLPKRLSIIHCPGHQKGHSAEARGNRMADQAARKAAITETPDTSTLLAGKRTADGSEFEKRTADGSEFESPKKKAKVE

SEQ ID NO: 3116 - protein, 2096 aa, synthetic construct; identical to SEQ ID NO: 2789

SEQ ID NO: 3117 - protein, 2094 aa, synthetic construct; identical to SEQ ID NO: 2848

SEQ ID NO: 3118 - protein, 2096 aa, synthetic construct; identical to SEQ ID NO: 2805

SEQ ID NO: 3119 - protein, 2091 aa, synthetic construct; identical to SEQ ID NO: 2861

SEQ ID NO: 3120 - protein, 2115 aa, synthetic construct; identical to SEQ ID NO: 2813

SEQ ID NO: 3121 - protein, 2094 aa, synthetic construct
MPAAKRVKLDGGDKKYSIGLDIGTNSVGWAVITDEYKVPSKKFKVLGNTDRHSIKKNLIGALLFDSGETAEATRLKRTARRRYTRRKNRICYLQEIFSNEMAKVDDSFFHRLEESFLVEEDKKHERHPIFGNIVDEVAYHEKYPTIYHLRKKLVDSTDKADLRLIYLALAHMIKFRGHFLIEGDLNPDNSDVDKLFIQLVQTYNQLFEENPINASGVDAKAILSARLSKSRRLENLIAQLPGEKKNGLFGNLIALSLGLTPNFKSNFDLAEDAKLQLSKDTYDDDLDNLLAQIGDQYADLFLAAKNLSDAILLSDILRVNTEITKAPLSASMIKRYDEHHQDLTLLKALVRQQLPEKYKEIFFDQSKNGYAGYIDGGASQEEFYKFIKPILEKMDGTEELLVKLNREDLLRKQRTFDNGSIPHQIHLGELHAILRRQEDFYPFLKDNREKIEKILTFRIPYYVGPLARGNSRFAWMTRKSEETITPWNFEEVVDKGASAQSFIERMTNFDKNLPNEKVLPKHSLLYEYFTVYNELTKVKYVTEGMRKPAFLSGEQKKAIVDLLFKTNRKVTVKQLKEDYFKKIECFDSVEISGVEDRFNASLGTYHDLLKIIKDKDFLDNEENEDILEDIVLTLTLFEDREMIEERLKTYAHLFDDKVMKQLKRRRYTGWGRLSRKLINGIRDKQSGKTILDFLKSDGFANRNFMQLIHDDSLTFKEDIQKAQVSGQGDSLHEHIANLAGSPAIKKGILQTVKVVDELVKVMGRHKPENIVIEMARENQTTQKGQKNSRERMKRIEEGIKELGSQILKEHPVENTQLQNEKLYLYYLQNGRDMYVDQELDINRLSDYDVDHIVPQSFLKDDSIDNKVLTRSDKARGKSDNVPSEEVVKKMKNYWRQLLNAKLITQRKFDNLTKAERGGLSELDKAGFIKRQLVETRQITKHVAQILDSRMNTKYDENDKLIREVKVITLKSKLVSDFRKDFQFYKVREINNYHHAHDAYLNAVVGTALIKKYPKLESEFVYGDYKVYDVRKMIAKSEQEIGKATAKYFFYSNIMNFFKTEITLANGEIRKRPLIETNGETGEIVWDKGRDFATVRKVLSMPQVNIVKKTEVQTGGFSKESILPKRNSDKLIARKKDWDPKKYGGFDSPTVAYSVLVVAKVEKGKSKKLKSVKELLGITIMERSSFEKNPIDFLEAKGYKEVKKDLIIKLPKYSLFELENGRKRMLASAGELQKGNELALPSKYVNFLYLASHYEKLKGSPEDNEQKQLFVEQHKHYLDEIIEQISEFSKRVILADANLDKVLSAYNKHRDKPIREQAENIIHLFTLTNLGAPAAFKYFDTTIDRKRYTSTKEVLDATLIHQSITGLYETRIDLSQLGGDGGGGSGGGGSSGGTLNIEDEHRLHETSKEPDVSLGSTWLSDFPQAWAETGGMGLAVRQAPLIIPLKATSTPVSIKQYPMSQEARLGIKPHIQRLLDQGILVPCQSPWNTPLLPVKKPGTNDYRPVQDLREVNKRVEDIHPTVPNPYNLLSGLPPSHQWYTVLDLKDAFFCLRLHPTSQPLFAFEWRDPEMGISGQLTWTRLPQGFKNSPTLFNEALHRDLADFRIQHPDLILLQYVDDLLLAATSELDCQQGTRALLQTLGNLGYRASAKKAQICQKQVKYLGYLLKEGQRWLTEARKETVMGQPTPKTPRQLREFLGKAGFCRLFIPGFAEMAAPLYPLTKPGTLFNWGPDQQKAYQEIKQALLTAPALGLPDLTKPFELFVDEKQGYAKGVLTQKLGPWRRPVAYLSKKLDPVAAGWPPCLRMVAAIAVLTKDAGKLTMGQPLVILAPHAVEALVKQPPDRWLSNARMTHYQALLLDTDRVQFGPVVALNPATLLPLPEEGLQHNCLDILAEAHGTRPDLTDQPLPDADHTWYTDGSSLLQEGQRKAGAAVTTETEVIWAKALPAGTSAQRAELIALTQALKMAEGKKLNVYTDSRYAFATAHIHGEIYRRRGWLTSEGKEIKNKDEILALLKALFLPKRLSIIHCPGHQKGHSAEARGNRMADQAARKAAITETPDTSTLLAGKRTADGSEFEKRTADGSEFESPKKKAKVE

SEQ ID NO: 3122 - protein, 2094 aa, synthetic construct
MPAAKRVKLDGGDKKYSIGLDIGTNSVGWAVITDEYKVPSKKFKVLGNTDRHSIKKNLIGALLFDSGETAEATRLKRTARRRYTRRKNRICYLQEIFSNEMAKVDDSFFHRLEESFLVEEDKKHERHPIFGNIVDEVAYHEKYPTIYHLRKKLVDSTDKADLRLIYLALAHMIKFRGHFLIEGDLNPDNSDVDKLFIQLVQTYNQLFEENPINASGVDAKAILSARLSKSRRLENLIAQLPGEKKNGLFGNLIALSLGLTPNFKSNFDLAEDAKLQLSKDTYDDDLDNLLAQIGDQYADLFLAAKNLSDAILLSDILRVNTEITKAPLSASMIKRYDEHHQDLTLLKALVRQQLPEKYKEIFFDQSKNGYAGYIDGGASQEEFYKFIKPILEKMDGTEELLVKLNREDLLRKQRTFDNGSIPHQIHLGELHAILRRQEDFYPFLKDNREKIEKILTFRIPYYVGPLARGNSRFAWMTRKSEETITPWNFEEVVDKGASAQSFIERMTNFDKNLPNEKVLPKHSLLYEYFTVYNELTKVKYVTEGMRKPAFLSGEQKKAIVDLLFKTNRKVTVKQLKEDYFKKIECFDSVEISGVEDRFNASLGTYHDLLKIIKDKDFLDNEENEDILEDIVLTLTLFEDREMIEERLKTYAHLFDDKVMKQLKRRRYTGWGRLSRKLINGIRDKQSGKTILDFLKSDGFANRNFMQLIHDDSLTFKEDIQKAQVSGQGDSLHEHIANLAGSPAIKKGILQTVKVVDELVKVMGRHKPENIVIEMARENQTTQKGQKNSRERMKRIEEGIKELGSQILKEHPVENTQLQNEKLYLYYLQNGRDMYVDQELDINRLSDYDVDHIVPQSFLKDDSIDNKVLTRSDKARGKSDNVPSEEVVKKMKNYWRQLLNAKLITQRKFDNLTKAERGGLSELDKAGFIKRQLVETRQITKHVAQILDSRMNTKYDENDKLIREVKVITLKSKLVSDFRKDFQFYKVREINNYHHAHDAYLNAVVGTALIKKYPKLESEFVYGDYKVYDVRKMIAKSEQEIGKATAKYFFYSNIMNFFKTEITLANGEIRKRPLIETNGETGEIVWDKGRDFATVRKVLSMPQVNIVKKTEVQTGGFSKESILPKRNSDKLIARKKDWDPKKYGGFDSPTVAYSVLVVAKVEKGKSKKLKSVKELLGITIMERSSFEKNPIDFLEAKGYKEVKKDLIIKLPKYSLFELENGRKRMLASAGELQKGNELALPSKYVNFLYLASHYEKLKGSPEDNEQKQLFVEQHKHYLDEIIEQISEFSKRVILADANLDKVLSAYNKHRDKPIREQAENIIHLFTLTNLGAPAAFKYFDTTIDRKRYTSTKEVLDATLIHQSITGLYETRIDLSQLGGDGGGGSGSSPAPGGTLNIEDEHRLHETSKEPDVSLGSTWLSDFPQAWAETGGMGLAVRQAPLIIPLKATSTPVSIKQYPMSQEARLGIKPHIQRLLDQGILVPCQSPWNTPLLPVKKPGTNDYRPVQDLREVNKRVEDIHPTVPNPYNLLSGLPPSHQWYTVLDLKDAFFCLRLHPTSQPLFAFEWRDPEMGISGQLTWTRLPQGFKNSPTLFNEALHRDLADFRIQHPDLILLQYVDDLLLAATSELDCQQGTRALLQTLGNLGYRASAKKAQICQKQVKYLGYLLKEGQRWLTEARKETVMGQPTPKTPRQLREFLGKAGFCRLFIPGFAEMAAPLYPLTKPGTLFNWGPDQQKAYQEIKQALLTAPALGLPDLTKPFELFVDEKQGYAKGVLTQKLGPWRRPVAYLSKKLDPVAAGWPPCLRMVAAIAVLTKDAGKLTMGQPLVILAPHAVEALVKQPPDRWLSNARMTHYQALLLDTDRVQFGPVVALNPATLLPLPEEGLQHNCLDILAEAHGTRPDLTDQPLPDADHTWYTDGSSLLQEGQRKAGAAVTTETEVIWAKALPAGTSAQRAELIALTQALKMAEGKKLNVYTDSRYAFATAHIHGEIYRRRGWLTSEGKEIKNKDEILALLKALFLPKRLSIIHCPGHQKGHSAEARGNRMADQAARKAAITETPDTSTLLAGKRTADGSEFEKRTADGSEFESPKKKAKVE

SEQ ID NO: 3123 - protein, 2090 aa, synthetic construct; identical to SEQ ID NO: 2823

SEQ ID NO: 3124 - protein, 2094 aa, synthetic construct; identical to SEQ ID NO: 2833

SEQ ID NO: 3125 - protein, 2096 aa, synthetic construct; identical to SEQ ID NO: 2794

SEQ ID NO: 3126 - protein, 2100 aa, synthetic construct; identical to SEQ ID NO: 2802

SEQ ID NO: 3127 - protein, 2096 aa, synthetic construct; identical to SEQ ID NO: 2839

SEQ ID NO: 3128 - protein, 2094 aa, synthetic construct; identical to SEQ ID NO: 2841

SEQ ID NO: 3129 - protein, 2096 aa, synthetic construct
MPAAKRVKLDGGDKKYSIGLDIGTNSVGWAVITDEYKVPSKKFKVLGNTDRHSIKKNLIGALLFDSGETAEATRLKRTARRRYTRRKNRICYLQEIFSNEMAKVDDSFFHRLEESFLVEEDKKHERHPIFGNIVDEVAYHEKYPTIYHLRKKLVDSTDKADLRLIYLALAHMIKFRGHFLIEGDLNPDNSDVDKLFIQLVQTYNQLFEENPINASGVDAKAILSARLSKSRRLENLIAQLPGEKKNGLFGNLIALSLGLTPNFKSNFDLAEDAKLQLSKDTYDDDLDNLLAQIGDQYADLFLAAKNLSDAILLSDILRVNTEITKAPLSASMIKRYDEHHQDLTLLKALVRQQLPEKYKEIFFDQSKNGYAGYIDGGASQEEFYKFIKPILEKMDGTEELLVKLNREDLLRKQRTFDNGSIPHQIHLGELHAILRRQEDFYPFLKDNREKIEKILTFRIPYYVGPLARGNSRFAWMTRKSEETITPWNFEEVVDKGASAQSFIERMTNFDKNLPNEKVLPKHSLLYEYFTVYNELTKVKYVTEGMRKPAFLSGEQKKAIVDLLFKTNRKVTVKQLKEDYFKKIECFDSVEISGVEDRFNASLGTYHDLLKIIKDKDFLDNEENEDILEDIVLTLTLFEDREMIEERLKTYAHLFDDKVMKQLKRRRYTGWGRLSRKLINGIRDKQSGKTILDFLKSDGFANRNFMQLIHDDSLTFKEDIQKAQVSGQGDSLHEHIANLAGSPAIKKGILQTVKVVDELVKVMGRHKPENIVIEMARENQTTQKGQKNSRERMKRIEEGIKELGSQILKEHPVENTQLQNEKLYLYYLQNGRDMYVDQELDINRLSDYDVDHIVPQSFLKDDSIDNKVLTRSDKARGKSDNVPSEEVVKKMKNYWRQLLNAKLITQRKFDNLTKAERGGLSELDKAGFIKRQLVETRQITKHVAQILDSRMNTKYDENDKLIREVKVITLKSKLVSDFRKDFQFYKVREINNYHHAHDAYLNAVVGTALIKKYPKLESEFVYGDYKVYDVRKMIAKSEQEIGKATAKYFFYSNIMNFFKTEITLANGEIRKRPLIETNGETGEIVWDKGRDFATVRKVLSMPQVNIVKKTEVQTGGFSKESILPKRNSDKLIARKKDWDPKKYGGFDSPTVAYSVLVVAKVEKGKSKKLKSVKELLGITIMERSSFEKNPIDFLEAKGYKEVKKDLIIKLPKYSLFELENGRKRMLASAGELQKGNELALPSKYVNFLYLASHYEKLKGSPEDNEQKQLFVEQHKHYLDEIIEQISEFSKRVILADANLDKVLSAYNKHRDKPIREQAENIIHLFTLTNLGAPAAFKYFDTTIDRKRYTSTKEVLDATLIHQSITGLYETRIDLSQLGGDGGGGSGGGEAAAKGGTLNIEDEHRLHETSKEPDVSLGSTWLSDFPQAWAETGGMGLAVRQAPLIIPLKATSTPVSIKQYPMSQEARLGIKPHIQRLLDQGILVPCQSPWNTPLLPVKKPGTNDYRPVQDLREVNKRVEDIHPTVPNPYNLLSGLPPSHQWYTVLDLKDAFFCLRLHPTSQPLFAFEWRDPEMGISGQLTWTRLPQGFKNSPTLFNEALHRDLADFRIQHPDLILLQYVDDLLLAATSELDCQQGTRALLQTLGNLGYRASAKKAQICQKQVKYLGYLLKEGQRWLTEARKETVMGQPTPKTPRQLREFLGKAGFCRLFIPGFAEMAAPLYPLTKPGTLFNWGPDQQKAYQEIKQALLTAPALGLPDLTKPFELFVDEKQGYAKGVLTQKLGPWRRPVAYLSKKLDPVAAGWPPCLRMVAAIAVLTKDAGKLTMGQPLVILAPHAVEALVKQPPDRWLSNARMTHYQALLLDTDRVQFGPVVALNPATLLPLPEEGLQHNCLDILAEAHGTRPDLTDQPLPDADHTWYTDGSSLLQEGQRKAGAAVTTETEVIWAKALPAGTSAQRAELIALTQALKMAEGKKLNVYTDSRYAFATAHIHGEIYRRRGWLTSEGKEIKNKDEILALLKALFLPKRLSIIHCPGHQKGHSAEARGNRMADQAARKAAITETPDTSTLLAGKRTADGSEFEKRTADGSEFESPKKKAKVE

SEQ ID NO: 3130 - protein, 2094 aa, synthetic construct; identical to SEQ ID NO: 2801

SEQ ID NO: 3131 - protein, 2096 aa, synthetic construct
MPAAKRVKLDGGDKKYSIGLDIGTNSVGWAVITDEYKVPSKKFKVLGNTDRHSIKKNLIGALLFDSGETAEATRLKRTARRRYTRRKNRICYLQEIFSNEMAKVDDSFFHRLEESFLVEEDKKHERHPIFGNIVDEVAYHEKYPTIYHLRKKLVDSTDKADLRLIYLALAHMIKFRGHFLIEGDLNPDNSDVDKLFIQLVQTYNQLFEENPINASGVDAKAILSARLSKSRRLENLIAQLPGEKKNGLFGNLIALSLGLTPNFKSNFDLAEDAKLQLSKDTYDDDLDNLLAQIGDQYADLFLAAKNLSDAILLSDILRVNTEITKAPLSASMIKRYDEHHQDLTLLKALVRQQLPEKYKEIFFDQSKNGYAGYIDGGASQEEFYKFIKPILEKMDGTEELLVKLNREDLLRKQRTFDNGSIPHQIHLGELHAILRRQEDFYPFLKDNREKIEKILTFRIPYYVGPLARGNSRFAWMTRKSEETITPWNFEEVVDKGASAQSFIERMTNFDKNLPNEKVLPKHSLLYEYFTVYNELTKVKYVTEGMRKPAFLSGEQKKAIVDLLFKTNRKVTVKQLKEDYFKKIECFDSVEISGVEDRFNASLGTYHDLLKIIKDKDFLDNEENEDILEDIVLTLTLFEDREMIEERLKTYAHLFDDKVMKQLKRRRYTGWGRLSRKLINGIRDKQSGKTILDFLKSDGFANRNFMQLIHDDSLTFKEDIQKAQVSGQGDSLHEHIANLAGSPAIKKGILQTVKVVDELVKVMGRHKPENIVIEMARENQTTQKGQKNSRERMKRIEEGIKELGSQILKEHPVENTQLQNEKLYLYYLQNGRDMYVDQELDINRLSDYDVDHIVPQSFLKDDSIDNKVLTRSDKARGKSDNVPSEEVVKKMKNYWRQLLNAKLITQRKFDNLTKAERGGLSELDKAGFIKRQLVETRQITKHVAQILDSRMNTKYDENDKLIREVKVITLKSKLVSDFRKDFQFYKVREINNYHHAHDAYLNAVVGTALIKKYPKLESEFVYGDYKVYDVRKMIAKSEQEIGKATAKYFFYSNIMNFFKTEITLANGEIRKRPLIETNGETGEIVWDKGRDFATVRKVLSMPQVNIVKKTEVQTGGFSKESILPKRNSDKLIARKKDWDPKKYGGFDSPTVAYSVLVVAKVEKGKSKKLKSVKELLGITIMERSSFEKNPIDFLEAKGYKEVKKDLIIKLPKYSLFELENGRKRMLASAGELQKGNELALPSKYVNFLYLASHYEKLKGSPEDNEQKQLFVEQHKHYLDEIIEQISEFSKRVILADANLDKVLSAYNKHRDKPIREQAENIIHLFTLTNLGAPAAFKYFDTTIDRKRYTSTKEVLDATLIHQSITGLYETRIDLSQLGGDGGGSSEAAAKGGSGGTLNIEDEHRLHETSKEPDVSLGSTWLSDFPQAWAETGGMGLAVRQAPLIIPLKATSTPVSIKQYPMSQEARLGIKPHIQRLLDQGILVPCQSPWNTPLLPVKKPGTNDYRPVQDLREVNKRVEDIHPTVPNPYNLLSGLPPSHQWYTVLDLKDAFFCLRLHPTSQPLFAFEWRDPEMGISGQLTWTRLPQGFKNSPTLFNEALHRDLADFRIQHPDLILLQYVDDLLLAATSELDCQQGTRALLQTLGNLGYRASAKKAQICQKQVKYLGYLLKEGQRWLTEARKETVMGQPTPKTPRQLREFLGKAGFCRLFIPGFAEMAAPLYPLTKPGTLFNWGPDQQKAYQEIKQALLTAPALGLPDLTKPFELFVDEKQGYAKGVLTQKLGPWRRPVAYLSKKLDPVAAGWPPCLRMVAAIAVLTKDAGKLTMGQPLVILAPHAVEALVKQPPDRWLSNARMTHYQALLLDTDRVQFGPVVALNPATLLPLPEEGLQHNCLDILAEAHGTRPDLTDQPLPDADHTWYTDGSSLLQEGQRKAGAAVTTETEVIWAKALPAGTSAQRAELIALTQALKMAEGKKLNVYTDSRYAFATAHIHGEIYRRRGWLTSEGKEIKNKDEILALLKALFLPKRLSIIHCPGHQKGHSAEARGNRMADQAARKAAITETPDTSTLLAGKRTADGSEFEKRTADGSEFESPKKKAKVE

SEQ ID NO: 3132 - protein, 2118 aa, synthetic construct
MPAAKRVKLDGGDKKYSIGLDIGTNSVGWAVITDEYKVPSKKFKVLGNTDRHSIKKNLIGALLFDSGETAEATRLKRTARRRYTRRKNRICYLQEIFSNEMAKVDDSFFHRLEESFLVEEDKKHERHPIFGNIVDEVAYHEKYPTIYHLRKKLVDSTDKADLRLIYLALAHMIKFRGHFLIEGDLNPDNSDVDKLFIQLVQTYNQLFEENPINASGVDAKAILSARLSKSRRLENLIAQLPGEKKNGLFGNLIALSLGLTPNFKSNFDLAEDAKLQLSKDTYDDDLDNLLAQIGDQYADLFLAAKNLSDAILLSDILRVNTEITKAPLSASMIKRYDEHHQDLTLLKALVRQQLPEKYKEIFFDQSKNGYAGYIDGGASQEEFYKFIKPILEKMDGTEELLVKLNREDLLRKQRTFDNGSIPHQIHLGELHAILRRQEDFYPFLKDNREKIEKILTFRIPYYVGPLARGNSRFAWMTRKSEETITPWNFEEVVDKGASAQSFIERMTNFDKNLPNEKVLPKHSLLYEYFTVYNELTKVKYVTEGMRKPAFLSGEQKKAIVDLLFKTNRKVTVKQLKEDYFKKIECFDSVEISGVEDRFNASLGTYHDLLKIIKDKDFLDNEENEDILEDIVLTLTLFEDREMIEERLKTYAHLFDDKVMKQLKRRRYTGWGRLSRKLINGIRDKQSGKTILDFLKSDGFANRNFMQLIHDDSLTFKEDIQKAQVSGQGDSLHEHIANLAGSPAIKKGILQTVKVVDELVKVMGRHKPENIVIEMARENQTTQKGQKNSRERMKRIEEGIKELGSQILKEHPVENTQLQNEKLYLYYLQNGRDMYVDQELDINRLSDYDVDHIVPQSFLKDDSIDNKVLTRSDKARGKSDNVPSEEVVKKMKNYWRQLLNAKLITQRKFDNLTKAERGGLSELDKAGFIKRQLVETRQITKHVAQILDSRMNTKYDENDKLIREVKVITLKSKLVSDFRKDFQFYKVREINNYHHAHDAYLNAVVGTALIKKYPKLESEFVYGDYKVYDVRKMIAKSEQEIGKATAKYFFYSNIMNFFKTEITLANGEIRKRPLIETNGETGEIVWDKGRDFATVRKVLSMPQVNIVKKTEVQTGGFSKESILPKRNSDKLIARKKDWDPKKYGGFDSPTVAYSVLVVAKVEKGKSKKLKSVKELLGITIMERSSFEKNPIDFLEAKGYKEVKKDLIIKLPKYSLFELENGRKRMLASAGELQKGNELALPSKYVNFLYLASHYEKLKGSPEDNEQKQLFVEQHKHYLDEIIEQISEFSKRVILADANLDKVLSAYNKHRDKPIREQAENIIHLFTLTNLGAPAAFKYFDTTIDRKRYTSTKEVLDATLIHQSITGLYETRIDLSQLGGDGGSGGSSGGSSGSETPGTSESATPESSGGSSGGSSGGTLNIEDEHRLHETSKEPDVSLGSTWLSDFPQAWAETGGMGLAVRQAPLIIPLKATSTPVSIKQYPMSQEARLGIKPHIQRLLDQGILVPCQSPWNTPLLPVKKPGTNDYRPVQDLREVNKRVEDIHPTVPNPYNLLSGLPPSHQWYTVLDLKDAFFCLRLHPTSQPLFAFEWRDPEMGISGQLTWTRLPQGFKNSPTLFNEALHRDLADFRIQHPDLILLQYVDDLLLAATSELDCQQGTRALLQTLGNLGYRASAKKAQICQKQVKYLGYLLKEGQRWLTEARKETVMGQPTPKTPRQLREFLGKAGFCRLFIPGFAEMAAPLYPLTKPGTLFNWGPDQQKAYQEIKQALLTAPALGLPDLTKPFELFVDEKQGYAKGVLTQKLGPWRRPVAYLSKKLDPVAAGWPPCLRMVAAIAVLTKDAGKLTMGQPLVILAPHAVEALVKQPPDRWLSNARMTHYQALLLDTDRVQFGPVVALNPATLLPLPEEGLQHNCLDILAEAHGTRPDLTDQPLPDADHTWYTDGSSLLQEGQRKAGAAVTTETEVIWAKALPAGTSAQRAELIALTQALKMAEGKKLNVYTDSRYAFATAHIHGEIYRRRGWLTSEGKEIKNKDEILALLKALFLPKRLSIIHCPGHQKGHSAEARGNRMADQAARKAAITETPDTSTLLAGKRTADGSEFEKRTADGSEFESPKKKAKVE

SEQ ID NO: 3133 - protein, 2094 aa, synthetic construct; identical to SEQ ID NO: 2859

SEQ ID NO: 3134 - protein, 2094 aa, synthetic construct; identical to SEQ ID NO: 2854

SEQ ID NO: 3135 - protein, 2091 aa, synthetic construct; identical to SEQ ID NO: 2832

SEQ ID NO: 3136 - protein, 2096 aa, synthetic construct
MPAAKRVKLDGGDKKYSIGLDIGTNSVGWAVITDEYKVPSKKFKVLGNTDRHSIKKNLIGALLFDSGETAEATRLKRTARRRYTRRKNRICYLQEIFSNEMAKVDDSFFHRLEESFLVEEDKKHERHPIFGNIVDEVAYHEKYPTIYHLRKKLVDSTDKADLRLIYLALAHMIKFRGHFLIEGDLNPDNSDVDKLFIQLVQTYNQLFEENPINASGVDAKAILSARLSKSRRLENLIAQLPGEKKNGLFGNLIALSLGLTPNFKSNFDLAEDAKLQLSKDTYDDDLDNLLAQIGDQYADLFLAAKNLSDAILLSDILRVNTEITKAPLSASMIKRYDEHHQDLTLLKALVRQQLPEKYKEIFFDQSKNGYAGYIDGGASQEEFYKFIKPILEKMDGTEELLVKLNREDLLRKQRTFDNGSIPHQIHLGELHAILRRQEDFYPFLKDNREKIEKILTFRIPYYVGPLARGNSRFAWMTRKSEETITPWNFEEVVDKGASAQSFIERMTNFDKNLPNEKVLPKHSLLYEYFTVYNELTKVKYVTEGMRKPAFLSGEQKKAIVDLLFKTNRKVTVKQLKEDYFKKIECFDSVEISGVEDRFNASLGTYHDLLKIIKDKDFLDNEENEDILEDIVLTLTLFEDREMIEERLKTYAHLFDDKVMKQLKRRRYTGWGRLSRKLINGIRDKQSGKTILDFLKSDGFANRNFMQLIHDDSLTFKEDIQKAQVSGQGDSLHEHIANLAGSPAIKKGILQTVKVVDELVKVMGRHKPENIVIEMARENQTTQKGQKNSRERMKRIEEGIKELGSQILKEHPVENTQLQNEKLYLYYLQNGRDMYVDQELDINRLSDYDVDHIVPQSFLKDDSIDNKVLTRSDKARGKSDNVPSEEVVKKMKNYWRQLLNAKLITQRKFDNLTKAERGGLSELDKAGFIKRQLVETRQITKHVAQILDSRMNTKYDENDKLIREVKVITLKSKLVSDFRKDFQFYKVREINNYHHAHDAYLNAVVGTALIKKYPKLESEFVYGDYKVYDVRKMIAKSEQEIGKATAKYFFYSNIMNFFKTEITLANGEIRKRPLIETNGETGEIVWDKGRDFATVRKVLSMPQVNIVKKTEVQTGGFSKESILPKRNSDKLIARKKDWDPKKYGGFDSPTVAYSVLVVAKVEKGKSKKLKSVKELLGITIMERSSFEKNPIDFLEAKGYKEVKKDLIIKLPKYSLFELENGRKRMLASAGELQKGNELALPSKYVNFLYLASHYEKLKGSPEDNEQKQLFVEQHKHYLDEIIEQISEFSKRVILADANLDKVLSAYNKHRDKPIREQAENIIHLFTLTNLGAPAAFKYFDTTIDRKRYTSTKEVLDATLIHQSITGLYETRIDLSQLGGDGGGGGPAPEAAAKGGTLNIEDEHRLHETSKEPDVSLGSTWLSDFPQAWAETGGMGLAVRQAPLIIPLKATSTPVSIKQYPMSQEARLGIKPHIQRLLDQGILVPCQSPWNTPLLPVKKPGTNDYRPVQDLREVNKRVEDIHPTVPNPYNLLSGLPPSHQWYTVLDLKDAFFCLRLHPTSQPLFAFEWRDPEMGISGQLTWTRLPQGFKNSPTLFNEALHRDLADFRIQHPDLILLQYVDDLLLAATSELDCQQGTRALLQTLGNLGYRASAKKAQICQKQVKYLGYLLKEGQRWLTEARKETVMGQPTPKTPRQLREFLGKAGFCRLFIPGFAEMAAPLYPLTKPGTLFNWGPDQQKAYQEIKQALLTAPALGLPDLTKPFELFVDEKQGYAKGVLTQKLGPWRRPVAYLSKKLDPVAAGWPPCLRMVAAIAVLTKDAGKLTMGQPLVILAPHAVEALVKQPPDRWLSNARMTHYQALLLDTDRVQFGPVVALNPATLLPLPEEGLQHNCLDILAEAHGTRPDLTDQPLPDADHTWYTDGSSLLQEGQRKAGAAVTTETEVIWAKALPAGTSAQRAELIALTQALKMAEGKKLNVYTDSRYAFATAHIHGEIYRRRGWLTSEGKEIKNKDEILALLKALFLPKRLSIIHCPGHQKGHSAEARGNRMADQAARKAAITETPDTSTLLAGKRTADGSEFEKRTADGSEFESPKKKAKVE

SEQ ID NO: 3137 - protein, 2091 aa, synthetic construct
MPAAKRVKLDGGDKKYSIGLDIGTNSVGWAVITDEYKVPSKKFKVLGNTDRHSIKKNLIGALLFDSGETAEATRLKRTARRRYTRRKNRICYLQEIFSNEMAKVDDSFFHRLEESFLVEEDKKHERHPIFGNIVDEVAYHEKYPTIYHLRKKLVDSTDKADLRLIYLALAHMIKFRGHFLIEGDLNPDNSDVDKLFIQLVQTYNQLFEENPINASGVDAKAILSARLSKSRRLENLIAQLPGEKKNGLFGNLIALSLGLTPNFKSNFDLAEDAKLQLSKDTYDDDLDNLLAQIGDQYADLFLAAKNLSDAILLSDILRVNTEITKAPLSASMIKRYDEHHQDLTLLKALVRQQLPEKYKEIFFDQSKNGYAGYIDGGASQEEFYKFIKPILEKMDGTEELLVKLNREDLLRKQRTFDNGSIPHQIHLGELHAILRRQEDFYPFLKDNREKIEKILTFRIPYYVGPLARGNSRFAWMTRKSEETITPWNFEEVVDKGASAQSFIERMTNFDKNLPNEKVLPKHSLLYEYFTVYNELTKVKYVTEGMRKPAFLSGEQKKAIVDLLFKTNRKVTVKQLKEDYFKKIECFDSVEISGVEDRFNASLGTYHDLLKIIKDKDFLDNEENEDILEDIVLTLTLFEDREMIEERLKTYAHLFDDKVMKQLKRRRYTGWGRLSRKLINGIRDKQSGKTILDFLKSDGFANRNFMQLIHDDSLTFKEDIQKAQVSGQGDSLHEHIANLAGSPAIKKGILQTVKVVDELVKVMGRHKPENIVIEMARENQTTQKGQKNSRERMKRIEEGIKELGSQILKEHPVENTQLQNEKLYLYYLQNGRDMYVDQELDINRLSDYDVDHIVPQSFLKDDSIDNKVLTRSDKARGKSDNVPSEEVVKKMKNYWRQLLNAKLITQRKFDNLTKAERGGLSELDKAGFIKRQLVETRQITKHVAQILDSRMNTKYDENDKLIREVKVITLKSKLVSDFRKDFQFYKVREINNYHHAHDAYLNAVVGTALIKKYPKLESEFVYGDYKVYDVRKMIAKSEQEIGKATAKYFFYSNIMNFFKTEITLANGEIRKRPLIETNGETGEIVWDKGRDFATVRKVLSMPQVNIVKKTEVQTGGFSKESILPKRNSDKLIARKKDWDPKKYGGFDSPTVAYSVLVVAKVEKGKSKKLKSVKELLGITIMERSSFEKNPIDFLEAKGYKEVKKDLIIKLPKYSLFELENGRKRMLASAGELQKGNELALPSKYVNFLYLASHYEKLKGSPEDNEQKQLFVEQHKHYLDEIIEQISEFSKRVILADANLDKVLSAYNKHRDKPIREQAENIIHLFTLTNLGAPAAFKYFDTTIDRKRYTSTKEVLDATLIHQSITGLYETRIDLSQLGGDGGPAPGGGGGTLNIEDEYRLHEISTEPDVSPGSTWLSDFPQAWAETGGMGLAVRQAPLIIPLKATSTPVSIKQYPMSQEAKLGIKPHIQRLLDQGILVPCQSPWNTPLLPVKKPGTNDYRPVQGLREVNKRVEDIHPTVPNPYNLLSGLPTSHRWYTVLDLKDAFFCLRLHPTSQPLFASEWRDPGMGISGQLTWTRLPQGFKNSPTLFDEALHRGLADFRIQHPDLILLQYVDDLLLAATSELDCQQGTRALLKTLGNLGYRASAKKAQICQKQVKYLGYLLREGQRWLTEARKETVMGQPTPKTPRQLREFLGTAGFCRLWIPRFAEMAAPLYPLTKTGTLFNWGPDQQKAYHEIKQALLTAPALGLPDLTKPFELFVDEKQGYAKGVLTQKLGPWRRPVAYLSKKLDPVAAGWPPCLRMVAAIAVLTKDAGKLTMGQPLVILAPHAVEALVKQPPDRWLSNARMTHYQAMLLDTDRVQFGPVVALNPATLLPLPEEGAPHDCLEILAETHGTEPDLTDQPIPDADHTWYTDGSSFLQEGQRKAGAAVTTETEVIWARALPAGTSAQRAELIALTQALKMAEGKRLNVYTDSRYAFATAHIHGEIYKRRGLLTSEGREIKNKSEILALLKALFLPKRLSIIHCLGHQKGDSAEARGNRLADQAAREAAIKTPPDTSTLLAGKRTADGSEFEKRTADGSEFESPKKKAKVE

SEQ ID NO: 3138 - protein, 2088 aa, synthetic construct
MPAAKRVKLDGGDKKYSIGLDIGTNSVGWAVITDEYKVPSKKFKVLGNTDRHSIKKNLIGALLFDSGETAEATRLKRTARRRYTRRKNRICYLQEIFSNEMAKVDDSFFHRLEESFLVEEDKKHERHPIFGNIVDEVAYHEKYPTIYHLRKKLVDSTDKADLRLIYLALAHMIKFRGHFLIEGDLNPDNSDVDKLFIQLVQTYNQLFEENPINASGVDAKAILSARLSKSRRLENLIAQLPGEKKNGLFGNLIALSLGLTPNFKSNFDLAEDAKLQLSKDTYDDDLDNLLAQIGDQYADLFLAAKNLSDAILLSDILRVNTEITKAPLSASMIKRYDEHHQDLTLLKALVRQQLPEKYKEIFFDQSKNGYAGYIDGGASQEEFYKFIKPILEKMDGTEELLVKLNREDLLRKQRTFDNGSIPHQIHLGELHAILRRQEDFYPFLKDNREKIEKILTFRIPYYVGPLARGNSRFAWMTRKSEETITPWNFEEVVDKGASAQSFIERMTNFDKNLPNEKVLPKHSLLYEYFTVYNELTKVKYVTEGMRKPAFLSGEQKKAIVDLLFKTNRKVTVKQLKEDYFKKIECFDSVEISGVEDRFNASLGTYHDLLKIIKDKDFLDNEENEDILEDIVLTLTLFEDREMIEERLKTYAHLFDDKVMKQLKRRRYTGWGRLSRKLINGIRDKQSGKTILDFLKSDGFANRNFMQLIHDDSLTFKEDIQKAQVSGQGDSLHEHIANLAGSPAIKKGILQTVKVVDELVKVMGRHKPENIVIEMARENQTTQKGQKNSRERMKRIEEGIKELGSQILKEHPVENTQLQNEKLYLYYLQNGRDMYVDQELDINRLSDYDVDHIVPQSFLKDDSIDNKVLTRSDKARGKSDNVPSEEVVKKMKNYWRQLLNAKLITQRKFDNLTKAERGGLSELDKAGFIKRQLVETRQITKHVAQILDSRMNTKYDENDKLIREVKVITLKSKLVSDFRKDFQFYKVREINNYHHAHDAYLNAVVGTALIKKYPKLESEFVYGDYKVYDVRKMIAKSEQEIGKATAKYFFYSNIMNFFKTEITLANGEIRKRPLIETNGETGEIVWDKGRDFATVRKVLSMPQVNIVKKTEVQTGGFSKESILPKRNSDKLIARKKDWDPKKYGGFDSPTVAYSVLVVAKVEKGKSKKLKSVKELLGITIMERSSFEKNPIDFLEAKGYKEVKKDLIIKLPKYSLFELENGRKRMLASAGELQKGNELALPSKYVNFLYLASHYEKLKGSPEDNEQKQLFVEQHKHYLDEIIEQISEFSKRVILADANLDKVLSAYNKHRDKPIREQAENIIHLFTLTNLGAPAAFKYFDTTIDRKRYTSTKEVLDATLIHQSITGLYETRIDLSQLGGDGGGGSGGTLNIEDEYRLHEISTEPDVSPGSTWLSDFPQAWAETGGMGLAVRQAPLIIPLKATSTPVSIKQYPMSQEAKLGIKPHIQRLLDQGILVPCQSPWNTPLLPVKKPGTNDYRPVQGLREVNKRVEDIHPTVPNPYNLLSGLPTSHRWYTVLDLKDAFFCLRLHPTSQPLFASEWRDPGMGISGQLTWTRLPQGFKNSPTLFNEALHRGLADFRIQHPDLILLQYVDDLLLAATSELDCQQGTRALLKTLGNLGYRASAKKAQICQKQVKYLGYLLREGQRWLTEARKETVMGQPTPKTPRQLREFLGTAGFCRLWIPRFAEMAAPLYPLTKPGTLFNWGPDQQKAYHEIKQALLTAPALGLPDLTKPFELFVDEKQGYAKGVLTQKLGPWRRPVAYLSKKLDPVAAGWPPCLRMVAAIAVLTKDAGKLTMGQPLVILAPHAVEALVKQPPDRWLSNARMTHYQAMLLDTDRVQFGPVVALNPATLLPLPEEGAPHDCLEILAETHGTEPDLTDQPIPDADHTWYTDGSSFLQEGQRKAGAAVTTETEVIWARALPAGTSAQRAELIALTQALKMAEGKRLNVYTDSRYAFATAHIHGEIYKRRGWLTSEGREIKNKSEILALLKALFLPKRLSIIHCLGHQKGDSAEARGNRLADQAAREAAIKTPPDTSTLLAGKRTADGSEFEKRTADGSEFESPKKKAKVE

SEQ ID NO: 3139 - protein, 2091 aa, synthetic construct
MPAAKRVKLDGGDKKYSIGLDIGTNSVGWAVITDEYKVPSKKFKVLGNTDRHSIKKNLIGALLFDSGETAEATRLKRTARRRYTRRKNRICYLQEIFSNEMAKVDDSFFHRLEESFLVEEDKKHERHPIFGNIVDEVAYHEKYPTIYHLRKKLVDSTDKADLRLIYLALAHMIKFRGHFLIEGDLNPDNSDVDKLFIQLVQTYNQLFEENPINASGVDAKAILSARLSKSRRLENLIAQLPGEKKNGLFGNLIALSLGLTPNFKSNFDLAEDAKLQLSKDTYDDDLDNLLAQIGDQYADLFLAAKNLSDAILLSDILRVNTEITKAPLSASMIKRYDEHHQDLTLLKALVRQQLPEKYKEIFFDQSKNGYAGYIDGGASQEEFYKFIKPILEKMDGTEELLVKLNREDLLRKQRTFDNGSIPHQIHLGELHAILRRQEDFYPFLKDNREKIEKILTFRIPYYVGPLARGNSRFAWMTRKSEETITPWNFEEVVDKGASAQSFIERMTNFDKNLPNEKVLPKHSLLYEYFTVYNELTKVKYVTEGMRKPAFLSGEQKKAIVDLLFKTNRKVTVKQLKEDYFKKIECFDSVEISGVEDRFNASLGTYHDLLKIIKDKDFLDNEENEDILEDIVLTLTLFEDREMIEERLKTYAHLFDDKVMKQLKRRRYTGWGRLSRKLINGIRDKQSGKTILDFLKSDGFANRNFMQLIHDDSLTFKEDIQKAQVSGQGDSLHEHIANLAGSPAIKKGILQTVKVVDELVKVMGRHKPENIVIEMARENQTTQKGQKNSRERMKRIEEGIKELGSQILKEHPVENTQLQNEKLYLYYLQNGRDMYVDQELDINRLSDYDVDHIVPQSFLKDDSIDNKVLTRSDKARGKSDNVPSEEVVKKMKNYWRQLLNAKLITQRKFDNLTKAERGGLSELDKAGFIKRQLVETRQITKHVAQILDSRMNTKYDENDKLIREVKVITLKSKLVSDFRKDFQFYKVREINNYHHAHDAYLNAVVGTALIKKYPKLESEFVYGDYKVYDVRKMIAKSEQEIGKATAKYFFYSNIMNFFKTEITLANGEIRKRPLIETNGETGEIVWDKGRDFATVRKVLSMPQVNIVKKTEVQTGGFSKESILPKRNSDKLIARKKDWDPKKYGGFDSPTVAYSVLVVAKVEKGKSKKLKSVKELLGITIMERSSFEKNPIDFLEAKGYKEVKKDLIIKLPKYSLFELENGRKRMLASAGELQKGNELALPSKYVNFLYLASHYEKLKGSPEDNEQKQLFVEQHKHYLDEIIEQISEFSKRVILADANLDKVLSAYNKHRDKPIREQAENIIHLFTLTNLGAPAAFKYFDTTIDRKRYTSTKEVLDATLIHQSITGLYETRIDLSQLGGDGGPAPGGSGGTLNIEDEYRLHEISTEPDVSPGSTWLSDFPQAWAETGGMGLAVRQAPLIIPLKATSTPVSIKQYPMSQEAKLGIKPHIQRLLDQGILVPCQSPWNTPLLPVKKPGTNDYRPVQGLREVNKRVEDIHPTVPNPYNLLSGLPTSHRWYTVLDLKDAFFCLRLHPTSQPLFASEWRDPGMGISGQLTWTRLPQGFKNSPTLFNEALHRGLADFRIQHPDLILLQYVDDLLLAATSELDCQQGTRALLKTLGNLGYRASAKKAQICQKQVKYLGYLLREGQRWLTEARKETVMGQPTPKTPRQLREFLGTAGFCRLWIPRFAEMAAPLYPLTKPGTLFNWGPDQQKAYHEIKQALLTAPALGLPDLTKPFELFVDEKQGYAKGVLTQKLGPWRRPVAYLSKKLDPVAAGWPPCLRMVAAIAVLTKDAGKLTMGQPLVILAPHAVEALVKQPPDRWLSNARMTHYQAMLLDTDRVQFGPVVALNPATLLPLPEEGAPHDCLEILAETHGTEPDLTDQPIPDADHTWYTDGSSFLQEGQRKAGAAVTTETEVIWARALPAGTSAQRAELIALTQALKMAEGKRLNVYTDSRYAFATAHIHGEIYKRRGWLTSEGREIKNKSEILALLKALFLPKRLSIIHCLGHQKGDSAEARGNRLADQAAREAAIKTPPDTSTLLAGKRTADGSEFEKRTADGSEFESPKKKAKVE

SEQ ID NO: 3140 - protein, 2105 aa, synthetic construct
MPAAKRVKLDGGDKKYSIGLDIGTNSVGWAVITDEYKVPSKKFKVLGNTDRHSIKKNLIGALLFDSGETAEATRLKRTARRRYTRRKNRICYLQEIFSNEMAKVDDSFFHRLEESFLVEEDKKHERHPIFGNIVDEVAYHEKYPTIYHLRKKLVDSTDKADLRLIYLALAHMIKFRGHFLIEGDLNPDNSDVDKLFIQLVQTYNQLFEENPINASGVDAKAILSARLSKSRRLENLIAQLPGEKKNGLFGNLIALSLGLTPNFKSNFDLAEDAKLQLSKDTYDDDLDNLLAQIGDQYADLFLAAKNLSDAILLSDILRVNTEITKAPLSASMIKRYDEHHQDLTLLKALVRQQLPEKYKEIFFDQSKNGYAGYIDGGASQEEFYKFIKPILEKMDGTEELLVKLNREDLLRKQRTFDNGSIPHQIHLGELHAILRRQEDFYPFLKDNREKIEKILTFRIPYYVGPLARGNSRFAWMTRKSEETITPWNFEEVVDKGASAQSFIERMTNFDKNLPNEKVLPKHSLLYEYFTVYNELTKVKYVTEGMRKPAFLSGEQKKAIVDLLFKTNRKVTVKQLKEDYFKKIECFDSVEISGVEDRFNASLGTYHDLLKIIKDKDFLDNEENEDILEDIVLTLTLFEDREMIEERLKTYAHLFDDKVMKQLKRRRYTGWGRLSRKLINGIRDKQSGKTILDFLKSDGFANRNFMQLIHDDSLTFKEDIQKAQVSGQGDSLHEHIANLAGSPAIKKGILQTVKVVDELVKVMGRHKPENIVIEMARENQTTQKGQKNSRERMKRIEEGIKELGSQILKEHPVENTQLQNEKLYLYYLQNGRDMYVDQELDINRLSDYDVDHIVPQSFLKDDSIDNKVLTRSDKARGKSDNVPSEEVVKKMKNYWRQLLNAKLITQRKFDNLTKAERGGLSELDKAGFIKRQLVETRQITKHVAQILDSRMNTKYDENDKLIREVKVITLKSKLVSDFRKDFQFYKVREINNYHHAHDAYLNAVVGTALIKKYPKLESEFVYGDYKVYDVRKMIAKSEQEIGKATAKYFFYSNIMNFFKTEITLANGEIRKRPLIETNGETGEIVWDKGRDFATVRKVLSMPQVNIVKKTEVQTGGFSKESILPKRNSDKLIARKKDWDPKKYGGFDSPTVAYSVLVVAKVEKGKSKKLKSVKELLGITIMERSSFEKNPIDFLEAKGYKEVKKDLIIKLPKYSLFELENGRKRMLASAGELQKGNELALPSKYVNFLYLASHYEKLKGSPEDNEQKQLFVEQHKHYLDEIIEQISEFSKRVILADANLDKVLSAYNKHRDKPIREQAENIIHLFTLTNLGAPAAFKYFDTTIDRKRYTSTKEVLDATLIHQSITGLYETRIDLSQLGGDGGEAAAKEAAAKEAAAKEAAAKGGTLNIEDEYRLHEISTEPDVSPGSTWLSDFPQAWAETGGMGLAVRQAPLIIPLKATSTPVSIKQYPMSQEAKLGIKPHIQRLLDQGILVPCQSPWNTPLLPVKKPGTNDYRPVQGLREVNKRVEDIHPTVPNPYNLLSGLPTSHRWYTVLDLKDAFFCLRLHPTSQPLFASEWRDPGMGISGQLTWTRLPQGFKNSPTLFNEALHRGLADFRIQHPDLILLQYVDDLLLAATSELDCQQGTRALLKTLGNLGYRASAKKAQICQKQVKYLGYLLREGQRWLTEARKETVMGQPTPKTPRQLREFLGTAGFCRLWIPRFAEMAAPLYPLTKPGTLFNWGPDQQKAYHEIKQALLTAPALGLPDLTKPFELFVDEKQGYAKGVLTQKLGPWRRPVAYLSKKLDPVAAGWPPCLRMVAAIAVLTKDAGKLTMGQPLVILAPHAVEALVKQPPDRWLSNARMTHYQAMLLDTDRVQFGPVVALNPATLLPLPEEGAPHDCLEILAETHGTEPDLTDQPIPDADHTWYTDGSSFLQEGQRKAGAAVTTETEVIWARALPAGTSAQRAELIALTQALKMAEGKRLNVYTDSRYAFATAHIHGEIYKRRGWLTSEGREIKNKSEILALLKALFLPKRLSIIHCLGHQKGDSAEARGNRLADQAAREAAIKTPPDTSTLLAGKRTADGSEFEKRTADGSEFESPKKKAKVE

SEQ ID NO: 3141 - protein, 2151 aa, synthetic construct
MPAAKRVKLDGGDKKYSIGLDIGTNSVGWAVITDEYKVPSKKFKVLGNTDRHSIKKNLIGALLFDSGETAEATRLKRTARRRYTRRKNRICYLQEIFSNEMAKVDDSFFHRLEESFLVEEDKKHERHPIFGNIVDEVAYHEKYPTIYHLRKKLVDSTDKADLRLIYLALAHMIKFRGHFLIEGDLNPDNSDVDKLFIQLVQTYNQLFEENPINASGVDAKAILSARLSKSRRLENLIAQLPGEKKNGLFGNLIALSLGLTPNFKSNFDLAEDAKLQLSKDTYDDDLDNLLAQIGDQYADLFLAAKNLSDAILLSDILRVNTEITKAPLSASMIKRYDEHHQDLTLLKALVRQQLPEKYKEIFFDQSKNGYAGYIDGGASQEEFYKFIKPILEKMDGTEELLVKLNREDLLRKQRTFDNGSIPHQIHLGELHAILRRQEDFYPFLKDNREKIEKILTFRIPYYVGPLARGNSRFAWMTRKSEETITPWNFEEVVDKGASAQSFIERMTNFDKNLPNEKVLPKHSLLYEYFTVYNELTKVKYVTEGMRKPAFLSGEQKKAIVDLLFKTNRKVTVKQLKEDYFKKIECFDSVEISGVEDRFNASLGTYHDLLKIIKDKDFLDNEENEDILEDIVLTLTLFEDREMIEERLKTYAHLFDDKVMKQLKRRRYTGWGRLSRKLINGIRDKQSGKTILDFLKSDGFANRNFMQLIHDDSLTFKEDIQKAQVSGQGDSLHEHIANLAGSPAIKKGILQTVKVVDELVKVMGRHKPENIVIEMARENQTTQKGQKNSRERMKRIEEGIKELGSQILKEHPVENTQLQNEKLYLYYLQNGRDMYVDQELDINRLSDYDVDHIVPQSFLKDDSIDNKVLTRSDKARGKSDNVPSEEVVKKMKNYWRQLLNAKLITQRKFDNLTKAERGGLSELDKAGFIKRQLVETRQITKHVAQILDSRMNTKYDENDKLIREVKVITLKSKLVSDFRKDFQFYKVREINNYHHAHDAYLNAVVGTALIKKYPKLESEFVYGDYKVYDVRKMIAKSEQEIGKATAKYFFYSNIMNFFKTEITLANGEIRKRPLIETNGETGEIVWDKGRDFATVRKVLSMPQVNIVKKTEVQTGGFSKESILPKRNSDKLIARKKDWDPKKYGGFDSPTVAYSVLVVAKVEKGKSKKLKSVKELLGITIMERSSFEKNPIDFLEAKGYKEVKKDLIIKLPKYSLFELENGRKRMLASAGELQKGNELALPSKYVNFLYLASHYEKLKGSPEDNEQKQLFVEQHKHYLDEIIEQISEFSKRVILADANLDKVLSAYNKHRDKPIREQAENIIHLFTLTNLGAPAAFKYFDTTIDRKRYTSTKEVLDATLIHQSITGLYETRIDLSQLGGDGGAEAAAKEAAAKEAAAKEAAAKALEAEAAAKEAAAKEAAAKEAAAKAGGVQEISDSRPMLHIYLNGRRFLGLLDTGADKTCIAGRDWPANWPIHQTESSLQGLGMACGVARSSQPLRWQHEDKSGIIHPFVIPTLPFTLWGRDIMKDIKVRLMTDSPDDSQDLMIGAIESNLFADQISWKSDQPVWLNQWPLKQEKLQALQQLVTEQLQLGHLEESNSPWNTPVFVIKKKSGKWRLLQDLRAVNATMHDMGALQPGLPSPVAVPKGWEIIIIDLQDCFFNIKLHPEDCKRFAFSVPSPNFKRPYQRFQWKVLPQGMKNSPTLCQKFVDKAILTVRDKYQDSYIVHYMDDILLAHPSRSIVDEILTSMIQALNKHGLVVSTEKIQKYDNLKYLGTHIQGDSVSYQKLQIRTDKLRTLNDFQKLLGNINWIRPFLKLTTGELKPLFEILNGDSNPISTRKLTPEACKALQLMNERLSTARVKRLDLSQPWSLCILKTEYTPTACLWQDGVVEWIHLPHISPKVITPYDIFCTQLIIKGRHRSKELFSKDPDYIVVPYTKVQFDLLLQEKEDWPISLLGFLGEVHFHLPKDPLLTFTLQTAIIFPHMTSTTPLEKGIVIFTDGSANGRSVTYIQGREPIIKENTQNTAQQAEIVAVITAFEEVSQPFNLYTDSKYVTGLFPEIETATLSPRTKIYTELKHLQRLIHKRQEKFYIGHIRGHTGLPGPLAQGNAYADSLTRILTAAGKRTADGSEFEKRTADGSEFESPKKKAKVE

SEQ ID NO: 3142 - protein, 2130 aa, synthetic construct
MPAAKRVKLDGGDKKYSIGLDIGTNSVGWAVITDEYKVPSKKFKVLGNTDRHSIKKNLIGALLFDSGETAEATRLKRTARRRYTRRKNRICYLQEIFSNEMAKVDDSFFHRLEESFLVEEDKKHERHPIFGNIVDEVAYHEKYPTIYHLRKKLVDSTDKADLRLIYLALAHMIKFRGHFLIEGDLNPDNSDVDKLFIQLVQTYNQLFEENPINASGVDAKAILSARLSKSRRLENLIAQLPGEKKNGLFGNLIALSLGLTPNFKSNFDLAEDAKLQLSKDTYDDDLDNLLAQIGDQYADLFLAAKNLSDAILLSDILRVNTEITKAPLSASMIKRYDEHHQDLTLLKALVRQQLPEKYKEIFFDQSKNGYAGYIDGGASQEEFYKFIKPILEKMDGTEELLVKLNREDLLRKQRTFDNGSIPHQIHLGELHAILRRQEDFYPFLKDNREKIEKILTFRIPYYVGPLARGNSRFAWMTRKSEETITPWNFEEVVDKGASAQSFIERMTNFDKNLPNEKVLPKHSLLYEYFTVYNELTKVKYVTEGMRKPAFLSGEQKKAIVDLLFKTNRKVTVKQLKEDYFKKIECFDSVEISGVEDRFNASLGTYHDLLKIIKDKDFLDNEENEDILEDIVLTLTLFEDREMIEERLKTYAHLFDDKVMKQLKRRRYTGWGRLSRKLINGIRDKQSGKTILDFLKSDGFANRNFMQLIHDDSLTFKEDIQKAQVSGQGDSLHEHIANLAGSPAIKKGILQTVKVVDELVKVMGRHKPENIVIEMARENQTTQKGQKNSRERMKRIEEGIKELGSQILKEHPVENTQLQNEKLYLYYLQNGRDMYVDQELDINRLSDYDVDHIVPQSFLKDDSIDNKVLTRSDKARGKSDNVPSEEVVKKMKNYWRQLLNAKLITQRKFDNLTKAERGGLSELDKAGFIKRQLVETRQITKHVAQILDSRMNTKYDENDKLIREVKVITLKSKLVSDFRKDFQFYKVREINNYHHAHDAYLNAVVGTALIKKYPKLESEFVYGDYKVYDVRKMIAKSEQEIGKATAKYFFYSNIMNFFKTEITLANGEIRKRPLIETNGETGEIVWDKGRDFATVRKVLSMPQVNIVKKTEVQTGGFSKESILPKRNSDKLIARKKDWDPKKYGGFDSPTVAYSVLVVAKVEKGKSKKLKSVKELLGITIMERSSFEKNPIDFLEAKGYKEVKKDLIIKLPKYSLFELENGRKRMLASAGELQKGNELALPSKYVNFLYLASHYEKLKGSPEDNEQKQLFVEQHKHYLDEIIEQISEFSKRVILADANLDKVLSAYNKHRDKPIREQAENIIHLFTLTNLGAPAAFKYFDTTIDRKRYTSTKEVLDATLIHQSITGLYETRIDLSQLGGDGGEAAAKEAAAKEAAAKEAAAKEAAAKGGVQEISDSRPMLHIYLNGRRFLGLLDTGADKTCIAGRDWPANWPIHQTESSLQGLGMACGVARSSQPLRWQHEDKSGIIHPFVIPTLPFTLWGRDIMKDIKVRLMTDSPDDSQDLMIGAIESNLFADQISWKSDQPVWLNQWPLKQEKLQALQQLVTEQLQLGHLEESNSPWNTPVFVIKKKSGKWRLLQDLRAVNATMHDMGALQPGLPSPVAVPKGWEIIIIDLQDCFFNIKLHPEDCKRFAFSVPSPNFKRPYQRFQWKVLPQGMKNSPTLCQKFVDKAILTVRDKYQDSYIVHYMDDILLAHPSRSIVDEILTSMIQALNKHGLVVSTEKIQKYDNLKYLGTHIQGDSVSYQKLQIRTDKLRTLNDFQKLLGNINWIRPFLKLTTGELKPLFEILNGDSNPISTRKLTPEACKALQLMNERLSTARVKRLDLSQPWSLCILKTEYTPTACLWQDGVVEWIHLPHISPKVITPYDIFCTQLIIKGRHRSKELFSKDPDYIVVPYTKVQFDLLLQEKEDWPISLLGFLGEVHFHLPKDPLLTFTLQTAIIFPHMTSTTPLEKGIVIFTDGSANGRSVTYIQGREPIIKENTQNTAQQAEIVAVITAFEEVSQPFNLYTDSKYVTGLFPEIETATLSPRTKIYTELKHLQRLIHKRQEKFYIGHIRGHTGLPGPLAQGNAYADSLTRILTAAGKRTADGSEFEKRTADGSEFESPKKKAKVE

SEQ ID NO: 3143 - protein, 2138 aa, synthetic construct
MPAAKRVKLDGGDKKYSIGLDIGTNSVGWAVITDEYKVPSKKFKVLGNTDRHSIKKNLIGALLFDSGETAEATRLKRTARRRYTRRKNRICYLQEIFSNEMAKVDDSFFHRLEESFLVEEDKKHERHPIFGNIVDEVAYHEKYPTIYHLRKKLVDSTDKADLRLIYLALAHMIKFRGHFLIEGDLNPDNSDVDKLFIQLVQTYNQLFEENPINASGVDAKAILSARLSKSRRLENLIAQLPGEKKNGLFGNLIALSLGLTPNFKSNFDLAEDAKLQLSKDTYDDDLDNLLAQIGDQYADLFLAAKNLSDAILLSDILRVNTEITKAPLSASMIKRYDEHHQDLTLLKALVRQQLPEKYKEIFFDQSKNGYAGYIDGGASQEEFYKFIKPILEKMDGTEELLVKLNREDLLRKQRTFDNGSIPHQIHLGELHAILRRQEDFYPFLKDNREKIEKILTFRIPYYVGPLARGNSRFAWMTRKSEETITPWNFEEVVDKGASAQSFIERMTNFDKNLPNEKVLPKHSLLYEYFTVYNELTKVKYVTEGMRKPAFLSGEQKKAIVDLLFKTNRKVTVKQLKEDYFKKIECFDSVEISGVEDRFNASLGTYHDLLKIIKDKDFLDNEENEDILEDIVLTLTLFEDREMIEERLKTYAHLFDDKVMKQLKRRRYTGWGRLSRKLINGIRDKQSGKTILDFLKSDGFANRNFMQLIHDDSLTFKEDIQKAQVSGQGDSLHEHIANLAGSPAIKKGILQTVKVVDELVKVMGRHKPENIVIEMARENQTTQKGQKNSRERMKRIEEGIKELGSQILKEHPVENTQLQNEKLYLYYLQNGRDMYVDQELDINRLSDYDVDHIVPQSFLKDDSIDNKVLTRSDKARGKSDNVPSEEVVKKMKNYWRQLLNAKLITQRKFDNLTKAERGGLSELDKAGFIKRQLVETRQITKHVAQILDSRMNTKYDENDKLIREVKVITLKSKLVSDFRKDFQFYKVREINNYHHAHDAYLNAVVGTALIKKYPKLESEFVYGDYKVYDVRKMIAKSEQEIGKATAKYFFYSNIMNFFKTEITLANGEIRKRPLIETNGETGEIVWDKGRDFATVRKVLSMPQVNIVKKTEVQTGGFSKESILPKRNSDKLIARKKDWDPKKYGGFDSPTVAYSVLVVAKVEKGKSKKLKSVKELLGITIMERSSFEKNPIDFLEAKGYKEVKKDLIIKLPKYSLFELENGRKRMLASAGELQKGNELALPSKYVNFLYLASHYEKLKGSPEDNEQKQLFVEQHKHYLDEIIEQISEFSKRVILADANLDKVLSAYNKHRDKPIREQAENIIHLFTLTNLGAPAAFKYFDTTIDRKRYTSTKEVLDATLIHQSITGLYETRIDLSQLGGDGGSGGSSGGSSGSETPGTSESATPESSGGSSGGSSGGVQEISDSRPMLHIYLNGRRFLGLLDTGADKTCIAGRDWPANWPIHQTESSLQGLGMACGVARSSQPLRWQHEDKSGIIHPFVIPTLPFTLWGRDIMKDIKVRLMTDSPDDSQDLMIGAIESNLFADQISWKSDQPVWLNQWPLKQEKLQALQQLVTEQLQLGHLEESNSPWNTPVFVIKKKSGKWRLLQDLRAVNATMHDMGALQPGLPSPVAVPKGWEIIIIDLQDCFFNIKLHPEDCKRFAFSVPSPNFKRPYQRFQWKVLPQGMKNSPTLCQKFVDKAILTVRDKYQDSYIVHYMDDILLAHPSRSIVDEILTSMIQALNKHGLVVSTEKIQKYDNLKYLGTHIQGDSVSYQKLQIRTDKLRTLNDFQKLLGNINWIRPFLKLTTGELKPLFEILNGDSNPISTRKLTPEACKALQLMNERLSTARVKRLDLSQPWSLCILKTEYTPTACLWQDGVVEWIHLPHISPKVITPYDIFCTQLIIKGRHRSKELFSKDPDYIVVPYTKVQFDLLLQEKEDWPISLLGFLGEVHFHLPKDPLLTFTLQTAIIFPHMTSTTPLEKGIVIFTDGSANGRSVTYIQGREPIIKENTQNTAQQAEIVAVITAFEEVSQPFNLYTDSKYVTGLFPEIETATLSPRTKIYTELKHLQRLIHKRQEKFYIGHIRGHTGLPGPLAQGNAYADSLTRILTAAGKRTADGSEFEKRTADGSEFESPKKKAKVE

SEQ ID NO: 3144 - protein, 2116 aa, synthetic construct
MPAAKRVKLDGGDKKYSIGLDIGTNSVGWAVITDEYKVPSKKFKVLGNTDRHSIKKNLIGALLFDSGETAEATRLKRTARRRYTRRKNRICYLQEIFSNEMAKVDDSFFHRLEESFLVEEDKKHERHPIFGNIVDEVAYHEKYPTIYHLRKKLVDSTDKADLRLIYLALAHMIKFRGHFLIEGDLNPDNSDVDKLFIQLVQTYNQLFEENPINASGVDAKAILSARLSKSRRLENLIAQLPGEKKNGLFGNLIALSLGLTPNFKSNFDLAEDAKLQLSKDTYDDDLDNLLAQIGDQYADLFLAAKNLSDAILLSDILRVNTEITKAPLSASMIKRYDEHHQDLTLLKALVRQQLPEKYKEIFFDQSKNGYAGYIDGGASQEEFYKFIKPILEKMDGTEELLVKLNREDLLRKQRTFDNGSIPHQIHLGELHAILRRQEDFYPFLKDNREKIEKILTFRIPYYVGPLARGNSRFAWMTRKSEETITPWNFEEVVDKGASAQSFIERMTNFDKNLPNEKVLPKHSLLYEYFTVYNELTKVKYVTEGMRKPAFLSGEQKKAIVDLLFKTNRKVTVKQLKEDYFKKIECFDSVEISGVEDRFNASLGTYHDLLKIIKDKDFLDNEENEDILEDIVLTLTLFEDREMIEERLKTYAHLFDDKVMKQLKRRRYTGWGRLSRKLINGIRDKQSGKTILDFLKSDGFANRNFMQLIHDDSLTFKEDIQKAQVSGQGDSLHEHIANLAGSPAIKKGILQTVKVVDELVKVMGRHKPENIVIEMARENQTTQKGQKNSRERMKRIEEGIKELGSQILKEHPVENTQLQNEKLYLYYLQNGRDMYVDQELDINRLSDYDVDHIVPQSFLKDDSIDNKVLTRSDKARGKSDNVPSEEVVKKMKNYWRQLLNAKLITQRKFDNLTKAERGGLSELDKAGFIKRQLVETRQITKHVAQILDSRMNTKYDENDKLIREVKVITLKSKLVSDFRKDFQFYKVREINNYHHAHDAYLNAVVGTALIKKYPKLESEFVYGDYKVYDVRKMIAKSEQEIGKATAKYFFYSNIMNFFKTEITLANGEIRKRPLIETNGETGEIVWDKGRDFATVRKVLSMPQVNIVKKTEVQTGGFSKESILPKRNSDKLIARKKDWDPKKYGGFDSPTVAYSVLVVAKVEKGKSKKLKSVKELLGITIMERSSFEKNPIDFLEAKGYKEVKKDLIIKLPKYSLFELENGRKRMLASAGELQKGNELALPSKYVNFLYLASHYEKLKGSPEDNEQKQLFVEQHKHYLDEIIEQISEFSKRVILADANLDKVLSAYNKHRDKPIREQAENIIHLFTLTNLGAPAAFKYFDTTIDRKRYTSTKEVLDATLIHQSITGLYETRIDLSQLGGDGGGGGEAAAKGGSGGVQEISDSRPMLHIYLNGRRFLGLLDTGADKTCIAGRDWPANWPIHQTESSLQGLGMACGVARSSQPLRWQHEDKSGIIHPFVIPTLPFTLWGRDIMKDIKVRLMTDSPDDSQDLMIGAIESNLFADQISWKSDQPVWLNQWPLKQEKLQALQQLVTEQLQLGHLEESNSPWNTPVFVIKKKSGKWRLLQDLRAVNATMHDMGALQPGLPSPVAVPKGWEIIIIDLQDCFFNIKLHPEDCKRFAFSVPSPNFKRPYQRFQWKVLPQGMKNSPTLCQKFVDKAILTVRDKYQDSYIVHYMDDILLAHPSRSIVDEILTSMIQALNKHGLVVSTEKIQKYDNLKYLGTHIQGDSVSYQKLQIRTDKLRTLNDFQKLLGNINWIRPFLKLTTGELKPLFEILNGDSNPISTRKLTPEACKALQLMNERLSTARVKRLDLSQPWSLCILKTEYTPTACLWQDGVVEWIHLPHISPKVITPYDIFCTQLIIKGRHRSKELFSKDPDYIVVPYTKVQFDLLLQEKEDWPISLLGFLGEVHFHLPKDPLLTFTLQTAIIFPHMTSTTPLEKGIVIFTDGSANGRSVTYIQGREPIIKENTQNTAQQAEIVAVITAFEEVSQPFNLYTDSKYVTGLFPEIETATLSPRTKIYTELKHLQRLIHKRQEKFYIGHIRGHTGLPGPLAQGNAYADSLTRILTAAGKRTADGSEFEKRTADGSEFESPKKKAKVE

SEQ ID NO: 3145 - protein, 2113 aa, synthetic construct
MPAAKRVKLDGGDKKYSIGLDIGTNSVGWAVITDEYKVPSKKFKVLGNTDRHSIKKNLIGALLFDSGETAEATRLKRTARRRYTRRKNRICYLQEIFSNEMAKVDDSFFHRLEESFLVEEDKKHERHPIFGNIVDEVAYHEKYPTIYHLRKKLVDSTDKADLRLIYLALAHMIKFRGHFLIEGDLNPDNSDVDKLFIQLVQTYNQLFEENPINASGVDAKAILSARLSKSRRLENLIAQLPGEKKNGLFGNLIALSLGLTPNFKSNFDLAEDAKLQLSKDTYDDDLDNLLAQIGDQYADLFLAAKNLSDAILLSDILRVNTEITKAPLSASMIKRYDEHHQDLTLLKALVRQQLPEKYKEIFFDQSKNGYAGYIDGGASQEEFYKFIKPILEKMDGTEELLVKLNREDLLRKQRTFDNGSIPHQIHLGELHAILRRQEDFYPFLKDNREKIEKILTFRIPYYVGPLARGNSRFAWMTRKSEETITPWNFEEVVDKGASAQSFIERMTNFDKNLPNEKVLPKHSLLYEYFTVYNELTKVKYVTEGMRKPAFLSGEQKKAIVDLLFKTNRKVTVKQLKEDYFKKIECFDSVEISGVEDRFNASLGTYHDLLKIIKDKDFLDNEENEDILEDIVLTLTLFEDREMIEERLKTYAHLFDDKVMKQLKRRRYTGWGRLSRKLINGIRDKQSGKTILDFLKSDGFANRNFMQLIHDDSLTFKEDIQKAQVSGQGDSLHEHIANLAGSPAIKKGILQTVKVVDELVKVMGRHKPENIVIEMARENQTTQKGQKNSRERMKRIEEGIKELGSQILKEHPVENTQLQNEKLYLYYLQNGRDMYVDQELDINRLSDYDVDHIVPQSFLKDDSIDNKVLTRSDKARGKSDNVPSEEVVKKMKNYWRQLLNAKLITQRKFDNLTKAERGGLSELDKAGFIKRQLVETRQITKHVAQILDSRMNTKYDENDKLIREVKVITLKSKLVSDFRKDFQFYKVREINNYHHAHDAYLNAVVGTALIKKYPKLESEFVYGDYKVYDVRKMIAKSEQEIGKATAKYFFYSNIMNFFKTEITLANGEIRKRPLIETNGETGEIVWDKGRDFATVRKVLSMPQVNIVKKTEVQTGGFSKESILPKRNSDKLIARKKDWDPKKYGGFDSPTVAYSVLVVAKVEKGKSKKLKSVKELLGITIMERSSFEKNPIDFLEAKGYKEVKKDLIIKLPKYSLFELENGRKRMLASAGELQKGNELALPSKYVNFLYLASHYEKLKGSPEDNEQKQLFVEQHKHYLDEIIEQISEFSKRVILADANLDKVLSAYNKHRDKPIREQAENIIHLFTLTNLGAPAAFKYFDTTIDRKRYTSTKEVLDATLIHQSITGLYETRIDLSQLGGDGGPAPEAAAKGGVQEISDSRPMLHIYLNGRRFLGLLDTGADKTCIAGRDWPANWPIHQTESSLQGLGMACGVARSSQPLRWQHEDKSGIIHPFVIPTLPFTLWGRDIMKDIKVRLMTDSPDDSQDLMIGAIESNLFADQISWKSDQPVWLNQWPLKQEKLQALQQLVTEQLQLGHLEESNSPWNTPVFVIKKKSGKWRLLQDLRAVNATMHDMGALQPGLPSPVAVPKGWEIIIIDLQDCFFNIKLHPEDCKRFAFSVPSPNFKRPYQRFQWKVLPQGMKNSPTLCQKFVDKAILTVRDKYQDSYIVHYMDDILLAHPSRSIVDEILTSMIQALNKHGLVVSTEKIQKYDNLKYLGTHIQGDSVSYQKLQIRTDKLRTLNDFQKLLGNINWIRPFLKLTTGELKPLFEILNGDSNPISTRKLTPEACKALQLMNERLSTARVKRLDLSQPWSLCILKTEYTPTACLWQDGVVEWIHLPHISPKVITPYDIFCTQLIIKGRHRSKELFSKDPDYIVVPYTKVQFDLLLQEKEDWPISLLGFLGEVHFHLPKDPLLTFTLQTAIIFPHMTSTTPLEKGIVIFTDGSANGRSVTYIQGREPIIKENTQNTAQQAEIVAVITAFEEVSQPFNLYTDSKYVTGLFPEIETATLSPRTKIYTELKHLQRLIHKRQEKFYIGHIRGHTGLPGPLAQGNAYADSLTRILTAAGKRTADGSEFEKRTADGSEFESPKKKAKVE

SEQ ID NO: 3146 - protein, 2116 aa, synthetic construct
MPAAKRVKLDGGDKKYSIGLDIGTNSVGWAVITDEYKVPSKKFKVLGNTDRHSIKKNLIGALLFDSGETAEATRLKRTARRRYTRRKNRICYLQEIFSNEMAKVDDSFFHRLEESFLVEEDKKHERHPIFGNIVDEVAYHEKYPTIYHLRKKLVDSTDKADLRLIYLALAHMIKFRGHFLIEGDLNPDNSDVDKLFIQLVQTYNQLFEENPINASGVDAKAILSARLSKSRRLENLIAQLPGEKKNGLFGNLIALSLGLTPNFKSNFDLAEDAKLQLSKDTYDDDLDNLLAQIGDQYADLFLAAKNLSDAILLSDILRVNTEITKAPLSASMIKRYDEHHQDLTLLKALVRQQLPEKYKEIFFDQSKNGYAGYIDGGASQEEFYKFIKPILEKMDGTEELLVKLNREDLLRKQRTFDNGSIPHQIHLGELHAILRRQEDFYPFLKDNREKIEKILTFRIPYYVGPLARGNSRFAWMTRKSEETITPWNFEEVVDKGASAQSFIERMTNFDKNLPNEKVLPKHSLLYEYFTVYNELTKVKYVTEGMRKPAFLSGEQKKAIVDLLFKTNRKVTVKQLKEDYFKKIECFDSVEISGVEDRFNASLGTYHDLLKIIKDKDFLDNEENEDILEDIVLTLTLFEDREMIEERLKTYAHLFDDKVMKQLKRRRYTGWGRLSRKLINGIRDKQSGKTILDFLKSDGFANRNFMQLIHDDSLTFKEDIQKAQVSGQGDSLHEHIANLAGSPAIKKGILQTVKVVDELVKVMGRHKPENIVIEMARENQTTQKGQKNSRERMKRIEEGIKELGSQILKEHPVENTQLQNEKLYLYYLQNGRDMYVDQELDINRLSDYDVDHIVPQSFLKDDSIDNKVLTRSDKARGKSDNVPSEEVVKKMKNYWRQLLNAKLITQRKFDNLTKAERGGLSELDKAGFIKRQLVETRQITKHVAQILDSRMNTKYDENDKLIREVKVITLKSKLVSDFRKDFQFYKVREINNYHHAHDAYLNAVVGTALIKKYPKLESEFVYGDYKVYDVRKMIAKSEQEIGKATAKYFFYSNIMNFFKTEITLANGEIRKRPLIETNGETGEIVWDKGRDFATVRKVLSMPQVNIVKKTEVQTGGFSKESILPKRNSDKLIARKKDWDPKKYGGFDSPTVAYSVLVVAKVEKGKSKKLKSVKELLGITIMERSSFEKNPIDFLEAKGYKEVKKDLIIKLPKYSLFELENGRKRMLASAGELQKGNELALPSKYVNFLYLASHYEKLKGSPEDNEQKQLFVEQHKHYLDEIIEQISEFSKRVILADANLDKVLSAYNKHRDKPIREQAENIIHLFTLTNLGAPAAFKYFDTTIDRKRYTSTKEVLDATLIHQSITGLYETRIDLSQLGGDGGPAPGGGEAAAKGGVQEISDSRPMLHIYLNGRRFLGLLDTGADKTCIAGRDWPANWPIHQTESSLQGLGMACGVARSSQPLRWQHEDKSGIIHPFVIPTLPFTLWGRDIMKDIKVRLMTDSPDDSQDLMIGAIESNLFADQISWKSDQPVWLNQWPLKQEKLQALQQLVTEQLQLGHLEESNSPWNTPVFVIKKKSGKWRLLQDLRAVNATMHDMGALQPGLPSPVAVPKGWEIIIIDLQDCFFNIKLHPEDCKRFAFSVPSPNFKRPYQRFQWKVLPQGMKNSPTLCQKFVDKAILTVRDKYQDSYIVHYMDDILLAHPSRSIVDEILTSMIQALNKHGLVVSTEKIQKYDNLKYLGTHIQGDSVSYQKLQIRTDKLRTLNDFQKLLGNINWIRPFLKLTTGELKPLFEILNGDSNPISTRKLTPEACKALQLMNERLSTARVKRLDLSQPWSLCILKTEYTPTACLWQDGVVEWIHLPHISPKVITPYDIFCTQLIIKGRHRSKELFSKDPDYIVVPYTKVQFDLLLQEKEDWPISLLGFLGEVHFHLPKDPLLTFTLQTAIIFPHMTSTTPLEKGIVIFTDGSANGRSVTYIQGREPIIKENTQNTAQQAEIVAVITAFEEVSQPFNLYTDSKYVTGLFPEIETATLSPRTKIYTELKHLQRLIHKRQEKFYIGHIRGHTGLPGPLAQGNAYADSLTRILTAAGKRTADGSEFEKRTADGSEFESPKKKAKVE

SEQ ID NO: 3147 - protein, 2116 aa, synthetic construct
MPAAKRVKLDGGDKKYSIGLDIGTNSVGWAVITDEYKVPSKKFKVLGNTDRHSIKKNLIGALLFDSGETAEATRLKRTARRRYTRRKNRICYLQEIFSNEMAKVDDSFFHRLEESFLVEEDKKHERHPIFGNIVDEVAYHEKYPTIYHLRKKLVDSTDKADLRLIYLALAHMIKFRGHFLIEGDLNPDNSDVDKLFIQLVQTYNQLFEENPINASGVDAKAILSARLSKSRRLENLIAQLPGEKKNGLFGNLIALSLGLTPNFKSNFDLAEDAKLQLSKDTYDDDLDNLLAQIGDQYADLFLAAKNLSDAILLSDILRVNTEITKAPLSASMIKRYDEHHQDLTLLKALVRQQLPEKYKEIFFDQSKNGYAGYIDGGASQEEFYKFIKPILEKMDGTEELLVKLNREDLLRKQRTFDNGSIPHQIHLGELHAILRRQEDFYPFLKDNREKIEKILTFRIPYYVGPLARGNSRFAWMTRKSEETITPWNFEEVVDKGASAQSFIERMTNFDKNLPNEKVLPKHSLLYEYFTVYNELTKVKYVTEGMRKPAFLSGEQKKAIVDLLFKTNRKVTVKQLKEDYFKKIECFDSVEISGVEDRFNASLGTYHDLLKIIKDKDFLDNEENEDILEDIVLTLTLFEDREMIEERLKTYAHLFDDKVMKQLKRRRYTGWGRLSRKLINGIRDKQSGKTILDFLKSDGFANRNFMQLIHDDSLTFKEDIQKAQVSGQGDSLHEHIANLAGSPAIKKGILQTVKVVDELVKVMGRHKPENIVIEMARENQTTQKGQKNSRERMKRIEEGIKELGSQILKEHPVENTQLQNEKLYLYYLQNGRDMYVDQELDINRLSDYDVDHIVPQSFLKDDSIDNKVLTRSDKARGKSDNVPSEEVVKKMKNYWRQLLNAKLITQRKFDNLTKAERGGLSELDKAGFIKRQLVETRQITKHVAQILDSRMNTKYDENDKLIREVKVITLKSKLVSDFRKDFQFYKVREINNYHHAHDAYLNAVVGTALIKKYPKLESEFVYGDYKVYDVRKMIAKSEQEIGKATAKYFFYSNIMNFFKTEITLANGEIRKRPLIETNGETGEIVWDKGRDFATVRKVLSMPQVNIVKKTEVQTGGFSKESILPKRNSDKLIARKKDWDPKKYGGFDSPTVAYSVLVVAKVEKGKSKKLKSVKELLGITIMERSSFEKNPIDFLEAKGYKEVKKDLIIKLPKYSLFELENGRKRMLASAGELQKGNELALPSKYVNFLYLASHYEKLKGSPEDNEQKQLFVEQHKHYLDEIIEQISEFSKRVILADANLDKVLSAYNKHRDKPIREQAENIIHLFTLTNLGAPAAFKYFDTTIDRKRYTSTKEVLDATLIHQSITGLYETRIDLSQLGGDGGGSSEAAAKGGGGGVQEISDSRPMLHIYLNGRRFLGLLDTGADKTCIAGRDWPANWPIHQTESSLQGLGMACGVARSSQPLRWQHEDKSGIIHPFVIPTLPFTLWGRDIMKDIKVRLMTDSPDDSQDLMIGAIESNLFADQISWKSDQPVWLNQWPLKQEKLQALQQLVTEQLQLGHLEESNSPWNTPVFVIKKKSGKWRLLQDLRAVNATMHDMGALQPGLPSPVAVPKGWEIIIIDLQDCFFNIKLHPEDCKRFAFSVPSPNFKRPYQRFQWKVLPQGMKNSPTLCQKFVDKAILTVRDKYQDSYIVHYMDDILLAHPSRSIVDEILTSMIQALNKHGLVVSTEKIQKYDNLKYLGTHIQGDSVSYQKLQIRTDKLRTLNDFQKLLGNINWIRPFLKLTTGELKPLFEILNGDSNPISTRKLTPEACKALQLMNERLSTARVKRLDLSQPWSLCILKTEYTPTACLWQDGVVEWIHLPHISPKVITPYDIFCTQLIIKGRHRSKELFSKDPDYIVVPYTKVQFDLLLQEKEDWPISLLGFLGEVHFHLPKDPLLTFTLQTAIIFPHMTSTTPLEKGIVIFTDGSANGRSVTYIQGREPIIKENTQNTAQQAEIVAVITAFEEVSQPFNLYTDSKYVTGLFPEIETATLSPRTKIYTELKHLQRLIHKRQEKFYIGHIRGHTGLPGPLAQGNAYADSLTRILTAAGKRTADGSEFEKRTADGSEFESPKKKAKVE

SEQ ID NO: 3148 - protein, 2116 aa, synthetic construct
MPAAKRVKLDGGDKKYSIGLDIGTNSVGWAVITDEYKVPSKKFKVLGNTDRHSIKKNLIGALLFDSGETAEATRLKRTARRRYTRRKNRICYLQEIFSNEMAKVDDSFFHRLEESFLVEEDKKHERHPIFGNIVDEVAYHEKYPTIYHLRKKLVDSTDKADLRLIYLALAHMIKFRGHFLIEGDLNPDNSDVDKLFIQLVQTYNQLFEENPINASGVDAKAILSARLSKSRRLENLIAQLPGEKKNGLFGNLIALSLGLTPNFKSNFDLAEDAKLQLSKDTYDDDLDNLLAQIGDQYADLFLAAKNLSDAILLSDILRVNTEITKAPLSASMIKRYDEHHQDLTLLKALVRQQLPEKYKEIFFDQSKNGYAGYIDGGASQEEFYKFIKPILEKMDGTEELLVKLNREDLLRKQRTFDNGSIPHQIHLGELHAILRRQEDFYPFLKDNREKIEKILTFRIPYYVGPLARGNSRFAWMTRKSEETITPWNFEEVVDKGASAQSFIERMTNFDKNLPNEKVLPKHSLLYEYFTVYNELTKVKYVTEGMRKPAFLSGEQKKAIVDLLFKTNRKVTVKQLKEDYFKKIECFDSVEISGVEDRFNASLGTYHDLLKIIKDKDFLDNEENEDILEDIVLTLTLFEDREMIEERLKTYAHLFDDKVMKQLKRRRYTGWGRLSRKLINGIRDKQSGKTILDFLKSDGFANRNFMQLIHDDSLTFKEDIQKAQVSGQGDSLHEHIANLAGSPAIKKGILQTVKVVDELVKVMGRHKPENIVIEMARENQTTQKGQKNSRERMKRIEEGIKELGSQILKEHPVENTQLQNEKLYLYYLQNGRDMYVDQELDINRLSDYDVDHIVPQSFLKDDSIDNKVLTRSDKARGKSDNVPSEEVVKKMKNYWRQLLNAKLITQRKFDNLTKAERGGLSELDKAGFIKRQLVETRQITKHVAQILDSRMNTKYDENDKLIREVKVITLKSKLVSDFRKDFQFYKVREINNYHHAHDAYLNAVVGTALIKKYPKLESEFVYGDYKVYDVRKMIAKSEQEIGKATAKYFFYSNIMNFFKTEITLANGEIRKRPLIETNGETGEIVWDKGRDFATVRKVLSMPQVNIVKKTEVQTGGFSKESILPKRNSDKLIARKKDWDPKKYGGFDSPTVAYSVLVVAKVEKGKSKKLKSVKELLGITIMERSSFEKNPIDFLEAKGYKEVKKDLIIKLPKYSLFELENGRKRMLASAGELQKGNELALPSKYVNFLYLASHYEKLKGSPEDNEQKQLFVEQHKHYLDEIIEQISEFSKRVILADANLDKVLSAYNKHRDKPIREQAENIIHLFTLTNLGAPAAFKYFDTTIDRKRYTSTKEVLDATLIHQSITGLYETRIDLSQLGGDGGEAAAKGGSGSSGGVQEISDSRPMLHIYLNGRRFLGLLDTGADKTCIAGRDWPANWPIHQTESSLQGLGMACGVARSSQPLRWQHEDKSGIIHPFVIPTLPFTLWGRDIMKDIKVRLMTDSPDDSQDLMIGAIESNLFADQISWKSDQPVWLNQWPLKQEKLQALQQLVTEQLQLGHLEESNSPWNTPVFVIKKKSGKWRLLQDLRAVNATMHDMGALQPGLPSPVAVPKGWEIIIIDLQDCFFNIKLHPEDCKRFAFSVPSPNFKRPYQRFQWKVLPQGMKNSPTLCQKFVDKAILTVRDKYQDSYIVHYMDDILLAHPSRSIVDEILTSMIQALNKHGLVVSTEKIQKYDNLKYLGTHIQGDSVSYQKLQIRTDKLRTLNDFQKLLGNINWIRPFLKLTTGELKPLFEILNGDSNPISTRKLTPEACKALQLMNERLSTARVKRLDLSQPWSLCILKTEYTPTACLWQDGVVEWIHLPHISPKVITPYDIFCTQLIIKGRHRSKELFSKDPDYIVVPYTKVQFDLLLQEKEDWPISLLGFLGEVHFHLPKDPLLTFTLQTAIIFPHMTSTTPLEKGIVIFTDGSANGRSVTYIQGREPIIKENTQNTAQQAEIVAVITAFEEVSQPFNLYTDSKYVTGLFPEIETATLSPRTKIYTELKHLQRLIHKRQEKFYIGHIRGHTGLPGPLAQGNAYADSLTRILTAAGKRTADGSEFEKRTADGSEFESPKKKAKVE

SEQ ID NO: 3149 - protein, 2116 aa, synthetic construct
MPAAKRVKLDGGDKKYSIGLDIGTNSVGWAVITDEYKVPSKKFKVLGNTDRHSIKKNLIGALLFDSGETAEATRLKRTARRRYTRRKNRICYLQEIFSNEMAKVDDSFFHRLEESFLVEEDKKHERHPIFGNIVDEVAYHEKYPTIYHLRKKLVDSTDKADLRLIYLALAHMIKFRGHFLIEGDLNPDNSDVDKLFIQLVQTYNQLFEENPINASGVDAKAILSARLSKSRRLENLIAQLPGEKKNGLFGNLIALSLGLTPNFKSNFDLAEDAKLQLSKDTYDDDLDNLLAQIGDQYADLFLAAKNLSDAILLSDILRVNTEITKAPLSASMIKRYDEHHQDLTLLKALVRQQLPEKYKEIFFDQSKNGYAGYIDGGASQEEFYKFIKPILEKMDGTEELLVKLNREDLLRKQRTFDNGSIPHQIHLGELHAILRRQEDFYPFLKDNREKIEKILTFRIPYYVGPLARGNSRFAWMTRKSEETITPWNFEEVVDKGASAQSFIERMTNFDKNLPNEKVLPKHSLLYEYFTVYNELTKVKYVTEGMRKPAFLSGEQKKAIVDLLFKTNRKVTVKQLKEDYFKKIECFDSVEISGVEDRFNASLGTYHDLLKIIKDKDFLDNEENEDILEDIVLTLTLFEDREMIEERLKTYAHLFDDKVMKQLKRRRYTGWGRLSRKLINGIRDKQSGKTILDFLKSDGFANRNFMQLIHDDSLTFKEDIQKAQVSGQGDSLHEHIANLAGSPAIKKGILQTVKVVDELVKVMGRHKPENIVIEMARENQTTQKGQKNSRERMKRIEEGIKELGSQILKEHPVENTQLQNEKLYLYYLQNGRDMYVDQELDINRLSDYDVDHIVPQSFLKDDSIDNKVLTRSDKARGKSDNVPSEEVVKKMKNYWRQLLNAKLITQRKFDNLTKAERGGLSELDKAGFIKRQLVETRQITKHVAQILDSRMNTKYDENDKLIREVKVITLKSKLVSDFRKDFQFYKVREINNYHHAHDAYLNAVVGTALIKKYPKLESEFVYGDYKVYDVRKMIAKSEQEIGKATAKYFFYSNIMNFFKTEITLANGEIRKRPLIETNGETGEIVWDKGRDFATVRKVLSMPQVNIVKKTEVQTGGFSKESILPKRNSDKLIARKKDWDPKKYGGFDSPTVAYSVLVVAKVEKGKSKKLKSVKELLGITIMERSSFEKNPIDFLEAKGYKEVKKDLIIKLPKYSLFELENGRKRMLASAGELQKGNELALPSKYVNFLYLASHYEKLKGSPEDNEQKQLFVEQHKHYLDEIIEQISEFSKRVILADANLDKVLSAYNKHRDKPIREQAENIIHLFTLTNLGAPAAFKYFDTTIDRKRYTSTKEVLDATLIHQSITGLYETRIDLSQLGGDGGGSSPAPEAAAKGGVQEISDSRPMLHIYLNGRRFLGLLDTGADKTCIAGRDWPANWPIHQTESSLQGLGMACGVARSSQPLRWQHEDKSGIIHPFVIPTLPFTLWGRDIMKDIKVRLMTDSPDDSQDLMIGAIESNLFADQISWKSDQPVWLNQWPLKQEKLQALQQLVTEQLQLGHLEESNSPWNTPVFVIKKKSGKWRLLQDLRAVNATMHDMGALQPGLPSPVAVPKGWEIIIIDLQDCFFNIKLHPEDCKRFAFSVPSPNFKRPYQRFQWKVLPQGMKNSPTLCQKFVDKAILTVRDKYQDSYIVHYMDDILLAHPSRSIVDEILTSMIQALNKHGLVVSTEKIQKYDNLKYLGTHIQGDSVSYQKLQIRTDKLRTLNDFQKLLGNINWIRPFLKLTTGELKPLFEILNGDSNPISTRKLTPEACKALQLMNERLSTARVKRLDLSQPWSLCILKTEYTPTACLWQDGVVEWIHLPHISPKVITPYDIFCTQLIIKGRHRSKELFSKDPDYIVVPYTKVQFDLLLQEKEDWPISLLGFLGEVHFHLPKDPLLTFTLQTAIIFPHMTSTTPLEKGIVIFTDGSANGRSVTYIQGREPIIKENTQNTAQQAEIVAVITAFEEVSQPFNLYTDSKYVTGLFPEIETATLSPRTKIYTELKHLQRLIHKRQEKFYIGHIRGHTGLPGPLAQGNAYADSLTRILTAAGKRTADGSEFEKRTADGSEFESPKKKAKVE

SEQ ID NO: 3150 - protein, 2114 aa, synthetic construct
MPAAKRVKLDGGDKKYSIGLDIGTNSVGWAVITDEYKVPSKKFKVLGNTDRHSIKKNLIGALLFDSGETAEATRLKRTARRRYTRRKNRICYLQEIFSNEMAKVDDSFFHRLEESFLVEEDKKHERHPIFGNIVDEVAYHEKYPTIYHLRKKLVDSTDKADLRLIYLALAHMIKFRGHFLIEGDLNPDNSDVDKLFIQLVQTYNQLFEENPINASGVDAKAILSARLSKSRRLENLIAQLPGEKKNGLFGNLIALSLGLTPNFKSNFDLAEDAKLQLSKDTYDDDLDNLLAQIGDQYADLFLAAKNLSDAILLSDILRVNTEITKAPLSASMIKRYDEHHQDLTLLKALVRQQLPEKYKEIFFDQSKNGYAGYIDGGASQEEFYKFIKPILEKMDGTEELLVKLNREDLLRKQRTFDNGSIPHQIHLGELHAILRRQEDFYPFLKDNREKIEKILTFRIPYYVGPLARGNSRFAWMTRKSEETITPWNFEEVVDKGASAQSFIERMTNFDKNLPNEKVLPKHSLLYEYFTVYNELTKVKYVTEGMRKPAFLSGEQKKAIVDLLFKTNRKVTVKQLKEDYFKKIECFDSVEISGVEDRFNASLGTYHDLLKIIKDKDFLDNEENEDILEDIVLTLTLFEDREMIEERLKTYAHLFDDKVMKQLKRRRYTGWGRLSRKLINGIRDKQSGKTILDFLKSDGFANRNFMQLIHDDSLTFKEDIQKAQVSGQGDSLHEHIANLAGSPAIKKGILQTVKVVDELVKVMGRHKPENIVIEMARENQTTQKGQKNSRERMKRIEEGIKELGSQILKEHPVENTQLQNEKLYLYYLQNGRDMYVDQELDINRLSDYDVDHIVPQSFLKDDSIDNKVLTRSDKARGKSDNVPSEEVVKKMKNYWRQLLNAKLITQRKFDNLTKAERGGLSELDKAGFIKRQLVETRQITKHVAQILDSRMNTKYDENDKLIREVKVITLKSKLVSDFRKDFQFYKVREINNYHHAHDAYLNAVVGTALIKKYPKLESEFVYGDYKVYDVRKMIAKSEQEIGKATAKYFFYSNIMNFFKTEITLANGEIRKRPLIETNGETGEIVWDKGRDFATVRKVLSMPQVNIVKKTEVQTGGFSKESILPKRNSDKLIARKKDWDPKKYGGFDSPTVAYSVLVVAKVEKGKSKKLKSVKELLGITIMERSSFEKNPIDFLEAKGYKEVKKDLIIKLPKYSLFELENGRKRMLASAGELQKGNELALPSKYVNFLYLASHYEKLKGSPEDNEQKQLFVEQHKHYLDEIIEQISEFSKRVILADANLDKVLSAYNKHRDKPIREQAENIIHLFTLTNLGAPAAFKYFDTTIDRKRYTSTKEVLDATLIHQSITGLYETRIDLSQLGGDGGGGSGSSPAPGGVQEISDSRPMLHIYLNGRRFLGLLDTGADKTCIAGRDWPANWPIHQTESSLQGLGMACGVARSSQPLRWQHEDKSGIIHPFVIPTLPFTLWGRDIMKDIKVRLMTDSPDDSQDLMIGAIESNLFADQISWKSDQPVWLNQWPLKQEKLQALQQLVTEQLQLGHLEESNSPWNTPVFVIKKKSGKWRLLQDLRAVNATMHDMGALQPGLPSPVAVPKGWEIIIIDLQDCFFNIKLHPEDCKRFAFSVPSPNFKRPYQRFQWKVLPQGMKNSPTLCQKFVDKAILTVRDKYQDSYIVHYMDDILLAHPSRSIVDEILTSMIQALNKHGLVVSTEKIQKYDNLKYLGTHIQGDSVSYQKLQIRTDKLRTLNDFQKLLGNINWIRPFLKLTTGELKPLFEILNGDSNPISTRKLTPEACKALQLMNERLSTARVKRLDLSQPWSLCILKTEYTPTACLWQDGVVEWIHLPHISPKVITPYDIFCTQLIIKGRHRSKELFSKDPDYIVVPYTKVQFDLLLQEKEDWPISLLGFLGEVHFHLPKDPLLTFTLQTAIIFPHMTSTTPLEKGIVIFTDGSANGRSVTYIQGREPIIKENTQNTAQQAEIVAVITAFEEVSQPFNLYTDSKYVTGLFPEIETATLSPRTKIYTELKHLQRLIHKRQEKFYIGHIRGHTGLPGPLAQGNAYADSLTRILTAAGKRTADGSEFEKRTADGSEFESPKKKAKVE

SEQ ID NO: 3151 - protein, 2120 aa, synthetic construct
MPAAKRVKLDGGDKKYSIGLDIGTNSVGWAVITDEYKVPSKKFKVLGNTDRHSIKKNLIGALLFDSGETAEATRLKRTARRRYTRRKNRICYLQEIFSNEMAKVDDSFFHRLEESFLVEEDKKHERHPIFGNIVDEVAYHEKYPTIYHLRKKLVDSTDKADLRLIYLALAHMIKFRGHFLIEGDLNPDNSDVDKLFIQLVQTYNQLFEENPINASGVDAKAILSARLSKSRRLENLIAQLPGEKKNGLFGNLIALSLGLTPNFKSNFDLAEDAKLQLSKDTYDDDLDNLLAQIGDQYADLFLAAKNLSDAILLSDILRVNTEITKAPLSASMIKRYDEHHQDLTLLKALVRQQLPEKYKEIFFDQSKNGYAGYIDGGASQEEFYKFIKPILEKMDGTEELLVKLNREDLLRKQRTFDNGSIPHQIHLGELHAILRRQEDFYPFLKDNREKIEKILTFRIPYYVGPLARGNSRFAWMTRKSEETITPWNFEEVVDKGASAQSFIERMTNFDKNLPNEKVLPKHSLLYEYFTVYNELTKVKYVTEGMRKPAFLSGEQKKAIVDLLFKTNRKVTVKQLKEDYFKKIECFDSVEISGVEDRFNASLGTYHDLLKIIKDKDFLDNEENEDILEDIVLTLTLFEDREMIEERLKTYAHLFDDKVMKQLKRRRYTGWGRLSRKLINGIRDKQSGKTILDFLKSDGFANRNFMQLIHDDSLTFKEDIQKAQVSGQGDSLHEHIANLAGSPAIKKGILQTVKVVDELVKVMGRHKPENIVIEMARENQTTQKGQKNSRERMKRIEEGIKELGSQILKEHPVENTQLQNEKLYLYYLQNGRDMYVDQELDINRLSDYDVDHIVPQSFLKDDSIDNKVLTRSDKARGKSDNVPSEEVVKKMKNYWRQLLNAKLITQRKFDNLTKAERGGLSELDKAGFIKRQLVETRQITKHVAQILDSRMNTKYDENDKLIREVKVITLKSKLVSDFRKDFQFYKVREINNYHHAHDAYLNAVVGTALIKKYPKLESEFVYGDYKVYDVRKMIAKSEQEIGKATAKYFFYSNIMNFFKTEITLANGEIRKRPLIETNGETGEIVWDKGRDFATVRKVLSMPQVNIVKKTEVQTGGFSKESILPKRNSDKLIARKKDWDPKKYGGFDSPTVAYSVLVVAKVEKGKSKKLKSVKELLGITIMERSSFEKNPIDFLEAKGYKEVKKDLIIKLPKYSLFELENGRKRMLASAGELQKGNELALPSKYVNFLYLASHYEKLKGSPEDNEQKQLFVEQHKHYLDEIIEQISEFSKRVILADANLDKVLSAYNKHRDKPIREQAENIIHLFTLTNLGAPAAFKYFDTTIDRKRYTSTKEVLDATLIHQSITGLYETRIDLSQLGGDGGEAAAKGGGGSEAAAKGGVQEISDSRPMLHIYLNGRRFLGLLDTGADKTCIAGRDWPANWPIHQTESSLQGLGMACGVARSSQPLRWQHEDKSGIIHPFVIPTLPFTLWGRDIMKDIKVRLMTDSPDDSQDLMIGAIESNLFADQISWKSDQPVWLNQWPLKQEKLQALQQLVTEQLQLGHLEESNSPWNTPVFVIKKKSGKWRLLQDLRAVNATMHDMGALQPGLPSPVAVPKGWEIIIIDLQDCFFNIKLHPEDCKRFAFSVPSPNFKRPYQRFQWKVLPQGMKNSPTLCQKFVDKAILTVRDKYQDSYIVHYMDDILLAHPSRSIVDEILTSMIQALNKHGLVVSTEKIQKYDNLKYLGTHIQGDSVSYQKLQIRTDKLRTLNDFQKLLGNINWIRPFLKLTTGELKPLFEILNGDSNPISTRKLTPEACKALQLMNERLSTARVKRLDLSQPWSLCILKTEYTPTACLWQDGVVEWIHLPHISPKVITPYDIFCTQLIIKGRHRSKELFSKDPDYIVVPYTKVQFDLLLQEKEDWPISLLGFLGEVHFHLPKDPLLTFTLQTAIIFPHMTSTTPLEKGIVIFTDGSANGRSVTYIQGREPIIKENTQNTAQQAEIVAVITAFEEVSQPFNLYTDSKYVTGLFPEIETATLSPRTKIYTELKHLQRLIHKRQEKFYIGHIRGHTGLPGPLAQGNAYADSLTRILTAAGKRTADGSEFEKRTADGSEFESPKKKAKVE

SEQ ID NO: 3152 - protein, 2116 aa, synthetic construct
MPAAKRVKLDGGDKKYSIGLDIGTNSVGWAVITDEYKVPSKKFKVLGNTDRHSIKKNLIGALLFDSGETAEATRLKRTARRRYTRRKNRICYLQEIFSNEMAKVDDSFFHRLEESFLVEEDKKHERHPIFGNIVDEVAYHEKYPTIYHLRKKLVDSTDKADLRLIYLALAHMIKFRGHFLIEGDLNPDNSDVDKLFIQLVQTYNQLFEENPINASGVDAKAILSARLSKSRRLENLIAQLPGEKKNGLFGNLIALSLGLTPNFKSNFDLAEDAKLQLSKDTYDDDLDNLLAQIGDQYADLFLAAKNLSDAILLSDILRVNTEITKAPLSASMIKRYDEHHQDLTLLKALVRQQLPEKYKEIFFDQSKNGYAGYIDGGASQEEFYKFIKPILEKMDGTEELLVKLNREDLLRKQRTFDNGSIPHQIHLGELHAILRRQEDFYPFLKDNREKIEKILTFRIPYYVGPLARGNSRFAWMTRKSEETITPWNFEEVVDKGASAQSFIERMTNFDKNLPNEKVLPKHSLLYEYFTVYNELTKVKYVTEGMRKPAFLSGEQKKAIVDLLFKTNRKVTVKQLKEDYFKKIECFDSVEISGVEDRFNASLGTYHDLLKIIKDKDFLDNEENEDILEDIVLTLTLFEDREMIEERLKTYAHLFDDKVMKQLKRRRYTGWGRLSRKLINGIRDKQSGKTILDFLKSDGFANRNFMQLIHDDSLTFKEDIQKAQVSGQGDSLHEHIANLAGSPAIKKGILQTVKVVDELVKVMGRHKPENIVIEMARENQTTQKGQKNSRERMKRIEEGIKELGSQILKEHPVENTQLQNEKLYLYYLQNGRDMYVDQELDINRLSDYDVDHIVPQSFLKDDSIDNKVLTRSDKARGKSDNVPSEEVVKKMKNYWRQLLNAKLITQRKFDNLTKAERGGLSELDKAGFIKRQLVETRQITKHVAQILDSRMNTKYDENDKLIREVKVITLKSKLVSDFRKDFQFYKVREINNYHHAHDAYLNAVVGTALIKKYPKLESEFVYGDYKVYDVRKMIAKSEQEIGKATAKYFFYSNIMNFFKTEITLANGEIRKRPLIETNGETGEIVWDKGRDFATVRKVLSMPQVNIVKKTEVQTGGFSKESILPKRNSDKLIARKKDWDPKKYGGFDSPTVAYSVLVVAKVEKGKSKKLKSVKELLGITIMERSSFEKNPIDFLEAKGYKEVKKDLIIKLPKYSLFELENGRKRMLASAGELQKGNELALPSKYVNFLYLASHYEKLKGSPEDNEQKQLFVEQHKHYLDEIIEQISEFSKRVILADANLDKVLSAYNKHRDKPIREQAENIIHLFTLTNLGAPAAFKYFDTTIDRKRYTSTKEVLDATLIHQSITGLYETRIDLSQLGGDGGPAPEAAAKGSSGGVQEISDSRPMLHIYLNGRRFLGLLDTGADKTCIAGRDWPANWPIHQTESSLQGLGMACGVARSSQPLRWQHEDKSGIIHPFVIPTLPFTLWGRDIMKDIKVRLMTDSPDDSQDLMIGAIESNLFADQISWKSDQPVWLNQWPLKQEKLQALQQLVTEQLQLGHLEESNSPWNTPVFVIKKKSGKWRLLQDLRAVNATMHDMGALQPGLPSPVAVPKGWEIIIIDLQDCFFNIKLHPEDCKRFAFSVPSPNFKRPYQRFQWKVLPQGMKNSPTLCQKFVDKAILTVRDKYQDSYIVHYMDDILLAHPSRSIVDEILTSMIQALNKHGLVVSTEKIQKYDNLKYLGTHIQGDSVSYQKLQIRTDKLRTLNDFQKLLGNINWIRPFLKLTTGELKPLFEILNGDSNPISTRKLTPEACKALQLMNERLSTARVKRLDLSQPWSLCILKTEYTPTACLWQDGVVEWIHLPHISPKVITPYDIFCTQLIIKGRHRSKELFSKDPDYIVVPYTKVQFDLLLQEKEDWPISLLGFLGEVHFHLPKDPLLTFTLQTAIIFPHMTSTTPLEKGIVIFTDGSANGRSVTYIQGREPIIKENTQNTAQQAEIVAVITAFEEVSQPFNLYTDSKYVTGLFPEIETATLSPRTKIYTELKHLQRLIHKRQEKFYIGHIRGHTGLPGPLAQGNAYADSLTRILTAAGKRTADGSEFEKRTADGSEFESPKKKAKVE

SEQ ID NO: 3153 - protein, 2121 aa, synthetic construct
MPAAKRVKLDGGDKKYSIGLDIGTNSVGWAVITDEYKVPSKKFKVLGNTDRHSIKKNLIGALLFDSGETAEATRLKRTARRRYTRRKNRICYLQEIFSNEMAKVDDSFFHRLEESFLVEEDKKHERHPIFGNIVDEVAYHEKYPTIYHLRKKLVDSTDKADLRLIYLALAHMIKFRGHFLIEGDLNPDNSDVDKLFIQLVQTYNQLFEENPINASGVDAKAILSARLSKSRRLENLIAQLPGEKKNGLFGNLIALSLGLTPNFKSNFDLAEDAKLQLSKDTYDDDLDNLLAQIGDQYADLFLAAKNLSDAILLSDILRVNTEITKAPLSASMIKRYDEHHQDLTLLKALVRQQLPEKYKEIFFDQSKNGYAGYIDGGASQEEFYKFIKPILEKMDGTEELLVKLNREDLLRKQRTFDNGSIPHQIHLGELHAILRRQEDFYPFLKDNREKIEKILTFRIPYYVGPLARGNSRFAWMTRKSEETITPWNFEEVVDKGASAQSFIERMTNFDKNLPNEKVLPKHSLLYEYFTVYNELTKVKYVTEGMRKPAFLSGEQKKAIVDLLFKTNRKVTVKQLKEDYFKKIECFDSVEISGVEDRFNASLGTYHDLLKIIKDKDFLDNEENEDILEDIVLTLTLFEDREMIEERLKTYAHLFDDKVMKQLKRRRYTGWGRLSRKLINGIRDKQSGKTILDFLKSDGFANRNFMQLIHDDSLTFKEDIQKAQVSGQGDSLHEHIANLAGSPAIKKGILQTVKVVDELVKVMGRHKPENIVIEMARENQTTQKGQKNSRERMKRIEEGIKELGSQILKEHPVENTQLQNEKLYLYYLQNGRDMYVDQELDINRLSDYDVDHIVPQSFLKDDSIDNKVLTRSDKARGKSDNVPSEEVVKKMKNYWRQLLNAKLITQRKFDNLTKAERGGLSELDKAGFIKRQLVETRQITKHVAQILDSRMNTKYDENDKLIREVKVITLKSKLVSDFRKDFQFYKVREINNYHHAHDAYLNAVVGTALIKKYPKLESEFVYGDYKVYDVRKMIAKSEQEIGKATAKYFFYSNIMNFFKTEITLANGEIRKRPLIETNGETGEIVWDKGRDFATVRKVLSMPQVNIVKKTEVQTGGFSKESILPKRNSDKLIARKKDWDPKKYGGFDSPTVAYSVLVVAKVEKGKSKKLKSVKELLGITIMERSSFEKNPIDFLEAKGYKEVKKDLIIKLPKYSLFELENGRKRMLASAGELQKGNELALPSKYVNFLYLASHYEKLKGSPEDNEQKQLFVEQHKHYLDEIIEQISEFSKRVILADANLDKVLSAYNKHRDKPIREQAENIIHLFTLTNLGAPAAFKYFDTTIDRKRYTSTKEVLDATLIHQSITGLYETRIDLSQLGGDGGSGSETPGTSESATPESGGVQEISDSRPMLHIYLNGRRFLGLLDTGADKTCIAGRDWPANWPIHQTESSLQGLGMACGVARSSQPLRWQHEDKSGIIHPFVIPTLPFTLWGRDIMKDIKVRLMTDSPDDSQDLMIGAIESNLFADQISWKSDQPVWLNQWPLKQEKLQALQQLVTEQLQLGHLEESNSPWNTPVFVIKKKSGKWRLLQDLRAVNATMHDMGALQPGLPSPVAVPKGWEIIIIDLQDCFFNIKLHPEDCKRFAFSVPSPNFKRPYQRFQWKVLPQGMKNSPTLCQKFVDKAILTVRDKYQDSYIVHYMDDILLAHPSRSIVDEILTSMIQALNKHGLVVSTEKIQKYDNLKYLGTHIQGDSVSYQKLQIRTDKLRTLNDFQKLLGNINWIRPFLKLTTGELKPLFEILNGDSNPISTRKLTPEACKALQLMNERLSTARVKRLDLSQPWSLCILKTEYTPTACLWQDGVVEWIHLPHISPKVITPYDIFCTQLIIKGRHRSKELFSKDPDYIVVPYTKVQFDLLLQEKEDWPISLLGFLGEVHFHLPKDPLLTFTLQTAIIFPHMTSTTPLEKGIVIFTDGSANGRSVTYIQGREPIIKENTQNTAQQAEIVAVITAFEEVSQPFNLYTDSKYVTGLFPEIETATLSPRTKIYTELKHLQRLIHKRQEKFYIGHIRGHTGLPGPLAQGNAYADSLTRILTAAGKRTADGSEFEKRTADGSEFESPKKKAKVE

SEQ ID NO: 3154 - protein, 2116 aa, synthetic construct
MPAAKRVKLDGGDKKYSIGLDIGTNSVGWAVITDEYKVPSKKFKVLGNTDRHSIKKNLIGALLFDSGETAEATRLKRTARRRYTRRKNRICYLQEIFSNEMAKVDDSFFHRLEESFLVEEDKKHERHPIFGNIVDEVAYHEKYPTIYHLRKKLVDSTDKADLRLIYLALAHMIKFRGHFLIEGDLNPDNSDVDKLFIQLVQTYNQLFEENPINASGVDAKAILSARLSKSRRLENLIAQLPGEKKNGLFGNLIALSLGLTPNFKSNFDLAEDAKLQLSKDTYDDDLDNLLAQIGDQYADLFLAAKNLSDAILLSDILRVNTEITKAPLSASMIKRYDEHHQDLTLLKALVRQQLPEKYKEIFFDQSKNGYAGYIDGGASQEEFYKFIKPILEKMDGTEELLVKLNREDLLRKQRTFDNGSIPHQIHLGELHAILRRQEDFYPFLKDNREKIEKILTFRIPYYVGPLARGNSRFAWMTRKSEETITPWNFEEVVDKGASAQSFIERMTNFDKNLPNEKVLPKHSLLYEYFTVYNELTKVKYVTEGMRKPAFLSGEQKKAIVDLLFKTNRKVTVKQLKEDYFKKIECFDSVEISGVEDRFNASLGTYHDLLKIIKDKDFLDNEENEDILEDIVLTLTLFEDREMIEERLKTYAHLFDDKVMKQLKRRRYTGWGRLSRKLINGIRDKQSGKTILDFLKSDGFANRNFMQLIHDDSLTFKEDIQKAQVSGQGDSLHEHIANLAGSPAIKKGILQTVKVVDELVKVMGRHKPENIVIEMARENQTTQKGQKNSRERMKRIEEGIKELGSQILKEHPVENTQLQNEKLYLYYLQNGRDMYVDQELDINRLSDYDVDHIVPQSFLKDDSIDNKVLTRSDKARGKSDNVPSEEVVKKMKNYWRQLLNAKLITQRKFDNLTKAERGGLSELDKAGFIKRQLVETRQITKHVAQILDSRMNTKYDENDKLIREVKVITLKSKLVSDFRKDFQFYKVREINNYHHAHDAYLNAVVGTALIKKYPKLESEFVYGDYKVYDVRKMIAKSEQEIGKATAKYFFYSNIMNFFKTEITLANGEIRKRPLIETNGETGEIVWDKGRDFATVRKVLSMPQVNIVKKTEVQTGGFSKESILPKRNSDKLIARKKDWDPKKYGGFDSPTVAYSVLVVAKVEKGKSKKLKSVKELLGITIMERSSFEKNPIDFLEAKGYKEVKKDLIIKLPKYSLFELENGRKRMLASAGELQKGNELALPSKYVNFLYLASHYEKLKGSPEDNEQKQLFVEQHKHYLDEIIEQISEFSKRVILADANLDKVLSAYNKHRDKPIREQAENIIHLFTLTNLGAPAAFKYFDTTIDRKRYTSTKEVLDATLIHQSITGLYETRIDLSQLGGDGGGGSEAAAKGGGGGVQEISDSRPMLHIYLNGRRFLGLLDTGADKTCIAGRDWPANWPIHQTESSLQGLGMACGVARSSQPLRWQHEDKSGIIHPFVIPTLPFTLWGRDIMKDIKVRLMTDSPDDSQDLMIGAIESNLFADQISWKSDQPVWLNQWPLKQEKLQALQQLVTEQLQLGHLEESNSPWNTPVFVIKKKSGKWRLLQDLRAVNATMHDMGALQPGLPSPVAVPKGWEIIIIDLQDCFFNIKLHPEDCKRFAFSVPSPNFKRPYQRFQWKVLPQGMKNSPTLCQKFVDKAILTVRDKYQDSYIVHYMDDILLAHPSRSIVDEILTSMIQALNKHGLVVSTEKIQKYDNLKYLGTHIQGDSVSYQKLQIRTDKLRTLNDFQKLLGNINWIRPFLKLTTGELKPLFEILNGDSNPISTRKLTPEACKALQLMNERLSTARVKRLDLSQPWSLCILKTEYTPTACLWQDGVVEWIHLPHISPKVITPYDIFCTQLIIKGRHRSKELFSKDPDYIVVPYTKVQFDLLLQEKEDWPISLLGFLGEVHFHLPKDPLLTFTLQTAIIFPHMTSTTPLEKGIVIFTDGSANGRSVTYIQGREPIIKENTQNTAQQAEIVAVITAFEEVSQPFNLYTDSKYVTGLFPEIETATLSPRTKIYTELKHLQRLIHKRQEKFYIGHIRGHTGLPGPLAQGNAYADSLTRILTAAGKRTADGSEFEKRTADGSEFESPKKKAKVE

SEQ ID NO: 3155 - protein, 2114 aa, synthetic construct
MPAAKRVKLDGGDKKYSIGLDIGTNSVGWAVITDEYKVPSKKFKVLGNTDRHSIKKNLIGALLFDSGETAEATRLKRTARRRYTRRKNRICYLQEIFSNEMAKVDDSFFHRLEESFLVEEDKKHERHPIFGNIVDEVAYHEKYPTIYHLRKKLVDSTDKADLRLIYLALAHMIKFRGHFLIEGDLNPDNSDVDKLFIQLVQTYNQLFEENPINASGVDAKAILSARLSKSRRLENLIAQLPGEKKNGLFGNLIALSLGLTPNFKSNFDLAEDAKLQLSKDTYDDDLDNLLAQIGDQYADLFLAAKNLSDAILLSDILRVNTEITKAPLSASMIKRYDEHHQDLTLLKALVRQQLPEKYKEIFFDQSKNGYAGYIDGGASQEEFYKFIKPILEKMDGTEELLVKLNREDLLRKQRTFDNGSIPHQIHLGELHAILRRQEDFYPFLKDNREKIEKILTFRIPYYVGPLARGNSRFAWMTRKSEETITPWNFEEVVDKGASAQSFIERMTNFDKNLPNEKVLPKHSLLYEYFTVYNELTKVKYVTEGMRKPAFLSGEQKKAIVDLLFKTNRKVTVKQLKEDYFKKIECFDSVEISGVEDRFNASLGTYHDLLKIIKDKDFLDNEENEDILEDIVLTLTLFEDREMIEERLKTYAHLFDDKVMKQLKRRRYTGWGRLSRKLINGIRDKQSGKTILDFLKSDGFANRNFMQLIHDDSLTFKEDIQKAQVSGQGDSLHEHIANLAGSPAIKKGILQTVKVVDELVKVMGRHKPENIVIEMARENQTTQKGQKNSRERMKRIEEGIKELGSQILKEHPVENTQLQNEKLYLYYLQNGRDMYVDQELDINRLSDYDVDHIVPQSFLKDDSIDNKVLTRSDKARGKSDNVPSEEVVKKMKNYWRQLLNAKLITQRKFDNLTKAERGGLSELDKAGFIKRQLVETRQITKHVAQILDSRMNTKYDENDKLIREVKVITLKSKLVSDFRKDFQFYKVREINNYHHAHDAYLNAVVGTALIKKYPKLESEFVYGDYKVYDVRKMIAKSEQEIGKATAKYFFYSNIMNFFKTEITLANGEIRKRPLIETNGETGEIVWDKGRDFATVRKVLSMPQVNIVKKTEVQTGGFSKESILPKRNSDKLIARKKDWDPKKYGGFDSPTVAYSVLVVAKVEKGKSKKLKSVKELLGITIMERSSFEKNPIDFLEAKGYKEVKKDLIIKLPKYSLFELENGRKRMLASAGELQKGNELALPSKYVNFLYLASHYEKLKGSPEDNEQKQLFVEQHKHYLDEIIEQISEFSKRVILADANLDKVLSAYNKHRDKPIREQAENIIHLFTLTNLGAPAAFKYFDTTIDRKRYTSTKEVLDATLIHQSITGLYETRIDLSQLGGDGGPAPGGSGSSGGVQEISDSRPMLHIYLNGRRFLGLLDTGADKTCIAGRDWPANWPIHQTESSLQGLGMACGVARSSQPLRWQHEDKSGIIHPFVIPTLPFTLWGRDIMKDIKVRLMTDSPDDSQDLMIGAIESNLFADQISWKSDQPVWLNQWPLKQEKLQALQQLVTEQLQLGHLEESNSPWNTPVFVIKKKSGKWRLLQDLRAVNATMHDMGALQPGLPSPVAVPKGWEIIIIDLQDCFFNIKLHPEDCKRFAFSVPSPNFKRPYQRFQWKVLPQGMKNSPTLCQKFVDKAILTVRDKYQDSYIVHYMDDILLAHPSRSIVDEILTSMIQALNKHGLVVSTEKIQKYDNLKYLGTHIQGDSVSYQKLQIRTDKLRTLNDFQKLLGNINWIRPFLKLTTGELKPLFEILNGDSNPISTRKLTPEACKALQLMNERLSTARVKRLDLSQPWSLCILKTEYTPTACLWQDGVVEWIHLPHISPKVITPYDIFCTQLIIKGRHRSKELFSKDPDYIVVPYTKVQFDLLLQEKEDWPISLLGFLGEVHFHLPKDPLLTFTLQTAIIFPHMTSTTPLEKGIVIFTDGSANGRSVTYIQGREPIIKENTQNTAQQAEIVAVITAFEEVSQPFNLYTDSKYVTGLFPEIETATLSPRTKIYTELKHLQRLIHKRQEKFYIGHIRGHTGLPGPLAQGNAYADSLTRILTAAGKRTADGSEFEKRTADGSEFESPKKKAKVE

SEQ ID NO: 3156 - protein, 2116 aa, synthetic construct
MPAAKRVKLDGGDKKYSIGLDIGTNSVGWAVITDEYKVPSKKFKVLGNTDRHSIKKNLIGALLFDSGETAEATRLKRTARRRYTRRKNRICYLQEIFSNEMAKVDDSFFHRLEESFLVEEDKKHERHPIFGNIVDEVAYHEKYPTIYHLRKKLVDSTDKADLRLIYLALAHMIKFRGHFLIEGDLNPDNSDVDKLFIQLVQTYNQLFEENPINASGVDAKAILSARLSKSRRLENLIAQLPGEKKNGLFGNLIALSLGLTPNFKSNFDLAEDAKLQLSKDTYDDDLDNLLAQIGDQYADLFLAAKNLSDAILLSDILRVNTEITKAPLSASMIKRYDEHHQDLTLLKALVRQQLPEKYKEIFFDQSKNGYAGYIDGGASQEEFYKFIKPILEKMDGTEELLVKLNREDLLRKQRTFDNGSIPHQIHLGELHAILRRQEDFYPFLKDNREKIEKILTFRIPYYVGPLARGNSRFAWMTRKSEETITPWNFEEVVDKGASAQSFIERMTNFDKNLPNEKVLPKHSLLYEYFTVYNELTKVKYVTEGMRKPAFLSGEQKKAIVDLLFKTNRKVTVKQLKEDYFKKIECFDSVEISGVEDRFNASLGTYHDLLKIIKDKDFLDNEENEDILEDIVLTLTLFEDREMIEERLKTYAHLFDDKVMKQLKRRRYTGWGRLSRKLINGIRDKQSGKTILDFLKSDGFANRNFMQLIHDDSLTFKEDIQKAQVSGQGDSLHEHIANLAGSPAIKKGILQTVKVVDELVKVMGRHKPENIVIEMARENQTTQKGQKNSRERMKRIEEGIKELGSQILKEHPVENTQLQNEKLYLYYLQNGRDMYVDQELDINRLSDYDVDHIVPQSFLKDDSIDNKVLTRSDKARGKSDNVPSEEVVKKMKNYWRQLLNAKLITQRKFDNLTKAERGGLSELDKAGFIKRQLVETRQITKHVAQILDSRMNTKYDENDKLIREVKVITLKSKLVSDFRKDFQFYKVREINNYHHAHDAYLNAVVGTALIKKYPKLESEFVYGDYKVYDVRKMIAKSEQEIGKATAKYFFYSNIMNFFKTEITLANGEIRKRPLIETNGETGEIVWDKGRDFATVRKVLSMPQVNIVKKTEVQTGGFSKESILPKRNSDKLIARKKDWDPKKYGGFDSPTVAYSVLVVAKVEKGKSKKLKSVKELLGITIMERSSFEKNPIDFLEAKGYKEVKKDLIIKLPKYSLFELENGRKRMLASAGELQKGNELALPSKYVNFLYLASHYEKLKGSPEDNEQKQLFVEQHKHYLDEIIEQISEFSKRVILADANLDKVLSAYNKHRDKPIREQAENIIHLFTLTNLGAPAAFKYFDTTIDRKRYTSTKEVLDATLIHQSITGLYETRIDLSQLGGDGGEAAAKGGGGGSGGVQEISDSRPMLHIYLNGRRFLGLLDTGADKTCIAGRDWPANWPIHQTESSLQGLGMACGVARSSQPLRWQHEDKSGIIHPFVIPTLPFTLWGRDIMKDIKVRLMTDSPDDSQDLMIGAIESNLFADQISWKSDQPVWLNQWPLKQEKLQALQQLVTEQLQLGHLEESNSPWNTPVFVIKKKSGKWRLLQDLRAVNATMHDMGALQPGLPSPVAVPKGWEIIIIDLQDCFFNIKLHPEDCKRFAFSVPSPNFKRPYQRFQWKVLPQGMKNSPTLCQKFVDKAILTVRDKYQDSYIVHYMDDILLAHPSRSIVDEILTSMIQALNKHGLVVSTEKIQKYDNLKYLGTHIQGDSVSYQKLQIRTDKLRTLNDFQKLLGNINWIRPFLKLTTGELKPLFEILNGDSNPISTRKLTPEACKALQLMNERLSTARVKRLDLSQPWSLCILKTEYTPTACLWQDGVVEWIHLPHISPKVITPYDIFCTQLIIKGRHRSKELFSKDPDYIVVPYTKVQFDLLLQEKEDWPISLLGFLGEVHFHLPKDPLLTFTLQTAIIFPHMTSTTPLEKGIVIFTDGSANGRSVTYIQGREPIIKENTQNTAQQAEIVAVITAFEEVSQPFNLYTDSKYVTGLFPEIETATLSPRTKIYTELKHLQRLIHKRQEKFYIGHIRGHTGLPGPLAQGNAYADSLTRILTAAGKRTADGSEFEKRTADGSEFESPKKKAKVE

SEQ ID NO: 3157 - protein, 2125 aa, synthetic construct
MPAAKRVKLDGGDKKYSIGLDIGTNSVGWAVITDEYKVPSKKFKVLGNTDRHSIKKNLIGALLFDSGETAEATRLKRTARRRYTRRKNRICYLQEIFSNEMAKVDDSFFHRLEESFLVEEDKKHERHPIFGNIVDEVAYHEKYPTIYHLRKKLVDSTDKADLRLIYLALAHMIKFRGHFLIEGDLNPDNSDVDKLFIQLVQTYNQLFEENPINASGVDAKAILSARLSKSRRLENLIAQLPGEKKNGLFGNLIALSLGLTPNFKSNFDLAEDAKLQLSKDTYDDDLDNLLAQIGDQYADLFLAAKNLSDAILLSDILRVNTEITKAPLSASMIKRYDEHHQDLTLLKALVRQQLPEKYKEIFFDQSKNGYAGYIDGGASQEEFYKFIKPILEKMDGTEELLVKLNREDLLRKQRTFDNGSIPHQIHLGELHAILRRQEDFYPFLKDNREKIEKILTFRIPYYVGPLARGNSRFAWMTRKSEETITPWNFEEVVDKGASAQSFIERMTNFDKNLPNEKVLPKHSLLYEYFTVYNELTKVKYVTEGMRKPAFLSGEQKKAIVDLLFKTNRKVTVKQLKEDYFKKIECFDSVEISGVEDRFNASLGTYHDLLKIIKDKDFLDNEENEDILEDIVLTLTLFEDREMIEERLKTYAHLFDDKVMKQLKRRRYTGWGRLSRKLINGIRDKQSGKTILDFLKSDGFANRNFMQLIHDDSLTFKEDIQKAQVSGQGDSLHEHIANLAGSPAIKKGILQTVKVVDELVKVMGRHKPENIVIEMARENQTTQKGQKNSRERMKRIEEGIKELGSQILKEHPVENTQLQNEKLYLYYLQNGRDMYVDQELDINRLSDYDVDHIVPQSFLKDDSIDNKVLTRSDKARGKSDNVPSEEVVKKMKNYWRQLLNAKLITQRKFDNLTKAERGGLSELDKAGFIKRQLVETRQITKHVAQILDSRMNTKYDENDKLIREVKVITLKSKLVSDFRKDFQFYKVREINNYHHAHDAYLNAVVGTALIKKYPKLESEFVYGDYKVYDVRKMIAKSEQEIGKATAKYFFYSNIMNFFKTEITLANGEIRKRPLIETNGETGEIVWDKGRDFATVRKVLSMPQVNIVKKTEVQTGGFSKESILPKRNSDKLIARKKDWDPKKYGGFDSPTVAYSVLVVAKVEKGKSKKLKSVKELLGITIMERSSFEKNPIDFLEAKGYKEVKKDLIIKLPKYSLFELENGRKRMLASAGELQKGNELALPSKYVNFLYLASHYEKLKGSPEDNEQKQLFVEQHKHYLDEIIEQISEFSKRVILADANLDKVLSAYNKHRDKPIREQAENIIHLFTLTNLGAPAAFKYFDTTIDRKRYTSTKEVLDATLIHQSITGLYETRIDLSQLGGDGGEAAAKEAAAKEAAAKEAAAKGGVQEISDSRPMLHIYLNGRRFLGLLDTGADKTCIAGRDWPANWPIHQTESSLQGLGMACGVARSSQPLRWQHEDKSGIIHPFVIPTLPFTLWGRDIMKDIKVRLMTDSPDDSQDLMIGAIESNLFADQISWKSDQPVWLNQWPLKQEKLQALQQLVTEQLQLGHLEESNSPWNTPVFVIKKKSGKWRLLQDLRAVNATMHDMGALQPGLPSPVAVPKGWEIIIIDLQDCFFNIKLHPEDCKRFAFSVPSPNFKRPYQRFQWKVLPQGMKNSPTLCQKFVDKAILTVRDKYQDSYIVHYMDDILLAHPSRSIVDEILTSMIQALNKHGLVVSTEKIQKYDNLKYLGTHIQGDSVSYQKLQIRTDKLRTLNDFQKLLGNINWIRPFLKLTTGELKPLFEILNGDSNPISTRKLTPEACKALQLMNERLSTARVKRLDLSQPWSLCILKTEYTPTACLWQDGVVEWIHLPHISPKVITPYDIFCTQLIIKGRHRSKELFSKDPDYIVVPYTKVQFDLLLQEKEDWPISLLGFLGEVHFHLPKDPLLTFTLQTAIIFPHMTSTTPLEKGIVIFTDGSANGRSVTYIQGREPIIKENTQNTAQQAEIVAVITAFEEVSQPFNLYTDSKYVTGLFPEIETATLSPRTKIYTELKHLQRLIHKRQEKFYIGHIRGHTGLPGPLAQGNAYADSLTRILTAAGKRTADGSEFEKRTADGSEFESPKKKAKVE

SEQ ID NO: 3158 - protein, 2116 aa, synthetic construct
MPAAKRVKLDGGDKKYSIGLDIGTNSVGWAVITDEYKVPSKKFKVLGNTDRHSIKKNLIGALLFDSGETAEATRLKRTARRRYTRRKNRICYLQEIFSNEMAKVDDSFFHRLEESFLVEEDKKHERHPIFGNIVDEVAYHEKYPTIYHLRKKLVDSTDKADLRLIYLALAHMIKFRGHFLIEGDLNPDNSDVDKLFIQLVQTYNQLFEENPINASGVDAKAILSARLSKSRRLENLIAQLPGEKKNGLFGNLIALSLGLTPNFKSNFDLAEDAKLQLSKDTYDDDLDNLLAQIGDQYADLFLAAKNLSDAILLSDILRVNTEITKAPLSASMIKRYDEHHQDLTLLKALVRQQLPEKYKEIFFDQSKNGYAGYIDGGASQEEFYKFIKPILEKMDGTEELLVKLNREDLLRKQRTFDNGSIPHQIHLGELHAILRRQEDFYPFLKDNREKIEKILTFRIPYYVGPLARGNSRFAWMTRKSEETITPWNFEEVVDKGASAQSFIERMTNFDKNLPNEKVLPKHSLLYEYFTVYNELTKVKYVTEGMRKPAFLSGEQKKAIVDLLFKTNRKVTVKQLKEDYFKKIECFDSVEISGVEDRFNASLGTYHDLLKIIKDKDFLDNEENEDILEDIVLTLTLFEDREMIEERLKTYAHLFDDKVMKQLKRRRYTGWGRLSRKLINGIRDKQSGKTILDFLKSDGFANRNFMQLIHDDSLTFKEDIQKAQVSGQGDSLHEHIANLAGSPAIKKGILQTVKVVDELVKVMGRHKPENIVIEMARENQTTQKGQKNSRERMKRIEEGIKELGSQILKEHPVENTQLQNEKLYLYYLQNGRDMYVDQELDINRLSDYDVDHIVPQSFLKDDSIDNKVLTRSDKARGKSDNVPSEEVVKKMKNYWRQLLNAKLITQRKFDNLTKAERGGLSELDKAGFIKRQLVETRQITKHVAQILDSRMNTKYDENDKLIREVKVITLKSKLVSDFRKDFQFYKVREINNYHHAHDAYLNAVVGTALIKKYPKLESEFVYGDYKVYDVRKMIAKSEQEIGKATAKYFFYSNIMNFFKTEITLANGEIRKRPLIETNGETGEIVWDKGRDFATVRKVLSMPQVNIVKKTEVQTGGFSKESILPKRNSDKLIARKKDWDPKKYGGFDSPTVAYSVLVVAKVEKGKSKKLKSVKELLGITIMERSSFEKNPIDFLEAKGYKEVKKDLIIKLPKYSLFELENGRKRMLASAGELQKGNELALPSKYVNFLYLASHYEKLKGSPEDNEQKQLFVEQHKHYLDEIIEQISEFSKRVILADANLDKVLSAYNKHRDKPIREQAENIIHLFTLTNLGAPAAFKYFDTTIDRKRYTSTKEVLDATLIHQSITGLYETRIDLSQLGGDGGGGSEAAAKGSSGGVQEISDSRPMLHIYLNGRRFLGLLDTGADKTCIAGRDWPANWPIHQTESSLQGLGMACGVARSSQPLRWQHEDKSGIIHPFVIPTLPFTLWGRDIMKDIKVRLMTDSPDDSQDLMIGAIESNLFADQISWKSDQPVWLNQWPLKQEKLQALQQLVTEQLQLGHLEESNSPWNTPVFVIKKKSGKWRLLQDLRAVNATMHDMGALQPGLPSPVAVPKGWEIIIIDLQDCFFNIKLHPEDCKRFAFSVPSPNFKRPYQRFQWKVLPQGMKNSPTLCQKFVDKAILTVRDKYQDSYIVHYMDDILLAHPSRSIVDEILTSMIQALNKHGLVVSTEKIQKYDNLKYLGTHIQGDSVSYQKLQIRTDKLRTLNDFQKLLGNINWIRPFLKLTTGELKPLFEILNGDSNPISTRKLTPEACKALQLMNERLSTARVKRLDLSQPWSLCILKTEYTPTACLWQDGVVEWIHLPHISPKVITPYDIFCTQLIIKGRHRSKELFSKDPDYIVVPYTKVQFDLLLQEKEDWPISLLGFLGEVHFHLPKDPLLTFTLQTAIIFPHMTSTTPLEKGIVIFTDGSANGRSVTYIQGREPIIKENTQNTAQQAEIVAVITAFEEVSQPFNLYTDSKYVTGLFPEIETATLSPRTKIYTELKHLQRLIHKRQEKFYIGHIRGHTGLPGPLAQGNAYADSLTRILTAAGKRTADGSEFEKRTADGSEFESPKKKAKVE

SEQ ID NO: 3159 - protein, 2114 aa, synthetic construct
MPAAKRVKLDGGDKKYSIGLDIGTNSVGWAVITDEYKVPSKKFKVLGNTDRHSIKKNLIGALLFDSGETAEATRLKRTARRRYTRRKNRICYLQEIFSNEMAKVDDSFFHRLEESFLVEEDKKHERHPIFGNIVDEVAYHEKYPTIYHLRKKLVDSTDKADLRLIYLALAHMIKFRGHFLIEGDLNPDNSDVDKLFIQLVQTYNQLFEENPINASGVDAKAILSARLSKSRRLENLIAQLPGEKKNGLFGNLIALSLGLTPNFKSNFDLAEDAKLQLSKDTYDDDLDNLLAQIGDQYADLFLAAKNLSDAILLSDILRVNTEITKAPLSASMIKRYDEHHQDLTLLKALVRQQLPEKYKEIFFDQSKNGYAGYIDGGASQEEFYKFIKPILEKMDGTEELLVKLNREDLLRKQRTFDNGSIPHQIHLGELHAILRRQEDFYPFLKDNREKIEKILTFRIPYYVGPLARGNSRFAWMTRKSEETITPWNFEEVVDKGASAQSFIERMTNFDKNLPNEKVLPKHSLLYEYFTVYNELTKVKYVTEGMRKPAFLSGEQKKAIVDLLFKTNRKVTVKQLKEDYFKKIECFDSVEISGVEDRFNASLGTYHDLLKIIKDKDFLDNEENEDILEDIVLTLTLFEDREMIEERLKTYAHLFDDKVMKQLKRRRYTGWGRLSRKLINGIRDKQSGKTILDFLKSDGFANRNFMQLIHDDSLTFKEDIQKAQVSGQGDSLHEHIANLAGSPAIKKGILQTVKVVDELVKVMGRHKPENIVIEMARENQTTQKGQKNSRERMKRIEEGIKELGSQILKEHPVENTQLQNEKLYLYYLQNGRDMYVDQELDINRLSDYDVDHIVPQSFLKDDSIDNKVLTRSDKARGKSDNVPSEEVVKKMKNYWRQLLNAKLITQRKFDNLTKAERGGLSELDKAGFIKRQLVETRQITKHVAQILDSRMNTKYDENDKLIREVKVITLKSKLVSDFRKDFQFYKVREINNYHHAHDAYLNAVVGTALIKKYPKLESEFVYGDYKVYDVRKMIAKSEQEIGKATAKYFFYSNIMNFFKTEITLANGEIRKRPLIETNGETGEIVWDKGRDFATVRKVLSMPQVNIVKKTEVQTGGFSKESILPKRNSDKLIARKKDWDPKKYGGFDSPTVAYSVLVVAKVEKGKSKKLKSVKELLGITIMERSSFEKNPIDFLEAKGYKEVKKDLIIKLPKYSLFELENGRKRMLASAGELQKGNELALPSKYVNFLYLASHYEKLKGSPEDNEQKQLFVEQHKHYLDEIIEQISEFSKRVILADANLDKVLSAYNKHRDKPIREQAENIIHLFTLTNLGAPAAFKYFDTTIDRKRYTSTKEVLDATLIHQSITGLYETRIDLSQLGGDGGGGGGSSGGSGGVQEISDSRPMLHIYLNGRRFLGLLDTGADKTCIAGRDWPANWPIHQTESSLQGLGMACGVARSSQPLRWQHEDKSGIIHPFVIPTLPFTLWGRDIMKDIKVRLMTDSPDDSQDLMIGAIESNLFADQISWKSDQPVWLNQWPLKQEKLQALQQLVTEQLQLGHLEESNSPWNTPVFVIKKKSGKWRLLQDLRAVNATMHDMGALQPGLPSPVAVPKGWEIIIIDLQDCFFNIKLHPEDCKRFAFSVPSPNFKRPYQRFQWKVLPQGMKNSPTLCQKFVDKAILTVRDKYQDSYIVHYMDDILLAHPSRSIVDEILTSMIQALNKHGLVVSTEKIQKYDNLKYLGTHIQGDSVSYQKLQIRTDKLRTLNDFQKLLGNINWIRPFLKLTTGELKPLFEILNGDSNPISTRKLTPEACKALQLMNERLSTARVKRLDLSQPWSLCILKTEYTPTACLWQDGVVEWIHLPHISPKVITPYDIFCTQLIIKGRHRSKELFSKDPDYIVVPYTKVQFDLLLQEKEDWPISLLGFLGEVHFHLPKDPLLTFTLQTAIIFPHMTSTTPLEKGIVIFTDGSANGRSVTYIQGREPIIKENTQNTAQQAEIVAVITAFEEVSQPFNLYTDSKYVTGLFPEIETATLSPRTKIYTELKHLQRLIHKRQEKFYIGHIRGHTGLPGPLAQGNAYADSLTRILTAAGKRTADGSEFEKRTADGSEFESPKKKAKVE

SEQ ID NO: 3160 - protein, 2111 aa, synthetic construct
MPAAKRVKLDGGDKKYSIGLDIGTNSVGWAVITDEYKVPSKKFKVLGNTDRHSIKKNLIGALLFDSGETAEATRLKRTARRRYTRRKNRICYLQEIFSNEMAKVDDSFFHRLEESFLVEEDKKHERHPIFGNIVDEVAYHEKYPTIYHLRKKLVDSTDKADLRLIYLALAHMIKFRGHFLIEGDLNPDNSDVDKLFIQLVQTYNQLFEENPINASGVDAKAILSARLSKSRRLENLIAQLPGEKKNGLFGNLIALSLGLTPNFKSNFDLAEDAKLQLSKDTYDDDLDNLLAQIGDQYADLFLAAKNLSDAILLSDILRVNTEITKAPLSASMIKRYDEHHQDLTLLKALVRQQLPEKYKEIFFDQSKNGYAGYIDGGASQEEFYKFIKPILEKMDGTEELLVKLNREDLLRKQRTFDNGSIPHQIHLGELHAILRRQEDFYPFLKDNREKIEKILTFRIPYYVGPLARGNSRFAWMTRKSEETITPWNFEEVVDKGASAQSFIERMTNFDKNLPNEKVLPKHSLLYEYFTVYNELTKVKYVTEGMRKPAFLSGEQKKAIVDLLFKTNRKVTVKQLKEDYFKKIECFDSVEISGVEDRFNASLGTYHDLLKIIKDKDFLDNEENEDILEDIVLTLTLFEDREMIEERLKTYAHLFDDKVMKQLKRRRYTGWGRLSRKLINGIRDKQSGKTILDFLKSDGFANRNFMQLIHDDSLTFKEDIQKAQVSGQGDSLHEHIANLAGSPAIKKGILQTVKVVDELVKVMGRHKPENIVIEMARENQTTQKGQKNSRERMKRIEEGIKELGSQILKEHPVENTQLQNEKLYLYYLQNGRDMYVDQELDINRLSDYDVDHIVPQSFLKDDSIDNKVLTRSDKARGKSDNVPSEEVVKKMKNYWRQLLNAKLITQRKFDNLTKAERGGLSELDKAGFIKRQLVETRQITKHVAQILDSRMNTKYDENDKLIREVKVITLKSKLVSDFRKDFQFYKVREINNYHHAHDAYLNAVVGTALIKKYPKLESEFVYGDYKVYDVRKMIAKSEQEIGKATAKYFFYSNIMNFFKTEITLANGEIRKRPLIETNGETGEIVWDKGRDFATVRKVLSMPQVNIVKKTEVQTGGFSKESILPKRNSDKLIARKKDWDPKKYGGFDSPTVAYSVLVVAKVEKGKSKKLKSVKELLGITIMERSSFEKNPIDFLEAKGYKEVKKDLIIKLPKYSLFELENGRKRMLASAGELQKGNELALPSKYVNFLYLASHYEKLKGSPEDNEQKQLFVEQHKHYLDEIIEQISEFSKRVILADANLDKVLSAYNKHRDKPIREQAENIIHLFTLTNLGAPAAFKYFDTTIDRKRYTSTKEVLDATLIHQSITGLYETRIDLSQLGGDGGGGSPAPGGVQEISDSRPMLHIYLNGRRFLGLLDTGADKTCIAGRDWPANWPIHQTESSLQGLGMACGVARSSQPLRWQHEDKSGIIHPFVIPTLPFTLWGRDIMKDIKVRLMTDSPDDSQDLMIGAIESNLFADQISWKSDQPVWLNQWPLKQEKLQALQQLVTEQLQLGHLEESNSPWNTPVFVIKKKSGKWRLLQDLRAVNATMHDMGALQPGLPSPVAVPKGWEIIIIDLQDCFFNIKLHPEDCKRFAFSVPSPNFKRPYQRFQWKVLPQGMKNSPTLCQKFVDKAILTVRDKYQDSYIVHYMDDILLAHPSRSIVDEILTSMIQALNKHGLVVSTEKIQKYDNLKYLGTHIQGDSVSYQKLQIRTDKLRTLNDFQKLLGNINWIRPFLKLTTGELKPLFEILNGDSNPISTRKLTPEACKALQLMNERLSTARVKRLDLSQPWSLCILKTEYTPTACLWQDGVVEWIHLPHISPKVITPYDIFCTQLIIKGRHRSKELFSKDPDYIVVPYTKVQFDLLLQEKEDWPISLLGFLGEVHFHLPKDPLLTFTLQTAIIFPHMTSTTPLEKGIVIFTDGSANGRSVTYIQGREPIIKENTQNTAQQAEIVAVITAFEEVSQPFNLYTDSKYVTGLFPEIETATLSPRTKIYTELKHLQRLIHKRQEKFYIGHIRGHTGLPGPLAQGNAYADSLTRILTAAGKRTADGSEFEKRTADGSEFESPKKKAKVE

SEQ ID NO: 3161 - protein, 2114 aa, synthetic construct
MPAAKRVKLDGGDKKYSIGLDIGTNSVGWAVITDEYKVPSKKFKVLGNTDRHSIKKNLIGALLFDSGETAEATRLKRTARRRYTRRKNRICYLQEIFSNEMAKVDDSFFHRLEESFLVEEDKKHERHPIFGNIVDEVAYHEKYPTIYHLRKKLVDSTDKADLRLIYLALAHMIKFRGHFLIEGDLNPDNSDVDKLFIQLVQTYNQLFEENPINASGVDAKAILSARLSKSRRLENLIAQLPGEKKNGLFGNLIALSLGLTPNFKSNFDLAEDAKLQLSKDTYDDDLDNLLAQIGDQYADLFLAAKNLSDAILLSDILRVNTEITKAPLSASMIKRYDEHHQDLTLLKALVRQQLPEKYKEIFFDQSKNGYAGYIDGGASQEEFYKFIKPILEKMDGTEELLVKLNREDLLRKQRTFDNGSIPHQIHLGELHAILRRQEDFYPFLKDNREKIEKILTFRIPYYVGPLARGNSRFAWMTRKSEETITPWNFEEVVDKGASAQSFIERMTNFDKNLPNEKVLPKHSLLYEYFTVYNELTKVKYVTEGMRKPAFLSGEQKKAIVDLLFKTNRKVTVKQLKEDYFKKIECFDSVEISGVEDRFNASLGTYHDLLKIIKDKDFLDNEENEDILEDIVLTLTLFEDREMIEERLKTYAHLFDDKVMKQLKRRRYTGWGRLSRKLINGIRDKQSGKTILDFLKSDGFANRNFMQLIHDDSLTFKEDIQKAQVSGQGDSLHEHIANLAGSPAIKKGILQTVKVVDELVKVMGRHKPENIVIEMARENQTTQKGQKNSRERMKRIEEGIKELGSQILKEHPVENTQLQNEKLYLYYLQNGRDMYVDQELDINRLSDYDVDHIVPQSFLKDDSIDNKVLTRSDKARGKSDNVPSEEVVKKMKNYWRQLLNAKLITQRKFDNLTKAERGGLSELDKAGFIKRQLVETRQITKHVAQILDSRMNTKYDENDKLIREVKVITLKSKLVSDFRKDFQFYKVREINNYHHAHDAYLNAVVGTALIKKYPKLESEFVYGDYKVYDVRKMIAKSEQEIGKATAKYFFYSNIMNFFKTEITLANGEIRKRPLIETNGETGEIVWDKGRDFATVRKVLSMPQVNIVKKTEVQTGGFSKESILPKRNSDKLIARKKDWDPKKYGGFDSPTVAYSVLVVAKVEKGKSKKLKSVKELLGITIMERSSFEKNPIDFLEAKGYKEVKKDLIIKLPKYSLFELENGRKRMLASAGELQKGNELALPSKYVNFLYLASHYEKLKGSPEDNEQKQLFVEQHKHYLDEIIEQISEFSKRVILADANLDKVLSAYNKHRDKPIREQAENIIHLFTLTNLGAPAAFKYFDTTIDRKRYTSTKEVLDATLIHQSITGLYETRIDLSQLGGDGGPAPGSSGGSGGVQEISDSRPMLHIYLNGRRFLGLLDTGADKTCIAGRDWPANWPIHQTESSLQGLGMACGVARSSQPLRWQHEDKSGIIHPFVIPTLPFTLWGRDIMKDIKVRLMTDSPDDSQDLMIGAIESNLFADQISWKSDQPVWLNQWPLKQEKLQALQQLVTEQLQLGHLEESNSPWNTPVFVIKKKSGKWRLLQDLRAVNATMHDMGALQPGLPSPVAVPKGWEIIIIDLQDCFFNIKLHPEDCKRFAFSVPSPNFKRPYQRFQWKVLPQGMKNSPTLCQKFVDKAILTVRDKYQDSYIVHYMDDILLAHPSRSIVDEILTSMIQALNKHGLVVSTEKIQKYDNLKYLGTHIQGDSVSYQKLQIRTDKLRTLNDFQKLLGNINWIRPFLKLTTGELKPLFEILNGDSNPISTRKLTPEACKALQLMNERLSTARVKRLDLSQPWSLCILKTEYTPTACLWQDGVVEWIHLPHISPKVITPYDIFCTQLIIKGRHRSKELFSKDPDYIVVPYTKVQFDLLLQEKEDWPISLLGFLGEVHFHLPKDPLLTFTLQTAIIFPHMTSTTPLEKGIVIFTDGSANGRSVTYIQGREPIIKENTQNTAQQAEIVAVITAFEEVSQPFNLYTDSKYVTGLFPEIETATLSPRTKIYTELKHLQRLIHKRQEKFYIGHIRGHTGLPGPLAQGNAYADSLTRILTAAGKRTADGSEFEKRTADGSEFESPKKKAKVE

SEQ ID NO: 3162 - protein, 2116 aa, synthetic construct
MPAAKRVKLDGGDKKYSIGLDIGTNSVGWAVITDEYKVPSKKFKVLGNTDRHSIKKNLIGALLFDSGETAEATRLKRTARRRYTRRKNRICYLQEIFSNEMAKVDDSFFHRLEESFLVEEDKKHERHPIFGNIVDEVAYHEKYPTIYHLRKKLVDSTDKADLRLIYLALAHMIKFRGHFLIEGDLNPDNSDVDKLFIQLVQTYNQLFEENPINASGVDAKAILSARLSKSRRLENLIAQLPGEKKNGLFGNLIALSLGLTPNFKSNFDLAEDAKLQLSKDTYDDDLDNLLAQIGDQYADLFLAAKNLSDAILLSDILRVNTEITKAPLSASMIKRYDEHHQDLTLLKALVRQQLPEKYKEIFFDQSKNGYAGYIDGGASQEEFYKFIKPILEKMDGTEELLVKLNREDLLRKQRTFDNGSIPHQIHLGELHAILRRQEDFYPFLKDNREKIEKILTFRIPYYVGPLARGNSRFAWMTRKSEETITPWNFEEVVDKGASAQSFIERMTNFDKNLPNEKVLPKHSLLYEYFTVYNELTKVKYVTEGMRKPAFLSGEQKKAIVDLLFKTNRKVTVKQLKEDYFKKIECFDSVEISGVEDRFNASLGTYHDLLKIIKDKDFLDNEENEDILEDIVLTLTLFEDREMIEERLKTYAHLFDDKVMKQLKRRRYTGWGRLSRKLINGIRDKQSGKTILDFLKSDGFANRNFMQLIHDDSLTFKEDIQKAQVSGQGDSLHEHIANLAGSPAIKKGILQTVKVVDELVKVMGRHKPENIVIEMARENQTTQKGQKNSRERMKRIEEGIKELGSQILKEHPVENTQLQNEKLYLYYLQNGRDMYVDQELDINRLSDYDVDHIVPQSFLKDDSIDNKVLTRSDKARGKSDNVPSEEVVKKMKNYWRQLLNAKLITQRKFDNLTKAERGGLSELDKAGFIKRQLVETRQITKHVAQILDSRMNTKYDENDKLIREVKVITLKSKLVSDFRKDFQFYKVREINNYHHAHDAYLNAVVGTALIKKYPKLESEFVYGDYKVYDVRKMIAKSEQEIGKATAKYFFYSNIMNFFKTEITLANGEIRKRPLIETNGETGEIVWDKGRDFATVRKVLSMPQVNIVKKTEVQTGGFSKESILPKRNSDKLIARKKDWDPKKYGGFDSPTVAYSVLVVAKVEKGKSKKLKSVKELLGITIMERSSFEKNPIDFLEAKGYKEVKKDLIIKLPKYSLFELENGRKRMLASAGELQKGNELALPSKYVNFLYLASHYEKLKGSPEDNEQKQLFVEQHKHYLDEIIEQISEFSKRVILADANLDKVLSAYNKHRDKPIREQAENIIHLFTLTNLGAPAAFKYFDTTIDRKRYTSTKEVLDATLIHQSITGLYETRIDLSQLGGDGGGGSGGGEAAAKGGVQEISDSRPMLHIYLNGRRFLGLLDTGADKTCIAGRDWPANWPIHQTESSLQGLGMACGVARSSQPLRWQHEDKSGIIHPFVIPTLPFTLWGRDIMKDIKVRLMTDSPDDSQDLMIGAIESNLFADQISWKSDQPVWLNQWPLKQEKLQALQQLVTEQLQLGHLEESNSPWNTPVFVIKKKSGKWRLLQDLRAVNATMHDMGALQPGLPSPVAVPKGWEIIIIDLQDCFFNIKLHPEDCKRFAFSVPSPNFKRPYQRFQWKVLPQGMKNSPTLCQKFVDKAILTVRDKYQDSYIVHYMDDILLAHPSRSIVDEILTSMIQALNKHGLVVSTEKIQKYDNLKYLGTHIQGDSVSYQKLQIRTDKLRTLNDFQKLLGNINWIRPFLKLTTGELKPLFEILNGDSNPISTRKLTPEACKALQLMNERLSTARVKRLDLSQPWSLCILKTEYTPTACLWQDGVVEWIHLPHISPKVITPYDIFCTQLIIKGRHRSKELFSKDPDYIVVPYTKVQFDLLLQEKEDWPISLLGFLGEVHFHLPKDPLLTFTLQTAIIFPHMTSTTPLEKGIVIFTDGSANGRSVTYIQGREPIIKENTQNTAQQAEIVAVITAFEEVSQPFNLYTDSKYVTGLFPEIETATLSPRTKIYTELKHLQRLIHKRQEKFYIGHIRGHTGLPGPLAQGNAYADSLTRILTAAGKRTADGSEFEKRTADGSEFESPKKKAKVE

SEQ ID NO: 3163 - protein, 2116 aa, synthetic construct
MPAAKRVKLDGGDKKYSIGLDIGTNSVGWAVITDEYKVPSKKFKVLGNTDRHSIKKNLIGALLFDSGETAEATRLKRTARRRYTRRKNRICYLQEIFSNEMAKVDDSFFHRLEESFLVEEDKKHERHPIFGNIVDEVAYHEKYPTIYHLRKKLVDSTDKADLRLIYLALAHMIKFRGHFLIEGDLNPDNSDVDKLFIQLVQTYNQLFEENPINASGVDAKAILSARLSKSRRLENLIAQLPGEKKNGLFGNLIALSLGLTPNFKSNFDLAEDAKLQLSKDTYDDDLDNLLAQIGDQYADLFLAAKNLSDAILLSDILRVNTEITKAPLSASMIKRYDEHHQDLTLLKALVRQQLPEKYKEIFFDQSKNGYAGYIDGGASQEEFYKFIKPILEKMDGTEELLVKLNREDLLRKQRTFDNGSIPHQIHLGELHAILRRQEDFYPFLKDNREKIEKILTFRIPYYVGPLARGNSRFAWMTRKSEETITPWNFEEVVDKGASAQSFIERMTNFDKNLPNEKVLPKHSLLYEYFTVYNELTKVKYVTEGMRKPAFLSGEQKKAIVDLLFKTNRKVTVKQLKEDYFKKIECFDSVEISGVEDRFNASLGTYHDLLKIIKDKDFLDNEENEDILEDIVLTLTLFEDREMIEERLKTYAHLFDDKVMKQLKRRRYTGWGRLSRKLINGIRDKQSGKTILDFLKSDGFANRNFMQLIHDDSLTFKEDIQKAQVSGQGDSLHEHIANLAGSPAIKKGILQTVKVVDELVKVMGRHKPENIVIEMARENQTTQKGQKNSRERMKRIEEGIKELGSQILKEHPVENTQLQNEKLYLYYLQNGRDMYVDQELDINRLSDYDVDHIVPQSFLKDDSIDNKVLTRSDKARGKSDNVPSEEVVKKMKNYWRQLLNAKLITQRKFDNLTKAERGGLSELDKAGFIKRQLVETRQITKHVAQILDSRMNTKYDENDKLIREVKVITLKSKLVSDFRKDFQFYKVREINNYHHAHDAYLNAVVGTALIKKYPKLESEFVYGDYKVYDVRKMIAKSEQEIGKATAKYFFYSNIMNFFKTEITLANGEIRKRPLIETNGETGEIVWDKGRDFATVRKVLSMPQVNIVKKTEVQTGGFSKESILPKRNSDKLIARKKDWDPKKYGGFDSPTVAYSVLVVAKVEKGKSKKLKSVKELLGITIMERSSFEKNPIDFLEAKGYKEVKKDLIIKLPKYSLFELENGRKRMLASAGELQKGNELALPSKYVNFLYLASHYEKLKGSPEDNEQKQLFVEQHKHYLDEIIEQISEFSKRVILADANLDKVLSAYNKHRDKPIREQAENIIHLFTLTNLGAPAAFKYFDTTIDRKRYTSTKEVLDATLIHQSITGLYETRIDLSQLGGDGGGGGGSSEAAAKGGVQEISDSRPMLHIYLNGRRFLGLLDTGADKTCIAGRDWPANWPIHQTESSLQGLGMACGVARSSQPLRWQHEDKSGIIHPFVIPTLPFTLWGRDIMKDIKVRLMTDSPDDSQDLMIGAIESNLFADQISWKSDQPVWLNQWPLKQEKLQALQQLVTEQLQLGHLEESNSPWNTPVFVIKKKSGKWRLLQDLRAVNATMHDMGALQPGLPSPVAVPKGWEIIIIDLQDCFFNIKLHPEDCKRFAFSVPSPNFKRPYQRFQWKVLPQGMKNSPTLCQKFVDKAILTVRDKYQDSYIVHYMDDILLAHPSRSIVDEILTSMIQALNKHGLVVSTEKIQKYDNLKYLGTHIQGDSVSYQKLQIRTDKLRTLNDFQKLLGNINWIRPFLKLTTGELKPLFEILNGDSNPISTRKLTPEACKALQLMNERLSTARVKRLDLSQPWSLCILKTEYTPTACLWQDGVVEWIHLPHISPKVITPYDIFCTQLIIKGRHRSKELFSKDPDYIVVPYTKVQFDLLLQEKEDWPISLLGFLGEVHFHLPKDPLLTFTLQTAIIFPHMTSTTPLEKGIVIFTDGSANGRSVTYIQGREPIIKENTQNTAQQAEIVAVITAFEEVSQPFNLYTDSKYVTGLFPEIETATLSPRTKIYTELKHLQRLIHKRQEKFYIGHIRGHTGLPGPLAQGNAYADSLTRILTAAGKRTADGSEFEKRTADGSEFESPKKKAKVE

SEQ ID NO: 3164 - protein, 2116 aa, synthetic construct
MPAAKRVKLDGGDKKYSIGLDIGTNSVGWAVITDEYKVPSKKFKVLGNTDRHSIKKNLIGALLFDSGETAEATRLKRTARRRYTRRKNRICYLQEIFSNEMAKVDDSFFHRLEESFLVEEDKKHERHPIFGNIVDEVAYHEKYPTIYHLRKKLVDSTDKADLRLIYLALAHMIKFRGHFLIEGDLNPDNSDVDKLFIQLVQTYNQLFEENPINASGVDAKAILSARLSKSRRLENLIAQLPGEKKNGLFGNLIALSLGLTPNFKSNFDLAEDAKLQLSKDTYDDDLDNLLAQIGDQYADLFLAAKNLSDAILLSDILRVNTEITKAPLSASMIKRYDEHHQDLTLLKALVRQQLPEKYKEIFFDQSKNGYAGYIDGGASQEEFYKFIKPILEKMDGTEELLVKLNREDLLRKQRTFDNGSIPHQIHLGELHAILRRQEDFYPFLKDNREKIEKILTFRIPYYVGPLARGNSRFAWMTRKSEETITPWNFEEVVDKGASAQSFIERMTNFDKNLPNEKVLPKHSLLYEYFTVYNELTKVKYVTEGMRKPAFLSGEQKKAIVDLLFKTNRKVTVKQLKEDYFKKIECFDSVEISGVEDRFNASLGTYHDLLKIIKDKDFLDNEENEDILEDIVLTLTLFEDREMIEERLKTYAHLFDDKVMKQLKRRRYTGWGRLSRKLINGIRDKQSGKTILDFLKSDGFANRNFMQLIHDDSLTFKEDIQKAQVSGQGDSLHEHIANLAGSPAIKKGILQTVKVVDELVKVMGRHKPENIVIEMARENQTTQKGQKNSRERMKRIEEGIKELGSQILKEHPVENTQLQNEKLYLYYLQNGRDMYVDQELDINRLSDYDVDHIVPQSFLKDDSIDNKVLTRSDKARGKSDNVPSEEVVKKMKNYWRQLLNAKLITQRKFDNLTKAERGGLSELDKAGFIKRQLVETRQITKHVAQILDSRMNTKYDENDKLIREVKVITLKSKLVSDFRKDFQFYKVREINNYHHAHDAYLNAVVGTALIKKYPKLESEFVYGDYKVYDVRKMIAKSEQEIGKATAKYFFYSNIMNFFKTEITLANGEIRKRPLIETNGETGEIVWDKGRDFATVRKVLSMPQVNIVKKTEVQTGGFSKESILPKRNSDKLIARKKDWDPKKYGGFDSPTVAYSVLVVAKVEKGKSKKLKSVKELLGITIMERSSFEKNPIDFLEAKGYKEVKKDLIIKLPKYSLFELENGRKRMLASAGELQKGNELALPSKYVNFLYLASHYEKLKGSPEDNEQKQLFVEQHKHYLDEIIEQISEFSKRVILADANLDKVLSAYNKHRDKPIREQAENIIHLFTLTNLGAPAAFKYFDTTIDRKRYTSTKEVLDATLIHQSITGLYETRIDLSQLGGDGGGGSPAPEAAAKGGVQEISDSRPMLHIYLNGRRFLGLLDTGADKTCIAGRDWPANWPIHQTESSLQGLGMACGVARSSQPLRWQHEDKSGIIHPFVIPTLPFTLWGRDIMKDIKVRLMTDSPDDSQDLMIGAIESNLFADQISWKSDQPVWLNQWPLKQEKLQALQQLVTEQLQLGHLEESNSPWNTPVFVIKKKSGKWRLLQDLRAVNATMHDMGALQPGLPSPVAVPKGWEIIIIDLQDCFFNIKLHPEDCKRFAFSVPSPNFKRPYQRFQWKVLPQGMKNSPTLCQKFVDKAILTVRDKYQDSYIVHYMDDILLAHPSRSIVDEILTSMIQALNKHGLVVSTEKIQKYDNLKYLGTHIQGDSVSYQKLQIRTDKLRTLNDFQKLLGNINWIRPFLKLTTGELKPLFEILNGDSNPISTRKLTPEACKALQLMNERLSTARVKRLDLSQPWSLCILKTEYTPTACLWQDGVVEWIHLPHISPKVITPYDIFCTQLIIKGRHRSKELFSKDPDYIVVPYTKVQFDLLLQEKEDWPISLLGFLGEVHFHLPKDPLLTFTLQTAIIFPHMTSTTPLEKGIVIFTDGSANGRSVTYIQGREPIIKENTQNTAQQAEIVAVITAFEEVSQPFNLYTDSKYVTGLFPEIETATLSPRTKIYTELKHLQRLIHKRQEKFYIGHIRGHTGLPGPLAQGNAYADSLTRILTAAGKRTADGSEFEKRTADGSEFESPKKKAKVE

SEQ ID NO: 3165 - protein, 2117 aa, synthetic construct
MPAAKRVKLDGGDKKYSIGLDIGTNSVGWAVITDEYKVPSKKFKVLGNTDRHSIKKNLIGALLFDSGETAEATRLKRTARRRYTRRKNRICYLQEIFSNEMAKVDDSFFHRLEESFLVEEDKKHERHPIFGNIVDEVAYHEKYPTIYHLRKKLVDSTDKADLRLIYLALAHMIKFRGHFLIEGDLNPDNSDVDKLFIQLVQTYNQLFEENPINASGVDAKAILSARLSKSRRLENLIAQLPGEKKNGLFGNLIALSLGLTPNFKSNFDLAEDAKLQLSKDTYDDDLDNLLAQIGDQYADLFLAAKNLSDAILLSDILRVNTEITKAPLSASMIKRYDEHHQDLTLLKALVRQQLPEKYKEIFFDQSKNGYAGYIDGGASQEEFYKFIKPILEKMDGTEELLVKLNREDLLRKQRTFDNGSIPHQIHLGELHAILRRQEDFYPFLKDNREKIEKILTFRIPYYVGPLARGNSRFAWMTRKSEETITPWNFEEVVDKGASAQSFIERMTNFDKNLPNEKVLPKHSLLYEYFTVYNELTKVKYVTEGMRKPAFLSGEQKKAIVDLLFKTNRKVTVKQLKEDYFKKIECFDSVEISGVEDRFNASLGTYHDLLKIIKDKDFLDNEENEDILEDIVLTLTLFEDREMIEERLKTYAHLFDDKVMKQLKRRRYTGWGRLSRKLINGIRDKQSGKTILDFLKSDGFANRNFMQLIHDDSLTFKEDIQKAQVSGQGDSLHEHIANLAGSPAIKKGILQTVKVVDELVKVMGRHKPENIVIEMARENQTTQKGQKNSRERMKRIEEGIKELGSQILKEHPVENTQLQNEKLYLYYLQNGRDMYVDQELDINRLSDYDVDHIVPQSFLKDDSIDNKVLTRSDKARGKSDNVPSEEVVKKMKNYWRQLLNAKLITQRKFDNLTKAERGGLSELDKAGFIKRQLVETRQITKHVAQILDSRMNTKYDENDKLIREVKVITLKSKLVSDFRKDFQFYKVREINNYHHAHDAYLNAVVGTALIKKYPKLESEFVYGDYKVYDVRKMIAKSEQEIGKATAKYFFYSNIMNFFKTEITLANGEIRKRPLIETNGETGEIVWDKGRDFATVRKVLSMPQVNIVKKTEVQTGGFSKESILPKRNSDKLIARKKDWDPKKYGGFDSPTVAYSVLVVAKVEKGKSKKLKSVKELLGITIMERSSFEKNPIDFLEAKGYKEVKKDLIIKLPKYSLFELENGRKRMLASAGELQKGNELALPSKYVNFLYLASHYEKLKGSPEDNEQKQLFVEQHKHYLDEIIEQISEFSKRVILADANLDKVLSAYNKHRDKPIREQAENIIHLFTLTNLGAPAAFKYFDTTIDRKRYTSTKEVLDATLIHQSITGLYETRIDLSQLGGDGGGSAGSAAGSGEFGGVQEISDSRPMLHIYLNGRRFLGLLDTGADKTCIAGRDWPANWPIHQTESSLQGLGMACGVARSSQPLRWQHEDKSGIIHPFVIPTLPFTLWGRDIMKDIKVRLMTDSPDDSQDLMIGAIESNLFADQISWKSDQPVWLNQWPLKQEKLQALQQLVTEQLQLGHLEESNSPWNTPVFVIKKKSGKWRLLQDLRAVNATMHDMGALQPGLPSPVAVPKGWEIIIIDLQDCFFNIKLHPEDCKRFAFSVPSPNFKRPYQRFQWKVLPQGMKNSPTLCQKFVDKAILTVRDKYQDSYIVHYMDDILLAHPSRSIVDEILTSMIQALNKHGLVVSTEKIQKYDNLKYLGTHIQGDSVSYQKLQIRTDKLRTLNDFQKLLGNINWIRPFLKLTTGELKPLFEILNGDSNPISTRKLTPEACKALQLMNERLSTARVKRLDLSQPWSLCILKTEYTPTACLWQDGVVEWIHLPHISPKVITPYDIFCTQLIIKGRHRSKELFSKDPDYIVVPYTKVQFDLLLQEKEDWPISLLGFLGEVHFHLPKDPLLTFTLQTAIIFPHMTSTTPLEKGIVIFTDGSANGRSVTYIQGREPIIKENTQNTAQQAEIVAVITAFEEVSQPFNLYTDSKYVTGLFPEIETATLSPRTKIYTELKHLQRLIHKRQEKFYIGHIRGHTGLPGPLAQGNAYADSLTRILTAAGKRTADGSEFEKRTADGSEFESPKKKAKVE

SEQ ID NO: 3166 - protein, 2111 aa, synthetic construct
MPAAKRVKLDGGDKKYSIGLDIGTNSVGWAVITDEYKVPSKKFKVLGNTDRHSIKKNLIGALLFDSGETAEATRLKRTARRRYTRRKNRICYLQEIFSNEMAKVDDSFFHRLEESFLVEEDKKHERHPIFGNIVDEVAYHEKYPTIYHLRKKLVDSTDKADLRLIYLALAHMIKFRGHFLIEGDLNPDNSDVDKLFIQLVQTYNQLFEENPINASGVDAKAILSARLSKSRRLENLIAQLPGEKKNGLFGNLIALSLGLTPNFKSNFDLAEDAKLQLSKDTYDDDLDNLLAQIGDQYADLFLAAKNLSDAILLSDILRVNTEITKAPLSASMIKRYDEHHQDLTLLKALVRQQLPEKYKEIFFDQSKNGYAGYIDGGASQEEFYKFIKPILEKMDGTEELLVKLNREDLLRKQRTFDNGSIPHQIHLGELHAILRRQEDFYPFLKDNREKIEKILTFRIPYYVGPLARGNSRFAWMTRKSEETITPWNFEEVVDKGASAQSFIERMTNFDKNLPNEKVLPKHSLLYEYFTVYNELTKVKYVTEGMRKPAFLSGEQKKAIVDLLFKTNRKVTVKQLKEDYFKKIECFDSVEISGVEDRFNASLGTYHDLLKIIKDKDFLDNEENEDILEDIVLTLTLFEDREMIEERLKTYAHLFDDKVMKQLKRRRYTGWGRLSRKLINGIRDKQSGKTILDFLKSDGFANRNFMQLIHDDSLTFKEDIQKAQVSGQGDSLHEHIANLAGSPAIKKGILQTVKVVDELVKVMGRHKPENIVIEMARENQTTQKGQKNSRERMKRIEEGIKELGSQILKEHPVENTQLQNEKLYLYYLQNGRDMYVDQELDINRLSDYDVDHIVPQSFLKDDSIDNKVLTRSDKARGKSDNVPSEEVVKKMKNYWRQLLNAKLITQRKFDNLTKAERGGLSELDKAGFIKRQLVETRQITKHVAQILDSRMNTKYDENDKLIREVKVITLKSKLVSDFRKDFQFYKVREINNYHHAHDAYLNAVVGTALIKKYPKLESEFVYGDYKVYDVRKMIAKSEQEIGKATAKYFFYSNIMNFFKTEITLANGEIRKRPLIETNGETGEIVWDKGRDFATVRKVLSMPQVNIVKKTEVQTGGFSKESILPKRNSDKLIARKKDWDPKKYGGFDSPTVAYSVLVVAKVEKGKSKKLKSVKELLGITIMERSSFEKNPIDFLEAKGYKEVKKDLIIKLPKYSLFELENGRKRMLASAGELQKGNELALPSKYVNFLYLASHYEKLKGSPEDNEQKQLFVEQHKHYLDEIIEQISEFSKRVILADANLDKVLSAYNKHRDKPIREQAENIIHLFTLTNLGAPAAFKYFDTTIDRKRYTSTKEVLDATLIHQSITGLYETRIDLSQLGGDGGGGGGGSGGVQEISDSRPMLHIYLNGRRFLGLLDTGADKTCIAGRDWPANWPIHQTESSLQGLGMACGVARSSQPLRWQHEDKSGIIHPFVIPTLPFTLWGRDIMKDIKVRLMTDSPDDSQDLMIGAIESNLFADQISWKSDQPVWLNQWPLKQEKLQALQQLVTEQLQLGHLEESNSPWNTPVFVIKKKSGKWRLLQDLRAVNATMHDMGALQPGLPSPVAVPKGWEIIIIDLQDCFFNIKLHPEDCKRFAFSVPSPNFKRPYQRFQWKVLPQGMKNSPTLCQKFVDKAILTVRDKYQDSYIVHYMDDILLAHPSRSIVDEILTSMIQALNKHGLVVSTEKIQKYDNLKYLGTHIQGDSVSYQKLQIRTDKLRTLNDFQKLLGNINWIRPFLKLTTGELKPLFEILNGDSNPISTRKLTPEACKALQLMNERLSTARVKRLDLSQPWSLCILKTEYTPTACLWQDGVVEWIHLPHISPKVITPYDIFCTQLIIKGRHRSKELFSKDPDYIVVPYTKVQFDLLLQEKEDWPISLLGFLGEVHFHLPKDPLLTFTLQTAIIFPHMTSTTPLEKGIVIFTDGSANGRSVTYIQGREPIIKENTQNTAQQAEIVAVITAFEEVSQPFNLYTDSKYVTGLFPEIETATLSPRTKIYTELKHLQRLIHKRQEKFYIGHIRGHTGLPGPLAQGNAYADSLTRILTAAGKRTADGSEFEKRTADGSEFESPKKKAKVE

SEQ ID NO: 3167 - protein, 2113 aa, synthetic construct
MPAAKRVKLDGGDKKYSIGLDIGTNSVGWAVITDEYKVPSKKFKVLGNTDRHSIKKNLIGALLFDSGETAEATRLKRTARRRYTRRKNRICYLQEIFSNEMAKVDDSFFHRLEESFLVEEDKKHERHPIFGNIVDEVAYHEKYPTIYHLRKKLVDSTDKADLRLIYLALAHMIKFRGHFLIEGDLNPDNSDVDKLFIQLVQTYNQLFEENPINASGVDAKAILSARLSKSRRLENLIAQLPGEKKNGLFGNLIALSLGLTPNFKSNFDLAEDAKLQLSKDTYDDDLDNLLAQIGDQYADLFLAAKNLSDAILLSDILRVNTEITKAPLSASMIKRYDEHHQDLTLLKALVRQQLPEKYKEIFFDQSKNGYAGYIDGGASQEEFYKFIKPILEKMDGTEELLVKLNREDLLRKQRTFDNGSIPHQIHLGELHAILRRQEDFYPFLKDNREKIEKILTFRIPYYVGPLARGNSRFAWMTRKSEETITPWNFEEVVDKGASAQSFIERMTNFDKNLPNEKVLPKHSLLYEYFTVYNELTKVKYVTEGMRKPAFLSGEQKKAIVDLLFKTNRKVTVKQLKEDYFKKIECFDSVEISGVEDRFNASLGTYHDLLKIIKDKDFLDNEENEDILEDIVLTLTLFEDREMIEERLKTYAHLFDDKVMKQLKRRRYTGWGRLSRKLINGIRDKQSGKTILDFLKSDGFANRNFMQLIHDDSLTFKEDIQKAQVSGQGDSLHEHIANLAGSPAIKKGILQTVKVVDELVKVMGRHKPENIVIEMARENQTTQKGQKNSRERMKRIEEGIKELGSQILKEHPVENTQLQNEKLYLYYLQNGRDMYVDQELDINRLSDYDVDHIVPQSFLKDDSIDNKVLTRSDKARGKSDNVPSEEVVKKMKNYWRQLLNAKLITQRKFDNLTKAERGGLSELDKAGFIKRQLVETRQITKHVAQILDSRMNTKYDENDKLIREVKVITLKSKLVSDFRKDFQFYKVREINNYHHAHDAYLNAVVGTALIKKYPKLESEFVYGDYKVYDVRKMIAKSEQEIGKATAKYFFYSNIMNFFKTEITLANGEIRKRPLIETNGETGEIVWDKGRDFATVRKVLSMPQVNIVKKTEVQTGGFSKESILPKRNSDKLIARKKDWDPKKYGGFDSPTVAYSVLVVAKVEKGKSKKLKSVKELLGITIMERSSFEKNPIDFLEAKGYKEVKKDLIIKLPKYSLFELENGRKRMLASAGELQKGNELALPSKYVNFLYLASHYEKLKGSPEDNEQKQLFVEQHKHYLDEIIEQISEFSKRVILADANLDKVLSAYNKHRDKPIREQAENIIHLFTLTNLGAPAAFKYFDTTIDRKRYTSTKEVLDATLIHQSITGLYETRIDLSQLGGDGGGGGEAAAKGGVQEISDSRPMLHIYLNGRRFLGLLDTGADKTCIAGRDWPANWPIHQTESSLQGLGMACGVARSSQPLRWQHEDKSGIIHPFVIPTLPFTLWGRDIMKDIKVRLMTDSPDDSQDLMIGAIESNLFADQISWKSDQPVWLNQWPLKQEKLQALQQLVTEQLQLGHLEESNSPWNTPVFVIKKKSGKWRLLQDLRAVNATMHDMGALQPGLPSPVAVPKGWEIIIIDLQDCFFNIKLHPEDCKRFAFSVPSPNFKRPYQRFQWKVLPQGMKNSPTLCQKFVDKAILTVRDKYQDSYIVHYMDDILLAHPSRSIVDEILTSMIQALNKHGLVVSTEKIQKYDNLKYLGTHIQGDSVSYQKLQIRTDKLRTLNDFQKLLGNINWIRPFLKLTTGELKPLFEILNGDSNPISTRKLTPEACKALQLMNERLSTARVKRLDLSQPWSLCILKTEYTPTACLWQDGVVEWIHLPHISPKVITPYDIFCTQLIIKGRHRSKELFSKDPDYIVVPYTKVQFDLLLQEKEDWPISLLGFLGEVHFHLPKDPLLTFTLQTAIIFPHMTSTTPLEKGIVIFTDGSANGRSVTYIQGREPIIKENTQNTAQQAEIVAVITAFEEVSQPFNLYTDSKYVTGLFPEIETATLSPRTKIYTELKHLQRLIHKRQEKFYIGHIRGHTGLPGPLAQGNAYADSLTRILTAAGKRTADGSEFEKRTADGSEFESPKKKAKVE

SEQ ID NO: 3168 - protein, 2111 aa, synthetic construct
MPAAKRVKLDGGDKKYSIGLDIGTNSVGWAVITDEYKVPSKKFKVLGNTDRHSIKKNLIGALLFDSGETAEATRLKRTARRRYTRRKNRICYLQEIFSNEMAKVDDSFFHRLEESFLVEEDKKHERHPIFGNIVDEVAYHEKYPTIYHLRKKLVDSTDKADLRLIYLALAHMIKFRGHFLIEGDLNPDNSDVDKLFIQLVQTYNQLFEENPINASGVDAKAILSARLSKSRRLENLIAQLPGEKKNGLFGNLIALSLGLTPNFKSNFDLAEDAKLQLSKDTYDDDLDNLLAQIGDQYADLFLAAKNLSDAILLSDILRVNTEITKAPLSASMIKRYDEHHQDLTLLKALVRQQLPEKYKEIFFDQSKNGYAGYIDGGASQEEFYKFIKPILEKMDGTEELLVKLNREDLLRKQRTFDNGSIPHQIHLGELHAILRRQEDFYPFLKDNREKIEKILTFRIPYYVGPLARGNSRFAWMTRKSEETITPWNFEEVVDKGASAQSFIERMTNFDKNLPNEKVLPKHSLLYEYFTVYNELTKVKYVTEGMRKPAFLSGEQKKAIVDLLFKTNRKVTVKQLKEDYFKKIECFDSVEISGVEDRFNASLGTYHDLLKIIKDKDFLDNEENEDILEDIVLTLTLFEDREMIEERLKTYAHLFDDKVMKQLKRRRYTGWGRLSRKLINGIRDKQSGKTILDFLKSDGFANRNFMQLIHDDSLTFKEDIQKAQVSGQGDSLHEHIANLAGSPAIKKGILQTVKVVDELVKVMGRHKPENIVIEMARENQTTQKGQKNSRERMKRIEEGIKELGSQILKEHPVENTQLQNEKLYLYYLQNGRDMYVDQELDINRLSDYDVDHIVPQSFLKDDSIDNKVLTRSDKARGKSDNVPSEEVVKKMKNYWRQLLNAKLITQRKFDNLTKAERGGLSELDKAGFIKRQLVETRQITKHVAQILDSRMNTKYDENDKLIREVKVITLKSKLVSDFRKDFQFYKVREINNYHHAHDAYLNAVVGTALIKKYPKLESEFVYGDYKVYDVRKMIAKSEQEIGKATAKYFFYSNIMNFFKTEITLANGEIRKRPLIETNGETGEIVWDKGRDFATVRKVLSMPQVNIVKKTEVQTGGFSKESILPKRNSDKLIARKKDWDPKKYGGFDSPTVAYSVLVVAKVEKGKSKKLKSVKELLGITIMERSSFEKNPIDFLEAKGYKEVKKDLIIKLPKYSLFELENGRKRMLASAGELQKGNELALPSKYVNFLYLASHYEKLKGSPEDNEQKQLFVEQHKHYLDEIIEQISEFSKRVILADANLDKVLSAYNKHRDKPIREQAENIIHLFTLTNLGAPAAFKYFDTTIDRKRYTSTKEVLDATLIHQSITGLYETRIDLSQLGGDGGGGSGGSGGVQEISDSRPMLHIYLNGRRFLGLLDTGADKTCIAGRDWPANWPIHQTESSLQGLGMACGVARSSQPLRWQHEDKSGIIHPFVIPTLPFTLWGRDIMKDIKVRLMTDSPDDSQDLMIGAIESNLFADQISWKSDQPVWLNQWPLKQEKLQALQQLVTEQLQLGHLEESNSPWNTPVFVIKKKSGKWRLLQDLRAVNATMHDMGALQPGLPSPVAVPKGWEIIIIDLQDCFFNIKLHPEDCKRFAFSVPSPNFKRPYQRFQWKVLPQGMKNSPTLCQKFVDKAILTVRDKYQDSYIVHYMDDILLAHPSRSIVDEILTSMIQALNKHGLVVSTEKIQKYDNLKYLGTHIQGDSVSYQKLQIRTDKLRTLNDFQKLLGNINWIRPFLKLTTGELKPLFEILNGDSNPISTRKLTPEACKALQLMNERLSTARVKRLDLSQPWSLCILKTEYTPTACLWQDGVVEWIHLPHISPKVITPYDIFCTQLIIKGRHRSKELFSKDPDYIVVPYTKVQFDLLLQEKEDWPISLLGFLGEVHFHLPKDPLLTFTLQTAIIFPHMTSTTPLEKGIVIFTDGSANGRSVTYIQGREPIIKENTQNTAQQAEIVAVITAFEEVSQPFNLYTDSKYVTGLFPEIETATLSPRTKIYTELKHLQRLIHKRQEKFYIGHIRGHTGLPGPLAQGNAYADSLTRILTAAGKRTADGSEFEKRTADGSEFESPKKKAKVE

SEQ ID NO: 3169 - protein, 2116 aa, synthetic construct
MPAAKRVKLDGGDKKYSIGLDIGTNSVGWAVITDEYKVPSKKFKVLGNTDRHSIKKNLIGALLFDSGETAEATRLKRTARRRYTRRKNRICYLQEIFSNEMAKVDDSFFHRLEESFLVEEDKKHERHPIFGNIVDEVAYHEKYPTIYHLRKKLVDSTDKADLRLIYLALAHMIKFRGHFLIEGDLNPDNSDVDKLFIQLVQTYNQLFEENPINASGVDAKAILSARLSKSRRLENLIAQLPGEKKNGLFGNLIALSLGLTPNFKSNFDLAEDAKLQLSKDTYDDDLDNLLAQIGDQYADLFLAAKNLSDAILLSDILRVNTEITKAPLSASMIKRYDEHHQDLTLLKALVRQQLPEKYKEIFFDQSKNGYAGYIDGGASQEEFYKFIKPILEKMDGTEELLVKLNREDLLRKQRTFDNGSIPHQIHLGELHAILRRQEDFYPFLKDNREKIEKILTFRIPYYVGPLARGNSRFAWMTRKSEETITPWNFEEVVDKGASAQSFIERMTNFDKNLPNEKVLPKHSLLYEYFTVYNELTKVKYVTEGMRKPAFLSGEQKKAIVDLLFKTNRKVTVKQLKEDYFKKIECFDSVEISGVEDRFNASLGTYHDLLKIIKDKDFLDNEENEDILEDIVLTLTLFEDREMIEERLKTYAHLFDDKVMKQLKRRRYTGWGRLSRKLINGIRDKQSGKTILDFLKSDGFANRNFMQLIHDDSLTFKEDIQKAQVSGQGDSLHEHIANLAGSPAIKKGILQTVKVVDELVKVMGRHKPENIVIEMARENQTTQKGQKNSRERMKRIEEGIKELGSQILKEHPVENTQLQNEKLYLYYLQNGRDMYVDQELDINRLSDYDVDHIVPQSFLKDDSIDNKVLTRSDKARGKSDNVPSEEVVKKMKNYWRQLLNAKLITQRKFDNLTKAERGGLSELDKAGFIKRQLVETRQITKHVAQILDSRMNTKYDENDKLIREVKVITLKSKLVSDFRKDFQFYKVREINNYHHAHDAYLNAVVGTALIKKYPKLESEFVYGDYKVYDVRKMIAKSEQEIGKATAKYFFYSNIMNFFKTEITLANGEIRKRPLIETNGETGEIVWDKGRDFATVRKVLSMPQVNIVKKTEVQTGGFSKESILPKRNSDKLIARKKDWDPKKYGGFDSPTVAYSVLVVAKVEKGKSKKLKSVKELLGITIMERSSFEKNPIDFLEAKGYKEVKKDLIIKLPKYSLFELENGRKRMLASAGELQKGNELALPSKYVNFLYLASHYEKLKGSPEDNEQKQLFVEQHKHYLDEIIEQISEFSKRVILADANLDKVLSAYNKHRDKPIREQAENIIHLFTLTNLGAPAAFKYFDTTIDRKRYTSTKEVLDATLIHQSITGLYETRIDLSQLGGDGGPAPAPAPAPAPGGVQEISDSRPMLHIYLNGRRFLGLLDTGADKTCIAGRDWPANWPIHQTESSLQGLGMACGVARSSQPLRWQHEDKSGIIHPFVIPTLPFTLWGRDIMKDIKVRLMTDSPDDSQDLMIGAIESNLFADQISWKSDQPVWLNQWPLKQEKLQALQQLVTEQLQLGHLEESNSPWNTPVFVIKKKSGKWRLLQDLRAVNATMHDMGALQPGLPSPVAVPKGWEIIIIDLQDCFFNIKLHPEDCKRFAFSVPSPNFKRPYQRFQWKVLPQGMKNSPTLCQKFVDKAILTVRDKYQDSYIVHYMDDILLAHPSRSIVDEILTSMIQALNKHGLVVSTEKIQKYDNLKYLGTHIQGDSVSYQKLQIRTDKLRTLNDFQKLLGNINWIRPFLKLTTGELKPLFEILNGDSNPISTRKLTPEACKALQLMNERLSTARVKRLDLSQPWSLCILKTEYTPTACLWQDGVVEWIHLPHISPKVITPYDIFCTQLIIKGRHRSKELFSKDPDYIVVPYTKVQFDLLLQEKEDWPISLLGFLGEVHFHLPKDPLLTFTLQTAIIFPHMTSTTPLEKGIVIFTDGSANGRSVTYIQGREPIIKENTQNTAQQAEIVAVITAFEEVSQPFNLYTDSKYVTGLFPEIETATLSPRTKIYTELKHLQRLIHKRQEKFYIGHIRGHTGLPGPLAQGNAYADSLTRILTAAGKRTADGSEFEKRTADGSEFESPKKKAKVE

SEQ ID NO: 3170 - protein, 2116 aa, synthetic construct
MPAAKRVKLDGGDKKYSIGLDIGTNSVGWAVITDEYKVPSKKFKVLGNTDRHSIKKNLIGALLFDSGETAEATRLKRTARRRYTRRKNRICYLQEIFSNEMAKVDDSFFHRLEESFLVEEDKKHERHPIFGNIVDEVAYHEKYPTIYHLRKKLVDSTDKADLRLIYLALAHMIKFRGHFLIEGDLNPDNSDVDKLFIQLVQTYNQLFEENPINASGVDAKAILSARLSKSRRLENLIAQLPGEKKNGLFGNLIALSLGLTPNFKSNFDLAEDAKLQLSKDTYDDDLDNLLAQIGDQYADLFLAAKNLSDAILLSDILRVNTEITKAPLSASMIKRYDEHHQDLTLLKALVRQQLPEKYKEIFFDQSKNGYAGYIDGGASQEEFYKFIKPILEKMDGTEELLVKLNREDLLRKQRTFDNGSIPHQIHLGELHAILRRQEDFYPFLKDNREKIEKILTFRIPYYVGPLARGNSRFAWMTRKSEETITPWNFEEVVDKGASAQSFIERMTNFDKNLPNEKVLPKHSLLYEYFTVYNELTKVKYVTEGMRKPAFLSGEQKKAIVDLLFKTNRKVTVKQLKEDYFKKIECFDSVEISGVEDRFNASLGTYHDLLKIIKDKDFLDNEENEDILEDIVLTLTLFEDREMIEERLKTYAHLFDDKVMKQLKRRRYTGWGRLSRKLINGIRDKQSGKTILDFLKSDGFANRNFMQLIHDDSLTFKEDIQKAQVSGQGDSLHEHIANLAGSPAIKKGILQTVKVVDELVKVMGRHKPENIVIEMARENQTTQKGQKNSRERMKRIEEGIKELGSQILKEHPVENTQLQNEKLYLYYLQNGRDMYVDQELDINRLSDYDVDHIVPQSFLKDDSIDNKVLTRSDKARGKSDNVPSEEVVKKMKNYWRQLLNAKLITQRKFDNLTKAERGGLSELDKAGFIKRQLVETRQITKHVAQILDSRMNTKYDENDKLIREVKVITLKSKLVSDFRKDFQFYKVREINNYHHAHDAYLNAVVGTALIKKYPKLESEFVYGDYKVYDVRKMIAKSEQEIGKATAKYFFYSNIMNFFKTEITLANGEIRKRPLIETNGETGEIVWDKGRDFATVRKVLSMPQVNIVKKTEVQTGGFSKESILPKRNSDKLIARKKDWDPKKYGGFDSPTVAYSVLVVAKVEKGKSKKLKSVKELLGITIMERSSFEKNPIDFLEAKGYKEVKKDLIIKLPKYSLFELENGRKRMLASAGELQKGNELALPSKYVNFLYLASHYEKLKGSPEDNEQKQLFVEQHKHYLDEIIEQISEFSKRVILADANLDKVLSAYNKHRDKPIREQAENIIHLFTLTNLGAPAAFKYFDTTIDRKRYTSTKEVLDATLIHQSITGLYETRIDLSQLGGDGGGGSEAAAKPAPGGVQEISDSRPMLHIYLNGRRFLGLLDTGADKTCIAGRDWPANWPIHQTESSLQGLGMACGVARSSQPLRWQHEDKSGIIHPFVIPTLPFTLWGRDIMKDIKVRLMTDSPDDSQDLMIGAIESNLFADQISWKSDQPVWLNQWPLKQEKLQALQQLVTEQLQLGHLEESNSPWNTPVFVIKKKSGKWRLLQDLRAVNATMHDMGALQPGLPSPVAVPKGWEIIIIDLQDCFFNIKLHPEDCKRFAFSVPSPNFKRPYQRFQWKVLPQGMKNSPTLCQKFVDKAILTVRDKYQDSYIVHYMDDILLAHPSRSIVDEILTSMIQALNKHGLVVSTEKIQKYDNLKYLGTHIQGDSVSYQKLQIRTDKLRTLNDFQKLLGNINWIRPFLKLTTGELKPLFEILNGDSNPISTRKLTPEACKALQLMNERLSTARVKRLDLSQPWSLCILKTEYTPTACLWQDGVVEWIHLPHISPKVITPYDIFCTQLIIKGRHRSKELFSKDPDYIVVPYTKVQFDLLLQEKEDWPISLLGFLGEVHFHLPKDPLLTFTLQTAIIFPHMTSTTPLEKGIVIFTDGSANGRSVTYIQGREPIIKENTQNTAQQAEIVAVITAFEEVSQPFNLYTDSKYVTGLFPEIETATLSPRTKIYTELKHLQRLIHKRQEKFYIGHIRGHTGLPGPLAQGNAYADSLTRILTAAGKRTADGSEFEKRTADGSEFESPKKKAKVE

SEQ ID NO: 3171 - protein, 2116 aa, synthetic construct
MPAAKRVKLDGGDKKYSIGLDIGTNSVGWAVITDEYKVPSKKFKVLGNTDRHSIKKNLIGALLFDSGETAEATRLKRTARRRYTRRKNRICYLQEIFSNEMAKVDDSFFHRLEESFLVEEDKKHERHPIFGNIVDEVAYHEKYPTIYHLRKKLVDSTDKADLRLIYLALAHMIKFRGHFLIEGDLNPDNSDVDKLFIQLVQTYNQLFEENPINASGVDAKAILSARLSKSRRLENLIAQLPGEKKNGLFGNLIALSLGLTPNFKSNFDLAEDAKLQLSKDTYDDDLDNLLAQIGDQYADLFLAAKNLSDAILLSDILRVNTEITKAPLSASMIKRYDEHHQDLTLLKALVRQQLPEKYKEIFFDQSKNGYAGYIDGGASQEEFYKFIKPILEKMDGTEELLVKLNREDLLRKQRTFDNGSIPHQIHLGELHAILRRQEDFYPFLKDNREKIEKILTFRIPYYVGPLARGNSRFAWMTRKSEETITPWNFEEVVDKGASAQSFIERMTNFDKNLPNEKVLPKHSLLYEYFTVYNELTKVKYVTEGMRKPAFLSGEQKKAIVDLLFKTNRKVTVKQLKEDYFKKIECFDSVEISGVEDRFNASLGTYHDLLKIIKDKDFLDNEENEDILEDIVLTLTLFEDREMIEERLKTYAHLFDDKVMKQLKRRRYTGWGRLSRKLINGIRDKQSGKTILDFLKSDGFANRNFMQLIHDDSLTFKEDIQKAQVSGQGDSLHEHIANLAGSPAIKKGILQTVKVVDELVKVMGRHKPENIVIEMARENQTTQKGQKNSRERMKRIEEGIKELGSQILKEHPVENTQLQNEKLYLYYLQNGRDMYVDQELDINRLSDYDVDHIVPQSFLKDDSIDNKVLTRSDKARGKSDNVPSEEVVKKMKNYWRQLLNAKLITQRKFDNLTKAERGGLSELDKAGFIKRQLVETRQITKHVAQILDSRMNTKYDENDKLIREVKVITLKSKLVSDFRKDFQFYKVREINNYHHAHDAYLNAVVGTALIKKYPKLESEFVYGDYKVYDVRKMIAKSEQEIGKATAKYFFYSNIMNFFKTEITLANGEIRKRPLIETNGETGEIVWDKGRDFATVRKVLSMPQVNIVKKTEVQTGGFSKESILPKRNSDKLIARKKDWDPKKYGGFDSPTVAYSVLVVAKVEKGKSKKLKSVKELLGITIMERSSFEKNPIDFLEAKGYKEVKKDLIIKLPKYSLFELENGRKRMLASAGELQKGNELALPSKYVNFLYLASHYEKLKGSPEDNEQKQLFVEQHKHYLDEIIEQISEFSKRVILADANLDKVLSAYNKHRDKPIREQAENIIHLFTLTNLGAPAAFKYFDTTIDRKRYTSTKEVLDATLIHQSITGLYETRIDLSQLGGDGGEAAAKGSSGGSGGWVQEISDSRPMLHIYLNGRRFLGLLNTGADKTCIAGRDWPANWPIHQTESSLQGLGMACGVARSSQPLRWQHEDKSGIIHPFVIPTLPFTLWGRDIMKDIKVRLMTDSPDDSQDLMIGAIESNLFADQISWKSDQPVWLNQWPLKQEKLQALQQLVTEQLQLGHLEESNSPWNTPVFVIKKKSGKWRLLQDLRAVNATMHDMGALQPGLPSPVAVPKGWEIIIIDLQDCFFNIKLHPEDCKRFAFSVPSPNFKRPYQRFQWKVLPQGMKNSPTLCQKFVDKAILTVRDKYQDSYIVHYMDDILLAHPSRSIVDEILTSMIQALNKHGLVVSTEKIQKYDNLKYLGTHIQGDSVSYQKLQIRTDKLRTLNDFQKLLGNINWIRPFLKLTTGELKPLFEILNGDSNPISTRKLTPEACKALQLMNERLSTARVKRLDLSQPWSLCILKTEYTPTACLWQDGVVEWIHLPHISPKVITPYDIFCTQLIIKGRHRSKELFSKDPDYIVVPYTKVQFDLLLQEKEDWPISLLGFLGEVHFHLPKDPLLTFTLQTAIIFPHMTSTTPLEKGIVIFTDGSANGRSVTYIQGREPIIKENTQNTAQQAEIVAVITAFEEVSQPFNLYTDSKYVTGLFPEIETATLSPRTKIYTELKHLQRLIHKRQEKFYIGHIRGHTGLPGPLAQGNAYADSLTRILTAGKRTADGSEFEKRTADGSEFESPKKKAKVE

SEQ ID NO: 3172 - protein, 2135 aa, synthetic construct
MPAAKRVKLDGGDKKYSIGLDIGTNSVGWAVITDEYKVPSKKFKVLGNTDRHSIKKNLIGALLFDSGETAEATRLKRTARRRYTRRKNRICYLQEIFSNEMAKVDDSFFHRLEESFLVEEDKKHERHPIFGNIVDEVAYHEKYPTIYHLRKKLVDSTDKADLRLIYLALAHMIKFRGHFLIEGDLNPDNSDVDKLFIQLVQTYNQLFEENPINASGVDAKAILSARLSKSRRLENLIAQLPGEKKNGLFGNLIALSLGLTPNFKSNFDLAEDAKLQLSKDTYDDDLDNLLAQIGDQYADLFLAAKNLSDAILLSDILRVNTEITKAPLSASMIKRYDEHHQDLTLLKALVRQQLPEKYKEIFFDQSKNGYAGYIDGGASQEEFYKFIKPILEKMDGTEELLVKLNREDLLRKQRTFDNGSIPHQIHLGELHAILRRQEDFYPFLKDNREKIEKILTFRIPYYVGPLARGNSRFAWMTRKSEETITPWNFEEVVDKGASAQSFIERMTNFDKNLPNEKVLPKHSLLYEYFTVYNELTKVKYVTEGMRKPAFLSGEQKKAIVDLLFKTNRKVTVKQLKEDYFKKIECFDSVEISGVEDRFNASLGTYHDLLKIIKDKDFLDNEENEDILEDIVLTLTLFEDREMIEERLKTYAHLFDDKVMKQLKRRRYTGWGRLSRKLINGIRDKQSGKTILDFLKSDGFANRNFMQLIHDDSLTFKEDIQKAQVSGQGDSLHEHIANLAGSPAIKKGILQTVKVVDELVKVMGRHKPENIVIEMARENQTTQKGQKNSRERMKRIEEGIKELGSQILKEHPVENTQLQNEKLYLYYLQNGRDMYVDQELDINRLSDYDVDHIVPQSFLKDDSIDNKVLTRSDKARGKSDNVPSEEVVKKMKNYWRQLLNAKLITQRKFDNLTKAERGGLSELDKAGFIKRQLVETRQITKHVAQILDSRMNTKYDENDKLIREVKVITLKSKLVSDFRKDFQFYKVREINNYHHAHDAYLNAVVGTALIKKYPKLESEFVYGDYKVYDVRKMIAKSEQEIGKATAKYFFYSNIMNFFKTEITLANGEIRKRPLIETNGETGEIVWDKGRDFATVRKVLSMPQVNIVKKTEVQTGGFSKESILPKRNSDKLIARKKDWDPKKYGGFDSPTVAYSVLVVAKVEKGKSKKLKSVKELLGITIMERSSFEKNPIDFLEAKGYKEVKKDLIIKLPKYSLFELENGRKRMLASAGELQKGNELALPSKYVNFLYLASHYEKLKGSPEDNEQKQLFVEQHKHYLDEIIEQISEFSKRVILADANLDKVLSAYNKHRDKPIREQAENIIHLFTLTNLGAPAAFKYFDTTIDRKRYTSTKEVLDATLIHQSITGLYETRIDLSQLGGDGGEAAAKEAAAKEAAAKEAAAKEAAAKEAAAKGGWVQEISDSRPMLHIYLNGRRFLGLLNTGADKTCIAGRDWPANWPIHQTESSLQGLGMACGVARSSQPLRWQHEDKSGIIHPFVIPTLPFTLWGRDIMKDIKVRLMTDSPDDSQDLMIGAIESNLFADQISWKSDQPVWLNQWPLKQEKLQALQQLVTEQLQLGHLEESNSPWNTPVFVIKKKSGKWRLLQDLRAVNATMHDMGALQPGLPSPVAVPKGWEIIIIDLQDCFFNIKLHPEDCKRFAFSVPSPNFKRPYQRFQWKVLPQGMKNSPTLCQKFVDKAILTVRDKYQDSYIVHYMDDILLAHPSRSIVDEILTSMIQALNKHGLVVSTEKIQKYDNLKYLGTHIQGDSVSYQKLQIRTDKLRTLNDFQKLLGNINWIRPFLKLTTGELKPLFEILNGDSNPISTRKLTPEACKALQLMNERLSTARVKRLDLSQPWSLCILKTEYTPTACLWQDGVVEWIHLPHISPKVITPYDIFCTQLIIKGRHRSKELFSKDPDYIVVPYTKVQFDLLLQEKEDWPISLLGFLGEVHFHLPKDPLLTFTLQTAIIFPHMTSTTPLEKGIVIFTDGSANGRSVTYIQGREPIIKENTQNTAQQAEIVAVITAFEEVSQPFNLYTDSKYVTGLFPEIETATLSPRTKIYTELKHLQRLIHKRQEKFYIGHIRGHTGLPGPLAQGNAYADSLTRILTAGKRTADGSEFEKRTADGSEFESPKKKAKVE

SEQ ID NO: 3173 - protein, 2135 aa, synthetic construct
MPAAKRVKLDGGDKKYSIGLDIGTNSVGWAVITDEYKVPSKKFKVLGNTDRHSIKKNLIGALLFDSGETAEATRLKRTARRRYTRRKNRICYLQEIFSNEMAKVDDSFFHRLEESFLVEEDKKHERHPIFGNIVDEVAYHEKYPTIYHLRKKLVDSTDKADLRLIYLALAHMIKFRGHFLIEGDLNPDNSDVDKLFIQLVQTYNQLFEENPINASGVDAKAILSARLSKSRRLENLIAQLPGEKKNGLFGNLIALSLGLTPNFKSNFDLAEDAKLQLSKDTYDDDLDNLLAQIGDQYADLFLAAKNLSDAILLSDILRVNTEITKAPLSASMIKRYDEHHQDLTLLKALVRQQLPEKYKEIFFDQSKNGYAGYIDGGASQEEFYKFIKPILEKMDGTEELLVKLNREDLLRKQRTFDNGSIPHQIHLGELHAILRRQEDFYPFLKDNREKIEKILTFRIPYYVGPLARGNSRFAWMTRKSEETITPWNFEEVVDKGASAQSFIERMTNFDKNLPNEKVLPKHSLLYEYFTVYNELTKVKYVTEGMRKPAFLSGEQKKAIVDLLFKTNRKVTVKQLKEDYFKKIECFDSVEISGVEDRFNASLGTYHDLLKIIKDKDFLDNEENEDILEDIVLTLTLFEDREMIEERLKTYAHLFDDKVMKQLKRRRYTGWGRLSRKLINGIRDKQSGKTILDFLKSDGFANRNFMQLIHDDSLTFKEDIQKAQVSGQGDSLHEHIANLAGSPAIKKGILQTVKVVDELVKVMGRHKPENIVIEMARENQTTQKGQKNSRERMKRIEEGIKELGSQILKEHPVENTQLQNEKLYLYYLQNGRDMYVDQELDINRLSDYDVDHIVPQSFLKDDSIDNKVLTRSDKARGKSDNVPSEEVVKKMKNYWRQLLNAKLITQRKFDNLTKAERGGLSELDKAGFIKRQLVETRQITKHVAQILDSRMNTKYDENDKLIREVKVITLKSKLVSDFRKDFQFYKVREINNYHHAHDAYLNAVVGTALIKKYPKLESEFVYGDYKVYDVRKMIAKSEQEIGKATAKYFFYSNIMNFFKTEITLANGEIRKRPLIETNGETGEIVWDKGRDFATVRKVLSMPQVNIVKKTEVQTGGFSKESILPKRNSDKLIARKKDWDPKKYGGFDSPTVAYSVLVVAKVEKGKSKKLKSVKELLGITIMERSSFEKNPIDFLEAKGYKEVKKDLIIKLPKYSLFELENGRKRMLASAGELQKGNELALPSKYVNFLYLASHYEKLKGSPEDNEQKQLFVEQHKHYLDEIIEQISEFSKRVILADANLDKVLSAYNKHRDKPIREQAENIIHLFTLTNLGAPAAFKYFDTTIDRKRYTSTKEVLDATLIHQSITGLYETRIDLSQLGGDGGGGGGSGGGGSGGGGSGGGGSGGGGSGGGGSGGWVQEISDSRPMLHIYLNGRRFLGLLNTGADKTCIAGRDWPANWPIHQTESSLQGLGMACGVARSSQPLRWQHEDKSGIIHPFVIPTLPFTLWGRDIMKDIKVRLMTDSPDDSQDLMIGAIESNLFADQISWKSDQPVWLNQWPLKQEKLQALQQLVTEQLQLGHLEESNSPWNTPVFVIKKKSGKWRLLQDLRAVNATMHDMGALQPGLPSPVAVPKGWEIIIIDLQDCFFNIKLHPEDCKRFAFSVPSPNFKRPYQRFQWKVLPQGMKNSPTLCQKFVDKAILTVRDKYQDSYIVHYMDDILLAHPSRSIVDEILTSMIQALNKHGLVVSTEKIQKYDNLKYLGTHIQGDSVSYQKLQIRTDKLRTLNDFQKLLGNINWIRPFLKLTTGELKPLFEILNGDSNPISTRKLTPEACKALQLMNERLSTARVKRLDLSQPWSLCILKTEYTPTACLWQDGVVEWIHLPHISPKVITPYDIFCTQLIIKGRHRSKELFSKDPDYIVVPYTKVQFDLLLQEKEDWPISLLGFLGEVHFHLPKDPLLTFTLQTAIIFPHMTSTTPLEKGIVIFTDGSANGRSVTYIQGREPIIKENTQNTAQQAEIVAVITAFEEVSQPFNLYTDSKYVTGLFPEIETATLSPRTKIYTELKHLQRLIHKRQEKFYIGHIRGHTGLPGPLAQGNAYADSLTRILTAGKRTADGSEFEKRTADGSEFESPKKKAKVE

SEQ ID NO: 3174 - protein, 2130 aa, synthetic construct
MPAAKRVKLDGGDKKYSIGLDIGTNSVGWAVITDEYKVPSKKFKVLGNTDRHSIKKNLIGALLFDSGETAEATRLKRTARRRYTRRKNRICYLQEIFSNEMAKVDDSFFHRLEESFLVEEDKKHERHPIFGNIVDEVAYHEKYPTIYHLRKKLVDSTDKADLRLIYLALAHMIKFRGHFLIEGDLNPDNSDVDKLFIQLVQTYNQLFEENPINASGVDAKAILSARLSKSRRLENLIAQLPGEKKNGLFGNLIALSLGLTPNFKSNFDLAEDAKLQLSKDTYDDDLDNLLAQIGDQYADLFLAAKNLSDAILLSDILRVNTEITKAPLSASMIKRYDEHHQDLTLLKALVRQQLPEKYKEIFFDQSKNGYAGYIDGGASQEEFYKFIKPILEKMDGTEELLVKLNREDLLRKQRTFDNGSIPHQIHLGELHAILRRQEDFYPFLKDNREKIEKILTFRIPYYVGPLARGNSRFAWMTRKSEETITPWNFEEVVDKGASAQSFIERMTNFDKNLPNEKVLPKHSLLYEYFTVYNELTKVKYVTEGMRKPAFLSGEQKKAIVDLLFKTNRKVTVKQLKEDYFKKIECFDSVEISGVEDRFNASLGTYHDLLKIIKDKDFLDNEENEDILEDIVLTLTLFEDREMIEERLKTYAHLFDDKVMKQLKRRRYTGWGRLSRKLINGIRDKQSGKTILDFLKSDGFANRNFMQLIHDDSLTFKEDIQKAQVSGQGDSLHEHIANLAGSPAIKKGILQTVKVVDELVKVMGRHKPENIVIEMARENQTTQKGQKNSRERMKRIEEGIKELGSQILKEHPVENTQLQNEKLYLYYLQNGRDMYVDQELDINRLSDYDVDHIVPQSFLKDDSIDNKVLTRSDKARGKSDNVPSEEVVKKMKNYWRQLLNAKLITQRKFDNLTKAERGGLSELDKAGFIKRQLVETRQITKHVAQILDSRMNTKYDENDKLIREVKVITLKSKLVSDFRKDFQFYKVREINNYHHAHDAYLNAVVGTALIKKYPKLESEFVYGDYKVYDVRKMIAKSEQEIGKATAKYFFYSNIMNFFKTEITLANGEIRKRPLIETNGETGEIVWDKGRDFATVRKVLSMPQVNIVKKTEVQTGGFSKESILPKRNSDKLIARKKDWDPKKYGGFDSPTVAYSVLVVAKVEKGKSKKLKSVKELLGITIMERSSFEKNPIDFLEAKGYKEVKKDLIIKLPKYSLFELENGRKRMLASAGELQKGNELALPSKYVNFLYLASHYEKLKGSPEDNEQKQLFVEQHKHYLDEIIEQISEFSKRVILADANLDKVLSAYNKHRDKPIREQAENIIHLFTLTNLGAPAAFKYFDTTIDRKRYTSTKEVLDATLIHQSITGLYETRIDLSQLGGDGGEAAAKEAAAKEAAAKEAAAKEAAAKGGWVQEISDSRPMLHIYLNGRRFLGLLNTGADKTCIAGRDWPANWPIHQTESSLQGLGMACGVARSSQPLRWQHEDKSGIIHPFVIPTLPFTLWGRDIMKDIKVRLMTDSPDDSQDLMIGAIESNLFADQISWKSDQPVWLNQWPLKQEKLQALQQLVTEQLQLGHLEESNSPWNTPVFVIKKKSGKWRLLQDLRAVNATMHDMGALQPGLPSPVAVPKGWEIIIIDLQDCFFNIKLHPEDCKRFAFSVPSPNFKRPYQRFQWKVLPQGMKNSPTLCQKFVDKAILTVRDKYQDSYIVHYMDDILLAHPSRSIVDEILTSMIQALNKHGLVVSTEKIQKYDNLKYLGTHIQGDSVSYQKLQIRTDKLRTLNDFQKLLGNINWIRPFLKLTTGELKPLFEILNGDSNPISTRKLTPEACKALQLMNERLSTARVKRLDLSQPWSLCILKTEYTPTACLWQDGVVEWIHLPHISPKVITPYDIFCTQLIIKGRHRSKELFSKDPDYIVVPYTKVQFDLLLQEKEDWPISLLGFLGEVHFHLPKDPLLTFTLQTAIIFPHMTSTTPLEKGIVIFTDGSANGRSVTYIQGREPIIKENTQNTAQQAEIVAVITAFEEVSQPFNLYTDSKYVTGLFPEIETATLSPRTKIYTELKHLQRLIHKRQEKFYIGHIRGHTGLPGPLAQGNAYADSLTRILTAGKRTADGSEFEKRTADGSEFESPKKKAKVE

SEQ ID NO: 3175 - protein, 2116 aa, synthetic construct
MPAAKRVKLDGGDKKYSIGLDIGTNSVGWAVITDEYKVPSKKFKVLGNTDRHSIKKNLIGALLFDSGETAEATRLKRTARRRYTRRKNRICYLQEIFSNEMAKVDDSFFHRLEESFLVEEDKKHERHPIFGNIVDEVAYHEKYPTIYHLRKKLVDSTDKADLRLIYLALAHMIKFRGHFLIEGDLNPDNSDVDKLFIQLVQTYNQLFEENPINASGVDAKAILSARLSKSRRLENLIAQLPGEKKNGLFGNLIALSLGLTPNFKSNFDLAEDAKLQLSKDTYDDDLDNLLAQIGDQYADLFLAAKNLSDAILLSDILRVNTEITKAPLSASMIKRYDEHHQDLTLLKALVRQQLPEKYKEIFFDQSKNGYAGYIDGGASQEEFYKFIKPILEKMDGTEELLVKLNREDLLRKQRTFDNGSIPHQIHLGELHAILRRQEDFYPFLKDNREKIEKILTFRIPYYVGPLARGNSRFAWMTRKSEETITPWNFEEVVDKGASAQSFIERMTNFDKNLPNEKVLPKHSLLYEYFTVYNELTKVKYVTEGMRKPAFLSGEQKKAIVDLLFKTNRKVTVKQLKEDYFKKIECFDSVEISGVEDRFNASLGTYHDLLKIIKDKDFLDNEENEDILEDIVLTLTLFEDREMIEERLKTYAHLFDDKVMKQLKRRRYTGWGRLSRKLINGIRDKQSGKTILDFLKSDGFANRNFMQLIHDDSLTFKEDIQKAQVSGQGDSLHEHIANLAGSPAIKKGILQTVKVVDELVKVMGRHKPENIVIEMARENQTTQKGQKNSRERMKRIEEGIKELGSQILKEHPVENTQLQNEKLYLYYLQNGRDMYVDQELDINRLSDYDVDHIVPQSFLKDDSIDNKVLTRSDKARGKSDNVPSEEVVKKMKNYWRQLLNAKLITQRKFDNLTKAERGGLSELDKAGFIKRQLVETRQITKHVAQILDSRMNTKYDENDKLIREVKVITLKSKLVSDFRKDFQFYKVREINNYHHAHDAYLNAVVGTALIKKYPKLESEFVYGDYKVYDVRKMIAKSEQEIGKATAKYFFYSNIMNFFKTEITLANGEIRKRPLIETNGETGEIVWDKGRDFATVRKVLSMPQVNIVKKTEVQTGGFSKESILPKRNSDKLIARKKDWDPKKYGGFDSPTVAYSVLVVAKVEKGKSKKLKSVKELLGITIMERSSFEKNPIDFLEAKGYKEVKKDLIIKLPKYSLFELENGRKRMLASAGELQKGNELALPSKYVNFLYLASHYEKLKGSPEDNEQKQLFVEQHKHYLDEIIEQISEFSKRVILADANLDKVLSAYNKHRDKPIREQAENIIHLFTLTNLGAPAAFKYFDTTIDRKRYTSTKEVLDATLIHQSITGLYETRIDLSQLGGDGGPAPAPAPAPAPGGWVQEISDSRPMLHIYLNGRRFLGLLNTGADKTCIAGRDWPANWPIHQTESSLQGLGMACGVARSSQPLRWQHEDKSGIIHPFVIPTLPFTLWGRDIMKDIKVRLMTDSPDDSQDLMIGAIESNLFADQISWKSDQPVWLNQWPLKQEKLQALQQLVTEQLQLGHLEESNSPWNTPVFVIKKKSGKWRLLQDLRAVNATMHDMGALQPGLPSPVAVPKGWEIIIIDLQDCFFNIKLHPEDCKRFAFSVPSPNFKRPYQRFQWKVLPQGMKNSPTLCQKFVDKAILTVRDKYQDSYIVHYMDDILLAHPSRSIVDEILTSMIQALNKHGLVVSTEKIQKYDNLKYLGTHIQGDSVSYQKLQIRTDKLRTLNDFQKLLGNINWIRPFLKLTTGELKPLFEILNGDSNPISTRKLTPEACKALQLMNERLSTARVKRLDLSQPWSLCILKTEYTPTACLWQDGVVEWIHLPHISPKVITPYDIFCTQLIIKGRHRSKELFSKDPDYIVVPYTKVQFDLLLQEKEDWPISLLGFLGEVHFHLPKDPLLTFTLQTAIIFPHMTSTTPLEKGIVIFTDGSANGRSVTYIQGREPIIKENTQNTAQQAEIVAVITAFEEVSQPFNLYTDSKYVTGLFPEIETATLSPRTKIYTELKHLQRLIHKRQEKFYIGHIRGHTGLPGPLAQGNAYADSLTRILTAGKRTADGSEFEKRTADGSEFESPKKKAKVE

SEQ ID NO: 3176 - protein, 2114 aa, synthetic construct
MPAAKRVKLDGGDKKYSIGLDIGTNSVGWAVITDEYKVPSKKFKVLGNTDRHSIKKNLIGALLFDSGETAEATRLKRTARRRYTRRKNRICYLQEIFSNEMAKVDDSFFHRLEESFLVEEDKKHERHPIFGNIVDEVAYHEKYPTIYHLRKKLVDSTDKADLRLIYLALAHMIKFRGHFLIEGDLNPDNSDVDKLFIQLVQTYNQLFEENPINASGVDAKAILSARLSKSRRLENLIAQLPGEKKNGLFGNLIALSLGLTPNFKSNFDLAEDAKLQLSKDTYDDDLDNLLAQIGDQYADLFLAAKNLSDAILLSDILRVNTEITKAPLSASMIKRYDEHHQDLTLLKALVRQQLPEKYKEIFFDQSKNGYAGYIDGGASQEEFYKFIKPILEKMDGTEELLVKLNREDLLRKQRTFDNGSIPHQIHLGELHAILRRQEDFYPFLKDNREKIEKILTFRIPYYVGPLARGNSRFAWMTRKSEETITPWNFEEVVDKGASAQSFIERMTNFDKNLPNEKVLPKHSLLYEYFTVYNELTKVKYVTEGMRKPAFLSGEQKKAIVDLLFKTNRKVTVKQLKEDYFKKIECFDSVEISGVEDRFNASLGTYHDLLKIIKDKDFLDNEENEDILEDIVLTLTLFEDREMIEERLKTYAHLFDDKVMKQLKRRRYTGWGRLSRKLINGIRDKQSGKTILDFLKSDGFANRNFMQLIHDDSLTFKEDIQKAQVSGQGDSLHEHIANLAGSPAIKKGILQTVKVVDELVKVMGRHKPENIVIEMARENQTTQKGQKNSRERMKRIEEGIKELGSQILKEHPVENTQLQNEKLYLYYLQNGRDMYVDQELDINRLSDYDVDHIVPQSFLKDDSIDNKVLTRSDKARGKSDNVPSEEVVKKMKNYWRQLLNAKLITQRKFDNLTKAERGGLSELDKAGFIKRQLVETRQITKHVAQILDSRMNTKYDENDKLIREVKVITLKSKLVSDFRKDFQFYKVREINNYHHAHDAYLNAVVGTALIKKYPKLESEFVYGDYKVYDVRKMIAKSEQEIGKATAKYFFYSNIMNFFKTEITLANGEIRKRPLIETNGETGEIVWDKGRDFATVRKVLSMPQVNIVKKTEVQTGGFSKESILPKRNSDKLIARKKDWDPKKYGGFDSPTVAYSVLVVAKVEKGKSKKLKSVKELLGITIMERSSFEKNPIDFLEAKGYKEVKKDLIIKLPKYSLFELENGRKRMLASAGELQKGNELALPSKYVNFLYLASHYEKLKGSPEDNEQKQLFVEQHKHYLDEIIEQISEFSKRVILADANLDKVLSAYNKHRDKPIREQAENIIHLFTLTNLGAPAAFKYFDTTIDRKRYTSTKEVLDATLIHQSITGLYETRIDLSQLGGDGGPAPGSSGGSGGWVQEISDSRPMLHIYLNGRRFLGLLNTGADKTCIAGRDWPANWPIHQTESSLQGLGMACGVARSSQPLRWQHEDKSGIIHPFVIPTLPFTLWGRDIMKDIKVRLMTDSPDDSQDLMIGAIESNLFADQISWKSDQPVWLNQWPLKQEKLQALQQLVTEQLQLGHLEESNSPWNTPVFVIKKKSGKWRLLQDLRAVNATMHDMGALQPGLPSPVAVPKGWEIIIIDLQDCFFNIKLHPEDCKRFAFSVPSPNFKRPYQRFQWKVLPQGMKNSPTLCQKFVDKAILTVRDKYQDSYIVHYMDDILLAHPSRSIVDEILTSMIQALNKHGLVVSTEKIQKYDNLKYLGTHIQGDSVSYQKLQIRTDKLRTLNDFQKLLGNINWIRPFLKLTTGELKPLFEILNGDSNPISTRKLTPEACKALQLMNERLSTARVKRLDLSQPWSLCILKTEYTPTACLWQDGVVEWIHLPHISPKVITPYDIFCTQLIIKGRHRSKELFSKDPDYIVVPYTKVQFDLLLQEKEDWPISLLGFLGEVHFHLPKDPLLTFTLQTAIIFPHMTSTTPLEKGIVIFTDGSANGRSVTYIQGREPIIKENTQNTAQQAEIVAVITAFEEVSQPFNLYTDSKYVTGLFPEIETATLSPRTKIYTELKHLQRLIHKRQEKFYIGHIRGHTGLPGPLAQGNAYADSLTRILTAGKRTADGSEFEKRTADGSEFESPKKKAKVE

SEQ ID NO: 3177 - protein, 2113 aa, synthetic construct
MPAAKRVKLDGGDKKYSIGLDIGTNSVGWAVITDEYKVPSKKFKVLGNTDRHSIKKNLIGALLFDSGETAEATRLKRTARRRYTRRKNRICYLQEIFSNEMAKVDDSFFHRLEESFLVEEDKKHERHPIFGNIVDEVAYHEKYPTIYHLRKKLVDSTDKADLRLIYLALAHMIKFRGHFLIEGDLNPDNSDVDKLFIQLVQTYNQLFEENPINASGVDAKAILSARLSKSRRLENLIAQLPGEKKNGLFGNLIALSLGLTPNFKSNFDLAEDAKLQLSKDTYDDDLDNLLAQIGDQYADLFLAAKNLSDAILLSDILRVNTEITKAPLSASMIKRYDEHHQDLTLLKALVRQQLPEKYKEIFFDQSKNGYAGYIDGGASQEEFYKFIKPILEKMDGTEELLVKLNREDLLRKQRTFDNGSIPHQIHLGELHAILRRQEDFYPFLKDNREKIEKILTFRIPYYVGPLARGNSRFAWMTRKSEETITPWNFEEVVDKGASAQSFIERMTNFDKNLPNEKVLPKHSLLYEYFTVYNELTKVKYVTEGMRKPAFLSGEQKKAIVDLLFKTNRKVTVKQLKEDYFKKIECFDSVEISGVEDRFNASLGTYHDLLKIIKDKDFLDNEENEDILEDIVLTLTLFEDREMIEERLKTYAHLFDDKVMKQLKRRRYTGWGRLSRKLINGIRDKQSGKTILDFLKSDGFANRNFMQLIHDDSLTFKEDIQKAQVSGQGDSLHEHIANLAGSPAIKKGILQTVKVVDELVKVMGRHKPENIVIEMARENQTTQKGQKNSRERMKRIEEGIKELGSQILKEHPVENTQLQNEKLYLYYLQNGRDMYVDQELDINRLSDYDVDHIVPQSFLKDDSIDNKVLTRSDKARGKSDNVPSEEVVKKMKNYWRQLLNAKLITQRKFDNLTKAERGGLSELDKAGFIKRQLVETRQITKHVAQILDSRMNTKYDENDKLIREVKVITLKSKLVSDFRKDFQFYKVREINNYHHAHDAYLNAVVGTALIKKYPKLESEFVYGDYKVYDVRKMIAKSEQEIGKATAKYFFYSNIMNFFKTEITLANGEIRKRPLIETNGETGEIVWDKGRDFATVRKVLSMPQVNIVKKTEVQTGGFSKESILPKRNSDKLIARKKDWDPKKYGGFDSPTVAYSVLVVAKVEKGKSKKLKSVKELLGITIMERSSFEKNPIDFLEAKGYKEVKKDLIIKLPKYSLFELENGRKRMLASAGELQKGNELALPSKYVNFLYLASHYEKLKGSPEDNEQKQLFVEQHKHYLDEIIEQISEFSKRVILADANLDKVLSAYNKHRDKPIREQAENIIHLFTLTNLGAPAAFKYFDTTIDRKRYTSTKEVLDATLIHQSITGLYETRIDLSQLGGDGGGGGEAAAKGGWVQEISDSRPMLHIYLNGRRFLGLLNTGADKTCIAGRDWPANWPIHQTESSLQGLGMACGVARSSQPLRWQHEDKSGIIHPFVIPTLPFTLWGRDIMKDIKVRLMTDSPDDSQDLMIGAIESNLFADQISWKSDQPVWLNQWPLKQEKLQALQQLVTEQLQLGHLEESNSPWNTPVFVIKKKSGKWRLLQDLRAVNATMHDMGALQPGLPSPVAVPKGWEIIIIDLQDCFFNIKLHPEDCKRFAFSVPSPNFKRPYQRFQWKVLPQGMKNSPTLCQKFVDKAILTVRDKYQDSYIVHYMDDILLAHPSRSIVDEILTSMIQALNKHGLVVSTEKIQKYDNLKYLGTHIQGDSVSYQKLQIRTDKLRTLNDFQKLLGNINWIRPFLKLTTGELKPLFEILNGDSNPISTRKLTPEACKALQLMNERLSTARVKRLDLSQPWSLCILKTEYTPTACLWQDGVVEWIHLPHISPKVITPYDIFCTQLIIKGRHRSKELFSKDPDYIVVPYTKVQFDLLLQEKEDWPISLLGFLGEVHFHLPKDPLLTFTLQTAIIFPHMTSTTPLEKGIVIFTDGSANGRSVTYIQGREPIIKENTQNTAQQAEIVAVITAFEEVSQPFNLYTDSKYVTGLFPEIETATLSPRTKIYTELKHLQRLIHKRQEKFYIGHIRGHTGLPGPLAQGNAYADSLTRILTAGKRTADGSEFEKRTADGSEFESPKKKAKVE

SEQ ID NO: 3178 - protein, 2116 aa, synthetic construct
MPAAKRVKLDGGDKKYSIGLDIGTNSVGWAVITDEYKVPSKKFKVLGNTDRHSIKKNLIGALLFDSGETAEATRLKRTARRRYTRRKNRICYLQEIFSNEMAKVDDSFFHRLEESFLVEEDKKHERHPIFGNIVDEVAYHEKYPTIYHLRKKLVDSTDKADLRLIYLALAHMIKFRGHFLIEGDLNPDNSDVDKLFIQLVQTYNQLFEENPINASGVDAKAILSARLSKSRRLENLIAQLPGEKKNGLFGNLIALSLGLTPNFKSNFDLAEDAKLQLSKDTYDDDLDNLLAQIGDQYADLFLAAKNLSDAILLSDILRVNTEITKAPLSASMIKRYDEHHQDLTLLKALVRQQLPEKYKEIFFDQSKNGYAGYIDGGASQEEFYKFIKPILEKMDGTEELLVKLNREDLLRKQRTFDNGSIPHQIHLGELHAILRRQEDFYPFLKDNREKIEKILTFRIPYYVGPLARGNSRFAWMTRKSEETITPWNFEEVVDKGASAQSFIERMTNFDKNLPNEKVLPKHSLLYEYFTVYNELTKVKYVTEGMRKPAFLSGEQKKAIVDLLFKTNRKVTVKQLKEDYFKKIECFDSVEISGVEDRFNASLGTYHDLLKIIKDKDFLDNEENEDILEDIVLTLTLFEDREMIEERLKTYAHLFDDKVMKQLKRRRYTGWGRLSRKLINGIRDKQSGKTILDFLKSDGFANRNFMQLIHDDSLTFKEDIQKAQVSGQGDSLHEHIANLAGSPAIKKGILQTVKVVDELVKVMGRHKPENIVIEMARENQTTQKGQKNSRERMKRIEEGIKELGSQILKEHPVENTQLQNEKLYLYYLQNGRDMYVDQELDINRLSDYDVDHIVPQSFLKDDSIDNKVLTRSDKARGKSDNVPSEEVVKKMKNYWRQLLNAKLITQRKFDNLTKAERGGLSELDKAGFIKRQLVETRQITKHVAQILDSRMNTKYDENDKLIREVKVITLKSKLVSDFRKDFQFYKVREINNYHHAHDAYLNAVVGTALIKKYPKLESEFVYGDYKVYDVRKMIAKSEQEIGKATAKYFFYSNIMNFFKTEITLANGEIRKRPLIETNGETGEIVWDKGRDFATVRKVLSMPQVNIVKKTEVQTGGFSKESILPKRNSDKLIARKKDWDPKKYGGFDSPTVAYSVLVVAKVEKGKSKKLKSVKELLGITIMERSSFEKNPIDFLEAKGYKEVKKDLIIKLPKYSLFELENGRKRMLASAGELQKGNELALPSKYVNFLYLASHYEKLKGSPEDNEQKQLFVEQHKHYLDEIIEQISEFSKRVILADANLDKVLSAYNKHRDKPIREQAENIIHLFTLTNLGAPAAFKYFDTTIDRKRYTSTKEVLDATLIHQSITGLYETRIDLSQLGGDGGGGSPAPEAAAKGGWVQEISDSRPMLHIYLNGRRFLGLLNTGADKTCIAGRDWPANWPIHQTESSLQGLGMACGVARSSQPLRWQHEDKSGIIHPFVIPTLPFTLWGRDIMKDIKVRLMTDSPDDSQDLMIGAIESNLFADQISWKSDQPVWLNQWPLKQEKLQALQQLVTEQLQLGHLEESNSPWNTPVFVIKKKSGKWRLLQDLRAVNATMHDMGALQPGLPSPVAVPKGWEIIIIDLQDCFFNIKLHPEDCKRFAFSVPSPNFKRPYQRFQWKVLPQGMKNSPTLCQKFVDKAILTVRDKYQDSYIVHYMDDILLAHPSRSIVDEILTSMIQALNKHGLVVSTEKIQKYDNLKYLGTHIQGDSVSYQKLQIRTDKLRTLNDFQKLLGNINWIRPFLKLTTGELKPLFEILNGDSNPISTRKLTPEACKALQLMNERLSTARVKRLDLSQPWSLCILKTEYTPTACLWQDGVVEWIHLPHISPKVITPYDIFCTQLIIKGRHRSKELFSKDPDYIVVPYTKVQFDLLLQEKEDWPISLLGFLGEVHFHLPKDPLLTFTLQTAIIFPHMTSTTPLEKGIVIFTDGSANGRSVTYIQGREPIIKENTQNTAQQAEIVAVITAFEEVSQPFNLYTDSKYVTGLFPEIETATLSPRTKIYTELKHLQRLIHKRQEKFYIGHIRGHTGLPGPLAQGNAYADSLTRILTAGKRTADGSEFEKRTADGSEFESPKKKAKVE

SEQ ID NO: 3179 - protein, 2114 aa, synthetic construct
MPAAKRVKLDGGDKKYSIGLDIGTNSVGWAVITDEYKVPSKKFKVLGNTDRHSIKKNLIGALLFDSGETAEATRLKRTARRRYTRRKNRICYLQEIFSNEMAKVDDSFFHRLEESFLVEEDKKHERHPIFGNIVDEVAYHEKYPTIYHLRKKLVDSTDKADLRLIYLALAHMIKFRGHFLIEGDLNPDNSDVDKLFIQLVQTYNQLFEENPINASGVDAKAILSARLSKSRRLENLIAQLPGEKKNGLFGNLIALSLGLTPNFKSNFDLAEDAKLQLSKDTYDDDLDNLLAQIGDQYADLFLAAKNLSDAILLSDILRVNTEITKAPLSASMIKRYDEHHQDLTLLKALVRQQLPEKYKEIFFDQSKNGYAGYIDGGASQEEFYKFIKPILEKMDGTEELLVKLNREDLLRKQRTFDNGSIPHQIHLGELHAILRRQEDFYPFLKDNREKIEKILTFRIPYYVGPLARGNSRFAWMTRKSEETITPWNFEEVVDKGASAQSFIERMTNFDKNLPNEKVLPKHSLLYEYFTVYNELTKVKYVTEGMRKPAFLSGEQKKAIVDLLFKTNRKVTVKQLKEDYFKKIECFDSVEISGVEDRFNASLGTYHDLLKIIKDKDFLDNEENEDILEDIVLTLTLFEDREMIEERLKTYAHLFDDKVMKQLKRRRYTGWGRLSRKLINGIRDKQSGKTILDFLKSDGFANRNFMQLIHDDSLTFKEDIQKAQVSGQGDSLHEHIANLAGSPAIKKGILQTVKVVDELVKVMGRHKPENIVIEMARENQTTQKGQKNSRERMKRIEEGIKELGSQILKEHPVENTQLQNEKLYLYYLQNGRDMYVDQELDINRLSDYDVDHIVPQSFLKDDSIDNKVLTRSDKARGKSDNVPSEEVVKKMKNYWRQLLNAKLITQRKFDNLTKAERGGLSELDKAGFIKRQLVETRQITKHVAQILDSRMNTKYDENDKLIREVKVITLKSKLVSDFRKDFQFYKVREINNYHHAHDAYLNAVVGTALIKKYPKLESEFVYGDYKVYDVRKMIAKSEQEIGKATAKYFFYSNIMNFFKTEITLANGEIRKRPLIETNGETGEIVWDKGRDFATVRKVLSMPQVNIVKKTEVQTGGFSKESILPKRNSDKLIARKKDWDPKKYGGFDSPTVAYSVLVVAKVEKGKSKKLKSVKELLGITIMERSSFEKNPIDFLEAKGYKEVKKDLIIKLPKYSLFELENGRKRMLASAGELQKGNELALPSKYVNFLYLASHYEKLKGSPEDNEQKQLFVEQHKHYLDEIIEQISEFSKRVILADANLDKVLSAYNKHRDKPIREQAENIIHLFTLTNLGAPAAFKYFDTTIDRKRYTSTKEVLDATLIHQSITGLYETRIDLSQLGGDGGGGSGSSGGGGGWVQEISDSRPMLHIYLNGRRFLGLLNTGADKTCIAGRDWPANWPIHQTESSLQGLGMACGVARSSQPLRWQHEDKSGIIHPFVIPTLPFTLWGRDIMKDIKVRLMTDSPDDSQDLMIGAIESNLFADQISWKSDQPVWLNQWPLKQEKLQALQQLVTEQLQLGHLEESNSPWNTPVFVIKKKSGKWRLLQDLRAVNATMHDMGALQPGLPSPVAVPKGWEIIIIDLQDCFFNIKLHPEDCKRFAFSVPSPNFKRPYQRFQWKVLPQGMKNSPTLCQKFVDKAILTVRDKYQDSYIVHYMDDILLAHPSRSIVDEILTSMIQALNKHGLVVSTEKIQKYDNLKYLGTHIQGDSVSYQKLQIRTDKLRTLNDFQKLLGNINWIRPFLKLTTGELKPLFEILNGDSNPISTRKLTPEACKALQLMNERLSTARVKRLDLSQPWSLCILKTEYTPTACLWQDGVVEWIHLPHISPKVITPYDIFCTQLIIKGRHRSKELFSKDPDYIVVPYTKVQFDLLLQEKEDWPISLLGFLGEVHFHLPKDPLLTFTLQTAIIFPHMTSTTPLEKGIVIFTDGSANGRSVTYIQGREPIIKENTQNTAQQAEIVAVITAFEEVSQPFNLYTDSKYVTGLFPEIETATLSPRTKIYTELKHLQRLIHKRQEKFYIGHIRGHTGLPGPLAQGNAYADSLTRILTAGKRTADGSEFEKRTADGSEFESPKKKAKVE

SEQ ID NO: 3180 - protein, 2114 aa, synthetic construct
MPAAKRVKLDGGDKKYSIGLDIGTNSVGWAVITDEYKVPSKKFKVLGNTDRHSIKKNLIGALLFDSGETAEATRLKRTARRRYTRRKNRICYLQEIFSNEMAKVDDSFFHRLEESFLVEEDKKHERHPIFGNIVDEVAYHEKYPTIYHLRKKLVDSTDKADLRLIYLALAHMIKFRGHFLIEGDLNPDNSDVDKLFIQLVQTYNQLFEENPINASGVDAKAILSARLSKSRRLENLIAQLPGEKKNGLFGNLIALSLGLTPNFKSNFDLAEDAKLQLSKDTYDDDLDNLLAQIGDQYADLFLAAKNLSDAILLSDILRVNTEITKAPLSASMIKRYDEHHQDLTLLKALVRQQLPEKYKEIFFDQSKNGYAGYIDGGASQEEFYKFIKPILEKMDGTEELLVKLNREDLLRKQRTFDNGSIPHQIHLGELHAILRRQEDFYPFLKDNREKIEKILTFRIPYYVGPLARGNSRFAWMTRKSEETITPWNFEEVVDKGASAQSFIERMTNFDKNLPNEKVLPKHSLLYEYFTVYNELTKVKYVTEGMRKPAFLSGEQKKAIVDLLFKTNRKVTVKQLKEDYFKKIECFDSVEISGVEDRFNASLGTYHDLLKIIKDKDFLDNEENEDILEDIVLTLTLFEDREMIEERLKTYAHLFDDKVMKQLKRRRYTGWGRLSRKLINGIRDKQSGKTILDFLKSDGFANRNFMQLIHDDSLTFKEDIQKAQVSGQGDSLHEHIANLAGSPAIKKGILQTVKVVDELVKVMGRHKPENIVIEMARENQTTQKGQKNSRERMKRIEEGIKELGSQILKEHPVENTQLQNEKLYLYYLQNGRDMYVDQELDINRLSDYDVDHIVPQSFLKDDSIDNKVLTRSDKARGKSDNVPSEEVVKKMKNYWRQLLNAKLITQRKFDNLTKAERGGLSELDKAGFIKRQLVETRQITKHVAQILDSRMNTKYDENDKLIREVKVITLKSKLVSDFRKDFQFYKVREINNYHHAHDAYLNAVVGTALIKKYPKLESEFVYGDYKVYDVRKMIAKSEQEIGKATAKYFFYSNIMNFFKTEITLANGEIRKRPLIETNGETGEIVWDKGRDFATVRKVLSMPQVNIVKKTEVQTGGFSKESILPKRNSDKLIARKKDWDPKKYGGFDSPTVAYSVLVVAKVEKGKSKKLKSVKELLGITIMERSSFEKNPIDFLEAKGYKEVKKDLIIKLPKYSLFELENGRKRMLASAGELQKGNELALPSKYVNFLYLASHYEKLKGSPEDNEQKQLFVEQHKHYLDEIIEQISEFSKRVILADANLDKVLSAYNKHRDKPIREQAENIIHLFTLTNLGAPAAFKYFDTTIDRKRYTSTKEVLDATLIHQSITGLYETRIDLSQLGGDGGPAPAPAPAPGGWVQEISDSRPMLHIYLNGRRFLGLLNTGADKTCIAGRDWPANWPIHQTESSLQGLGMACGVARSSQPLRWQHEDKSGIIHPFVIPTLPFTLWGRDIMKDIKVRLMTDSPDDSQDLMIGAIESNLFADQISWKSDQPVWLNQWPLKQEKLQALQQLVTEQLQLGHLEESNSPWNTPVFVIKKKSGKWRLLQDLRAVNATMHDMGALQPGLPSPVAVPKGWEIIIIDLQDCFFNIKLHPEDCKRFAFSVPSPNFKRPYQRFQWKVLPQGMKNSPTLCQKFVDKAILTVRDKYQDSYIVHYMDDILLAHPSRSIVDEILTSMIQALNKHGLVVSTEKIQKYDNLKYLGTHIQGDSVSYQKLQIRTDKLRTLNDFQKLLGNINWIRPFLKLTTGELKPLFEILNGDSNPISTRKLTPEACKALQLMNERLSTARVKRLDLSQPWSLCILKTEYTPTACLWQDGVVEWIHLPHISPKVITPYDIFCTQLIIKGRHRSKELFSKDPDYIVVPYTKVQFDLLLQEKEDWPISLLGFLGEVHFHLPKDPLLTFTLQTAIIFPHMTSTTPLEKGIVIFTDGSANGRSVTYIQGREPIIKENTQNTAQQAEIVAVITAFEEVSQPFNLYTDSKYVTGLFPEIETATLSPRTKIYTELKHLQRLIHKRQEKFYIGHIRGHTGLPGPLAQGNAYADSLTRILTAGKRTADGSEFEKRTADGSEFESPKKKAKVE

SEQ ID NO: 3181 - protein, 2116 aa, synthetic construct
MPAAKRVKLDGGDKKYSIGLDIGTNSVGWAVITDEYKVPSKKFKVLGNTDRHSIKKNLIGALLFDSGETAEATRLKRTARRRYTRRKNRICYLQEIFSNEMAKVDDSFFHRLEESFLVEEDKKHERHPIFGNIVDEVAYHEKYPTIYHLRKKLVDSTDKADLRLIYLALAHMIKFRGHFLIEGDLNPDNSDVDKLFIQLVQTYNQLFEENPINASGVDAKAILSARLSKSRRLENLIAQLPGEKKNGLFGNLIALSLGLTPNFKSNFDLAEDAKLQLSKDTYDDDLDNLLAQIGDQYADLFLAAKNLSDAILLSDILRVNTEITKAPLSASMIKRYDEHHQDLTLLKALVRQQLPEKYKEIFFDQSKNGYAGYIDGGASQEEFYKFIKPILEKMDGTEELLVKLNREDLLRKQRTFDNGSIPHQIHLGELHAILRRQEDFYPFLKDNREKIEKILTFRIPYYVGPLARGNSRFAWMTRKSEETITPWNFEEVVDKGASAQSFIERMTNFDKNLPNEKVLPKHSLLYEYFTVYNELTKVKYVTEGMRKPAFLSGEQKKAIVDLLFKTNRKVTVKQLKEDYFKKIECFDSVEISGVEDRFNASLGTYHDLLKIIKDKDFLDNEENEDILEDIVLTLTLFEDREMIEERLKTYAHLFDDKVMKQLKRRRYTGWGRLSRKLINGIRDKQSGKTILDFLKSDGFANRNFMQLIHDDSLTFKEDIQKAQVSGQGDSLHEHIANLAGSPAIKKGILQTVKVVDELVKVMGRHKPENIVIEMARENQTTQKGQKNSRERMKRIEEGIKELGSQILKEHPVENTQLQNEKLYLYYLQNGRDMYVDQELDINRLSDYDVDHIVPQSFLKDDSIDNKVLTRSDKARGKSDNVPSEEVVKKMKNYWRQLLNAKLITQRKFDNLTKAERGGLSELDKAGFIKRQLVETRQITKHVAQILDSRMNTKYDENDKLIREVKVITLKSKLVSDFRKDFQFYKVREINNYHHAHDAYLNAVVGTALIKKYPKLESEFVYGDYKVYDVRKMIAKSEQEIGKATAKYFFYSNIMNFFKTEITLANGEIRKRPLIETNGETGEIVWDKGRDFATVRKVLSMPQVNIVKKTEVQTGGFSKESILPKRNSDKLIARKKDWDPKKYGGFDSPTVAYSVLVVAKVEKGKSKKLKSVKELLGITIMERSSFEKNPIDFLEAKGYKEVKKDLIIKLPKYSLFELENGRKRMLASAGELQKGNELALPSKYVNFLYLASHYEKLKGSPEDNEQKQLFVEQHKHYLDEIIEQISEFSKRVILADANLDKVLSAYNKHRDKPIREQAENIIHLFTLTNLGAPAAFKYFDTTIDRKRYTSTKEVLDATLIHQSITGLYETRIDLSQLGGDGGGSSGGGEAAAKGGWVQEISDSRPMLHIYLNGRRFLGLLNTGADKTCIAGRDWPANWPIHQTESSLQGLGMACGVARSSQPLRWQHEDKSGIIHPFVIPTLPFTLWGRDIMKDIKVRLMTDSPDDSQDLMIGAIESNLFADQISWKSDQPVWLNQWPLKQEKLQALQQLVTEQLQLGHLEESNSPWNTPVFVIKKKSGKWRLLQDLRAVNATMHDMGALQPGLPSPVAVPKGWEIIIIDLQDCFFNIKLHPEDCKRFAFSVPSPNFKRPYQRFQWKVLPQGMKNSPTLCQKFVDKAILTVRDKYQDSYIVHYMDDILLAHPSRSIVDEILTSMIQALNKHGLVVSTEKIQKYDNLKYLGTHIQGDSVSYQKLQIRTDKLRTLNDFQKLLGNINWIRPFLKLTTGELKPLFEILNGDSNPISTRKLTPEACKALQLMNERLSTARVKRLDLSQPWSLCILKTEYTPTACLWQDGVVEWIHLPHISPKVITPYDIFCTQLIIKGRHRSKELFSKDPDYIVVPYTKVQFDLLLQEKEDWPISLLGFLGEVHFHLPKDPLLTFTLQTAIIFPHMTSTTPLEKGIVIFTDGSANGRSVTYIQGREPIIKENTQNTAQQAEIVAVITAFEEVSQPFNLYTDSKYVTGLFPEIETATLSPRTKIYTELKHLQRLIHKRQEKFYIGHIRGHTGLPGPLAQGNAYADSLTRILTAGKRTADGSEFEKRTADGSEFESPKKKAKVE

SEQ ID NO: 3182 - protein, 2116 aa, synthetic construct
MPAAKRVKLDGGDKKYSIGLDIGTNSVGWAVITDEYKVPSKKFKVLGNTDRHSIKKNLIGALLFDSGETAEATRLKRTARRRYTRRKNRICYLQEIFSNEMAKVDDSFFHRLEESFLVEEDKKHERHPIFGNIVDEVAYHEKYPTIYHLRKKLVDSTDKADLRLIYLALAHMIKFRGHFLIEGDLNPDNSDVDKLFIQLVQTYNQLFEENPINASGVDAKAILSARLSKSRRLENLIAQLPGEKKNGLFGNLIALSLGLTPNFKSNFDLAEDAKLQLSKDTYDDDLDNLLAQIGDQYADLFLAAKNLSDAILLSDILRVNTEITKAPLSASMIKRYDEHHQDLTLLKALVRQQLPEKYKEIFFDQSKNGYAGYIDGGASQEEFYKFIKPILEKMDGTEELLVKLNREDLLRKQRTFDNGSIPHQIHLGELHAILRRQEDFYPFLKDNREKIEKILTFRIPYYVGPLARGNSRFAWMTRKSEETITPWNFEEVVDKGASAQSFIERMTNFDKNLPNEKVLPKHSLLYEYFTVYNELTKVKYVTEGMRKPAFLSGEQKKAIVDLLFKTNRKVTVKQLKEDYFKKIECFDSVEISGVEDRFNASLGTYHDLLKIIKDKDFLDNEENEDILEDIVLTLTLFEDREMIEERLKTYAHLFDDKVMKQLKRRRYTGWGRLSRKLINGIRDKQSGKTILDFLKSDGFANRNFMQLIHDDSLTFKEDIQKAQVSGQGDSLHEHIANLAGSPAIKKGILQTVKVVDELVKVMGRHKPENIVIEMARENQTTQKGQKNSRERMKRIEEGIKELGSQILKEHPVENTQLQNEKLYLYYLQNGRDMYVDQELDINRLSDYDVDHIVPQSFLKDDSIDNKVLTRSDKARGKSDNVPSEEVVKKMKNYWRQLLNAKLITQRKFDNLTKAERGGLSELDKAGFIKRQLVETRQITKHVAQILDSRMNTKYDENDKLIREVKVITLKSKLVSDFRKDFQFYKVREINNYHHAHDAYLNAVVGTALIKKYPKLESEFVYGDYKVYDVRKMIAKSEQEIGKATAKYFFYSNIMNFFKTEITLANGEIRKRPLIETNGETGEIVWDKGRDFATVRKVLSMPQVNIVKKTEVQTGGFSKESILPKRNSDKLIARKKDWDPKKYGGFDSPTVAYSVLVVAKVEKGKSKKLKSVKELLGITIMERSSFEKNPIDFLEAKGYKEVKKDLIIKLPKYSLFELENGRKRMLASAGELQKGNELALPSKYVNFLYLASHYEKLKGSPEDNEQKQLFVEQHKHYLDEIIEQISEFSKRVILADANLDKVLSAYNKHRDKPIREQAENIIHLFTLTNLGAPAAFKYFDTTIDRKRYTSTKEVLDATLIHQSITGLYETRIDLSQLGGDGGGSSEAAAKPAPGGWVQEISDSRPMLHIYLNGRRFLGLLNTGADKTCIAGRDWPANWPIHQTESSLQGLGMACGVARSSQPLRWQHEDKSGIIHPFVIPTLPFTLWGRDIMKDIKVRLMTDSPDDSQDLMIGAIESNLFADQISWKSDQPVWLNQWPLKQEKLQALQQLVTEQLQLGHLEESNSPWNTPVFVIKKKSGKWRLLQDLRAVNATMHDMGALQPGLPSPVAVPKGWEIIIIDLQDCFFNIKLHPEDCKRFAFSVPSPNFKRPYQRFQWKVLPQGMKNSPTLCQKFVDKAILTVRDKYQDSYIVHYMDDILLAHPSRSIVDEILTSMIQALNKHGLVVSTEKIQKYDNLKYLGTHIQGDSVSYQKLQIRTDKLRTLNDFQKLLGNINWIRPFLKLTTGELKPLFEILNGDSNPISTRKLTPEACKALQLMNERLSTARVKRLDLSQPWSLCILKTEYTPTACLWQDGVVEWIHLPHISPKVITPYDIFCTQLIIKGRHRSKELFSKDPDYIVVPYTKVQFDLLLQEKEDWPISLLGFLGEVHFHLPKDPLLTFTLQTAIIFPHMTSTTPLEKGIVIFTDGSANGRSVTYIQGREPIIKENTQNTAQQAEIVAVITAFEEVSQPFNLYTDSKYVTGLFPEIETATLSPRTKIYTELKHLQRLIHKRQEKFYIGHIRGHTGLPGPLAQGNAYADSLTRILTAGKRTADGSEFEKRTADGSEFESPKKKAKVE

SEQ ID NO: 3183 - protein, 2111 aa, synthetic construct
MPAAKRVKLDGGDKKYSIGLDIGTNSVGWAVITDEYKVPSKKFKVLGNTDRHSIKKNLIGALLFDSGETAEATRLKRTARRRYTRRKNRICYLQEIFSNEMAKVDDSFFHRLEESFLVEEDKKHERHPIFGNIVDEVAYHEKYPTIYHLRKKLVDSTDKADLRLIYLALAHMIKFRGHFLIEGDLNPDNSDVDKLFIQLVQTYNQLFEENPINASGVDAKAILSARLSKSRRLENLIAQLPGEKKNGLFGNLIALSLGLTPNFKSNFDLAEDAKLQLSKDTYDDDLDNLLAQIGDQYADLFLAAKNLSDAILLSDILRVNTEITKAPLSASMIKRYDEHHQDLTLLKALVRQQLPEKYKEIFFDQSKNGYAGYIDGGASQEEFYKFIKPILEKMDGTEELLVKLNREDLLRKQRTFDNGSIPHQIHLGELHAILRRQEDFYPFLKDNREKIEKILTFRIPYYVGPLARGNSRFAWMTRKSEETITPWNFEEVVDKGASAQSFIERMTNFDKNLPNEKVLPKHSLLYEYFTVYNELTKVKYVTEGMRKPAFLSGEQKKAIVDLLFKTNRKVTVKQLKEDYFKKIECFDSVEISGVEDRFNASLGTYHDLLKIIKDKDFLDNEENEDILEDIVLTLTLFEDREMIEERLKTYAHLFDDKVMKQLKRRRYTGWGRLSRKLINGIRDKQSGKTILDFLKSDGFANRNFMQLIHDDSLTFKEDIQKAQVSGQGDSLHEHIANLAGSPAIKKGILQTVKVVDELVKVMGRHKPENIVIEMARENQTTQKGQKNSRERMKRIEEGIKELGSQILKEHPVENTQLQNEKLYLYYLQNGRDMYVDQELDINRLSDYDVDHIVPQSFLKDDSIDNKVLTRSDKARGKSDNVPSEEVVKKMKNYWRQLLNAKLITQRKFDNLTKAERGGLSELDKAGFIKRQLVETRQITKHVAQILDSRMNTKYDENDKLIREVKVITLKSKLVSDFRKDFQFYKVREINNYHHAHDAYLNAVVGTALIKKYPKLESEFVYGDYKVYDVRKMIAKSEQEIGKATAKYFFYSNIMNFFKTEITLANGEIRKRPLIETNGETGEIVWDKGRDFATVRKVLSMPQVNIVKKTEVQTGGFSKESILPKRNSDKLIARKKDWDPKKYGGFDSPTVAYSVLVVAKVEKGKSKKLKSVKELLGITIMERSSFEKNPIDFLEAKGYKEVKKDLIIKLPKYSLFELENGRKRMLASAGELQKGNELALPSKYVNFLYLASHYEKLKGSPEDNEQKQLFVEQHKHYLDEIIEQISEFSKRVILADANLDKVLSAYNKHRDKPIREQAENIIHLFTLTNLGAPAAFKYFDTTIDRKRYTSTKEVLDATLIHQSITGLYETRIDLSQLGGDGGGGSGSSGGWVQEISDSRPMLHIYLNGRRFLGLLNTGADKTCIAGRDWPANWPIHQTESSLQGLGMACGVARSSQPLRWQHEDKSGIIHPFVIPTLPFTLWGRDIMKDIKVRLMTDSPDDSQDLMIGAIESNLFADQISWKSDQPVWLNQWPLKQEKLQALQQLVTEQLQLGHLEESNSPWNTPVFVIKKKSGKWRLLQDLRAVNATMHDMGALQPGLPSPVAVPKGWEIIIIDLQDCFFNIKLHPEDCKRFAFSVPSPNFKRPYQRFQWKVLPQGMKNSPTLCQKFVDKAILTVRDKYQDSYIVHYMDDILLAHPSRSIVDEILTSMIQALNKHGLVVSTEKIQKYDNLKYLGTHIQGDSVSYQKLQIRTDKLRTLNDFQKLLGNINWIRPFLKLTTGELKPLFEILNGDSNPISTRKLTPEACKALQLMNERLSTARVKRLDLSQPWSLCILKTEYTPTACLWQDGVVEWIHLPHISPKVITPYDIFCTQLIIKGRHRSKELFSKDPDYIVVPYTKVQFDLLLQEKEDWPISLLGFLGEVHFHLPKDPLLTFTLQTAIIFPHMTSTTPLEKGIVIFTDGSANGRSVTYIQGREPIIKENTQNTAQQAEIVAVITAFEEVSQPFNLYTDSKYVTGLFPEIETATLSPRTKIYTELKHLQRLIHKRQEKFYIGHIRGHTGLPGPLAQGNAYADSLTRILTAGKRTADGSEFEKRTADGSEFESPKKKAKVE

SEQ ID NO: 3184 - protein, 2114 aa, synthetic construct
MPAAKRVKLDGGDKKYSIGLDIGTNSVGWAVITDEYKVPSKKFKVLGNTDRHSIKKNLIGALLFDSGETAEATRLKRTARRRYTRRKNRICYLQEIFSNEMAKVDDSFFHRLEESFLVEEDKKHERHPIFGNIVDEVAYHEKYPTIYHLRKKLVDSTDKADLRLIYLALAHMIKFRGHFLIEGDLNPDNSDVDKLFIQLVQTYNQLFEENPINASGVDAKAILSARLSKSRRLENLIAQLPGEKKNGLFGNLIALSLGLTPNFKSNFDLAEDAKLQLSKDTYDDDLDNLLAQIGDQYADLFLAAKNLSDAILLSDILRVNTEITKAPLSASMIKRYDEHHQDLTLLKALVRQQLPEKYKEIFFDQSKNGYAGYIDGGASQEEFYKFIKPILEKMDGTEELLVKLNREDLLRKQRTFDNGSIPHQIHLGELHAILRRQEDFYPFLKDNREKIEKILTFRIPYYVGPLARGNSRFAWMTRKSEETITPWNFEEVVDKGASAQSFIERMTNFDKNLPNEKVLPKHSLLYEYFTVYNELTKVKYVTEGMRKPAFLSGEQKKAIVDLLFKTNRKVTVKQLKEDYFKKIECFDSVEISGVEDRFNASLGTYHDLLKIIKDKDFLDNEENEDILEDIVLTLTLFEDREMIEERLKTYAHLFDDKVMKQLKRRRYTGWGRLSRKLINGIRDKQSGKTILDFLKSDGFANRNFMQLIHDDSLTFKEDIQKAQVSGQGDSLHEHIANLAGSPAIKKGILQTVKVVDELVKVMGRHKPENIVIEMARENQTTQKGQKNSRERMKRIEEGIKELGSQILKEHPVENTQLQNEKLYLYYLQNGRDMYVDQELDINRLSDYDVDHIVPQSFLKDDSIDNKVLTRSDKARGKSDNVPSEEVVKKMKNYWRQLLNAKLITQRKFDNLTKAERGGLSELDKAGFIKRQLVETRQITKHVAQILDSRMNTKYDENDKLIREVKVITLKSKLVSDFRKDFQFYKVREINNYHHAHDAYLNAVVGTALIKKYPKLESEFVYGDYKVYDVRKMIAKSEQEIGKATAKYFFYSNIMNFFKTEITLANGEIRKRPLIETNGETGEIVWDKGRDFATVRKVLSMPQVNIVKKTEVQTGGFSKESILPKRNSDKLIARKKDWDPKKYGGFDSPTVAYSVLVVAKVEKGKSKKLKSVKELLGITIMERSSFEKNPIDFLEAKGYKEVKKDLIIKLPKYSLFELENGRKRMLASAGELQKGNELALPSKYVNFLYLASHYEKLKGSPEDNEQKQLFVEQHKHYLDEIIEQISEFSKRVILADANLDKVLSAYNKHRDKPIREQAENIIHLFTLTNLGAPAAFKYFDTTIDRKRYTSTKEVLDATLIHQSITGLYETRIDLSQLGGDGGGGGGSSGGSGGWVQEISDSRPMLHIYLNGRRFLGLLNTGADKTCIAGRDWPANWPIHQTESSLQGLGMACGVARSSQPLRWQHEDKSGIIHPFVIPTLPFTLWGRDIMKDIKVRLMTDSPDDSQDLMIGAIESNLFADQISWKSDQPVWLNQWPLKQEKLQALQQLVTEQLQLGHLEESNSPWNTPVFVIKKKSGKWRLLQDLRAVNATMHDMGALQPGLPSPVAVPKGWEIIIIDLQDCFFNIKLHPEDCKRFAFSVPSPNFKRPYQRFQWKVLPQGMKNSPTLCQKFVDKAILTVRDKYQDSYIVHYMDDILLAHPSRSIVDEILTSMIQALNKHGLVVSTEKIQKYDNLKYLGTHIQGDSVSYQKLQIRTDKLRTLNDFQKLLGNINWIRPFLKLTTGELKPLFEILNGDSNPISTRKLTPEACKALQLMNERLSTARVKRLDLSQPWSLCILKTEYTPTACLWQDGVVEWIHLPHISPKVITPYDIFCTQLIIKGRHRSKELFSKDPDYIVVPYTKVQFDLLLQEKEDWPISLLGFLGEVHFHLPKDPLLTFTLQTAIIFPHMTSTTPLEKGIVIFTDGSANGRSVTYIQGREPIIKENTQNTAQQAEIVAVITAFEEVSQPFNLYTDSKYVTGLFPEIETATLSPRTKIYTELKHLQRLIHKRQEKFYIGHIRGHTGLPGPLAQGNAYADSLTRILTAGKRTADGSEFEKRTADGSEFESPKKKAKVE

SEQ ID NO: 3185 - protein, 2120 aa, synthetic construct
MPAAKRVKLDGGDKKYSIGLDIGTNSVGWAVITDEYKVPSKKFKVLGNTDRHSIKKNLIGALLFDSGETAEATRLKRTARRRYTRRKNRICYLQEIFSNEMAKVDDSFFHRLEESFLVEEDKKHERHPIFGNIVDEVAYHEKYPTIYHLRKKLVDSTDKADLRLIYLALAHMIKFRGHFLIEGDLNPDNSDVDKLFIQLVQTYNQLFEENPINASGVDAKAILSARLSKSRRLENLIAQLPGEKKNGLFGNLIALSLGLTPNFKSNFDLAEDAKLQLSKDTYDDDLDNLLAQIGDQYADLFLAAKNLSDAILLSDILRVNTEITKAPLSASMIKRYDEHHQDLTLLKALVRQQLPEKYKEIFFDQSKNGYAGYIDGGASQEEFYKFIKPILEKMDGTEELLVKLNREDLLRKQRTFDNGSIPHQIHLGELHAILRRQEDFYPFLKDNREKIEKILTFRIPYYVGPLARGNSRFAWMTRKSEETITPWNFEEVVDKGASAQSFIERMTNFDKNLPNEKVLPKHSLLYEYFTVYNELTKVKYVTEGMRKPAFLSGEQKKAIVDLLFKTNRKVTVKQLKEDYFKKIECFDSVEISGVEDRFNASLGTYHDLLKIIKDKDFLDNEENEDILEDIVLTLTLFEDREMIEERLKTYAHLFDDKVMKQLKRRRYTGWGRLSRKLINGIRDKQSGKTILDFLKSDGFANRNFMQLIHDDSLTFKEDIQKAQVSGQGDSLHEHIANLAGSPAIKKGILQTVKVVDELVKVMGRHKPENIVIEMARENQTTQKGQKNSRERMKRIEEGIKELGSQILKEHPVENTQLQNEKLYLYYLQNGRDMYVDQELDINRLSDYDVDHIVPQSFLKDDSIDNKVLTRSDKARGKSDNVPSEEVVKKMKNYWRQLLNAKLITQRKFDNLTKAERGGLSELDKAGFIKRQLVETRQITKHVAQILDSRMNTKYDENDKLIREVKVITLKSKLVSDFRKDFQFYKVREINNYHHAHDAYLNAVVGTALIKKYPKLESEFVYGDYKVYDVRKMIAKSEQEIGKATAKYFFYSNIMNFFKTEITLANGEIRKRPLIETNGETGEIVWDKGRDFATVRKVLSMPQVNIVKKTEVQTGGFSKESILPKRNSDKLIARKKDWDPKKYGGFDSPTVAYSVLVVAKVEKGKSKKLKSVKELLGITIMERSSFEKNPIDFLEAKGYKEVKKDLIIKLPKYSLFELENGRKRMLASAGELQKGNELALPSKYVNFLYLASHYEKLKGSPEDNEQKQLFVEQHKHYLDEIIEQISEFSKRVILADANLDKVLSAYNKHRDKPIREQAENIIHLFTLTNLGAPAAFKYFDTTIDRKRYTSTKEVLDATLIHQSITGLYETRIDLSQLGGDGGEAAAKGGGGSEAAAKGGWVQEISDSRPMLHIYLNGRRFLGLLNTGADKTCIAGRDWPANWPIHQTESSLQGLGMACGVARSSQPLRWQHEDKSGIIHPFVIPTLPFTLWGRDIMKDIKVRLMTDSPDDSQDLMIGAIESNLFADQISWKSDQPVWLNQWPLKQEKLQALQQLVTEQLQLGHLEESNSPWNTPVFVIKKKSGKWRLLQDLRAVNATMHDMGALQPGLPSPVAVPKGWEIIIIDLQDCFFNIKLHPEDCKRFAFSVPSPNFKRPYQRFQWKVLPQGMKNSPTLCQKFVDKAILTVRDKYQDSYIVHYMDDILLAHPSRSIVDEILTSMIQALNKHGLVVSTEKIQKYDNLKYLGTHIQGDSVSYQKLQIRTDKLRTLNDFQKLLGNINWIRPFLKLTTGELKPLFEILNGDSNPISTRKLTPEACKALQLMNERLSTARVKRLDLSQPWSLCILKTEYTPTACLWQDGVVEWIHLPHISPKVITPYDIFCTQLIIKGRHRSKELFSKDPDYIVVPYTKVQFDLLLQEKEDWPISLLGFLGEVHFHLPKDPLLTFTLQTAIIFPHMTSTTPLEKGIVIFTDGSANGRSVTYIQGREPIIKENTQNTAQQAEIVAVITAFEEVSQPFNLYTDSKYVTGLFPEIETATLSPRTKIYTELKHLQRLIHKRQEKFYIGHIRGHTGLPGPLAQGNAYADSLTRILTAGKRTADGSEFEKRTADGSEFESPKKKAKVE

SEQ ID NO: 3186 - protein, 2108 aa, synthetic construct
MPAAKRVKLDGGDKKYSIGLDIGTNSVGWAVITDEYKVPSKKFKVLGNTDRHSIKKNLIGALLFDSGETAEATRLKRTARRRYTRRKNRICYLQEIFSNEMAKVDDSFFHRLEESFLVEEDKKHERHPIFGNIVDEVAYHEKYPTIYHLRKKLVDSTDKADLRLIYLALAHMIKFRGHFLIEGDLNPDNSDVDKLFIQLVQTYNQLFEENPINASGVDAKAILSARLSKSRRLENLIAQLPGEKKNGLFGNLIALSLGLTPNFKSNFDLAEDAKLQLSKDTYDDDLDNLLAQIGDQYADLFLAAKNLSDAILLSDILRVNTEITKAPLSASMIKRYDEHHQDLTLLKALVRQQLPEKYKEIFFDQSKNGYAGYIDGGASQEEFYKFIKPILEKMDGTEELLVKLNREDLLRKQRTFDNGSIPHQIHLGELHAILRRQEDFYPFLKDNREKIEKILTFRIPYYVGPLARGNSRFAWMTRKSEETITPWNFEEVVDKGASAQSFIERMTNFDKNLPNEKVLPKHSLLYEYFTVYNELTKVKYVTEGMRKPAFLSGEQKKAIVDLLFKTNRKVTVKQLKEDYFKKIECFDSVEISGVEDRFNASLGTYHDLLKIIKDKDFLDNEENEDILEDIVLTLTLFEDREMIEERLKTYAHLFDDKVMKQLKRRRYTGWGRLSRKLINGIRDKQSGKTILDFLKSDGFANRNFMQLIHDDSLTFKEDIQKAQVSGQGDSLHEHIANLAGSPAIKKGILQTVKVVDELVKVMGRHKPENIVIEMARENQTTQKGQKNSRERMKRIEEGIKELGSQILKEHPVENTQLQNEKLYLYYLQNGRDMYVDQELDINRLSDYDVDHIVPQSFLKDDSIDNKVLTRSDKARGKSDNVPSEEVVKKMKNYWRQLLNAKLITQRKFDNLTKAERGGLSELDKAGFIKRQLVETRQITKHVAQILDSRMNTKYDENDKLIREVKVITLKSKLVSDFRKDFQFYKVREINNYHHAHDAYLNAVVGTALIKKYPKLESEFVYGDYKVYDVRKMIAKSEQEIGKATAKYFFYSNIMNFFKTEITLANGEIRKRPLIETNGETGEIVWDKGRDFATVRKVLSMPQVNIVKKTEVQTGGFSKESILPKRNSDKLIARKKDWDPKKYGGFDSPTVAYSVLVVAKVEKGKSKKLKSVKELLGITIMERSSFEKNPIDFLEAKGYKEVKKDLIIKLPKYSLFELENGRKRMLASAGELQKGNELALPSKYVNFLYLASHYEKLKGSPEDNEQKQLFVEQHKHYLDEIIEQISEFSKRVILADANLDKVLSAYNKHRDKPIREQAENIIHLFTLTNLGAPAAFKYFDTTIDRKRYTSTKEVLDATLIHQSITGLYETRIDLSQLGGDGGGGSGGWVQEISDSRPMLHIYLNGRRFLGLLNTGADKTCIAGRDWPANWPIHQTESSLQGLGMACGVARSSQPLRWQHEDKSGIIHPFVIPTLPFTLWGRDIMKDIKVRLMTDSPDDSQDLMIGAIESNLFADQISWKSDQPVWLNQWPLKQEKLQALQQLVTEQLQLGHLEESNSPWNTPVFVIKKKSGKWRLLQDLRAVNATMHDMGALQPGLPSPVAVPKGWEIIIIDLQDCFFNIKLHPEDCKRFAFSVPSPNFKRPYQRFQWKVLPQGMKNSPTLCQKFVDKAILTVRDKYQDSYIVHYMDDILLAHPSRSIVDEILTSMIQALNKHGLVVSTEKIQKYDNLKYLGTHIQGDSVSYQKLQIRTDKLRTLNDFQKLLGNINWIRPFLKLTTGELKPLFEILNGDSNPISTRKLTPEACKALQLMNERLSTARVKRLDLSQPWSLCILKTEYTPTACLWQDGVVEWIHLPHISPKVITPYDIFCTQLIIKGRHRSKELFSKDPDYIVVPYTKVQFDLLLQEKEDWPISLLGFLGEVHFHLPKDPLLTFTLQTAIIFPHMTSTTPLEKGIVIFTDGSANGRSVTYIQGREPIIKENTQNTAQQAEIVAVITAFEEVSQPFNLYTDSKYVTGLFPEIETATLSPRTKIYTELKHLQRLIHKRQEKFYIGHIRGHTGLPGPLAQGNAYADSLTRILTAGKRTADGSEFEKRTADGSEFESPKKKAKVE

SEQ ID NO: 3187 - protein, 2114 aa, synthetic construct
MPAAKRVKLDGGDKKYSIGLDIGTNSVGWAVITDEYKVPSKKFKVLGNTDRHSIKKNLIGALLFDSGETAEATRLKRTARRRYTRRKNRICYLQEIFSNEMAKVDDSFFHRLEESFLVEEDKKHERHPIFGNIVDEVAYHEKYPTIYHLRKKLVDSTDKADLRLIYLALAHMIKFRGHFLIEGDLNPDNSDVDKLFIQLVQTYNQLFEENPINASGVDAKAILSARLSKSRRLENLIAQLPGEKKNGLFGNLIALSLGLTPNFKSNFDLAEDAKLQLSKDTYDDDLDNLLAQIGDQYADLFLAAKNLSDAILLSDILRVNTEITKAPLSASMIKRYDEHHQDLTLLKALVRQQLPEKYKEIFFDQSKNGYAGYIDGGASQEEFYKFIKPILEKMDGTEELLVKLNREDLLRKQRTFDNGSIPHQIHLGELHAILRRQEDFYPFLKDNREKIEKILTFRIPYYVGPLARGNSRFAWMTRKSEETITPWNFEEVVDKGASAQSFIERMTNFDKNLPNEKVLPKHSLLYEYFTVYNELTKVKYVTEGMRKPAFLSGEQKKAIVDLLFKTNRKVTVKQLKEDYFKKIECFDSVEISGVEDRFNASLGTYHDLLKIIKDKDFLDNEENEDILEDIVLTLTLFEDREMIEERLKTYAHLFDDKVMKQLKRRRYTGWGRLSRKLINGIRDKQSGKTILDFLKSDGFANRNFMQLIHDDSLTFKEDIQKAQVSGQGDSLHEHIANLAGSPAIKKGILQTVKVVDELVKVMGRHKPENIVIEMARENQTTQKGQKNSRERMKRIEEGIKELGSQILKEHPVENTQLQNEKLYLYYLQNGRDMYVDQELDINRLSDYDVDHIVPQSFLKDDSIDNKVLTRSDKARGKSDNVPSEEVVKKMKNYWRQLLNAKLITQRKFDNLTKAERGGLSELDKAGFIKRQLVETRQITKHVAQILDSRMNTKYDENDKLIREVKVITLKSKLVSDFRKDFQFYKVREINNYHHAHDAYLNAVVGTALIKKYPKLESEFVYGDYKVYDVRKMIAKSEQEIGKATAKYFFYSNIMNFFKTEITLANGEIRKRPLIETNGETGEIVWDKGRDFATVRKVLSMPQVNIVKKTEVQTGGFSKESILPKRNSDKLIARKKDWDPKKYGGFDSPTVAYSVLVVAKVEKGKSKKLKSVKELLGITIMERSSFEKNPIDFLEAKGYKEVKKDLIIKLPKYSLFELENGRKRMLASAGELQKGNELALPSKYVNFLYLASHYEKLKGSPEDNEQKQLFVEQHKHYLDEIIEQISEFSKRVILADANLDKVLSAYNKHRDKPIREQAENIIHLFTLTNLGAPAAFKYFDTTIDRKRYTSTKEVLDATLIHQSITGLYETRIDLSQLGGDGGGSSPAPGGGGGWVQEISDSRPMLHIYLNGRRFLGLLNTGADKTCIAGRDWPANWPIHQTESSLQGLGMACGVARSSQPLRWQHEDKSGIIHPFVIPTLPFTLWGRDIMKDIKVRLMTDSPDDSQDLMIGAIESNLFADQISWKSDQPVWLNQWPLKQEKLQALQQLVTEQLQLGHLEESNSPWNTPVFVIKKKSGKWRLLQDLRAVNATMHDMGALQPGLPSPVAVPKGWEIIIIDLQDCFFNIKLHPEDCKRFAFSVPSPNFKRPYQRFQWKVLPQGMKNSPTLCQKFVDKAILTVRDKYQDSYIVHYMDDILLAHPSRSIVDEILTSMIQALNKHGLVVSTEKIQKYDNLKYLGTHIQGDSVSYQKLQIRTDKLRTLNDFQKLLGNINWIRPFLKLTTGELKPLFEILNGDSNPISTRKLTPEACKALQLMNERLSTARVKRLDLSQPWSLCILKTEYTPTACLWQDGVVEWIHLPHISPKVITPYDIFCTQLIIKGRHRSKELFSKDPDYIVVPYTKVQFDLLLQEKEDWPISLLGFLGEVHFHLPKDPLLTFTLQTAIIFPHMTSTTPLEKGIVIFTDGSANGRSVTYIQGREPIIKENTQNTAQQAEIVAVITAFEEVSQPFNLYTDSKYVTGLFPEIETATLSPRTKIYTELKHLQRLIHKRQEKFYIGHIRGHTGLPGPLAQGNAYADSLTRILTAGKRTADGSEFEKRTADGSEFESPKKKAKVE

SEQ ID NO: 3188 - protein, 2114 aa, synthetic construct
MPAAKRVKLDGGDKKYSIGLDIGTNSVGWAVITDEYKVPSKKFKVLGNTDRHSIKKNLIGALLFDSGETAEATRLKRTARRRYTRRKNRICYLQEIFSNEMAKVDDSFFHRLEESFLVEEDKKHERHPIFGNIVDEVAYHEKYPTIYHLRKKLVDSTDKADLRLIYLALAHMIKFRGHFLIEGDLNPDNSDVDKLFIQLVQTYNQLFEENPINASGVDAKAILSARLSKSRRLENLIAQLPGEKKNGLFGNLIALSLGLTPNFKSNFDLAEDAKLQLSKDTYDDDLDNLLAQIGDQYADLFLAAKNLSDAILLSDILRVNTEITKAPLSASMIKRYDEHHQDLTLLKALVRQQLPEKYKEIFFDQSKNGYAGYIDGGASQEEFYKFIKPILEKMDGTEELLVKLNREDLLRKQRTFDNGSIPHQIHLGELHAILRRQEDFYPFLKDNREKIEKILTFRIPYYVGPLARGNSRFAWMTRKSEETITPWNFEEVVDKGASAQSFIERMTNFDKNLPNEKVLPKHSLLYEYFTVYNELTKVKYVTEGMRKPAFLSGEQKKAIVDLLFKTNRKVTVKQLKEDYFKKIECFDSVEISGVEDRFNASLGTYHDLLKIIKDKDFLDNEENEDILEDIVLTLTLFEDREMIEERLKTYAHLFDDKVMKQLKRRRYTGWGRLSRKLINGIRDKQSGKTILDFLKSDGFANRNFMQLIHDDSLTFKEDIQKAQVSGQGDSLHEHIANLAGSPAIKKGILQTVKVVDELVKVMGRHKPENIVIEMARENQTTQKGQKNSRERMKRIEEGIKELGSQILKEHPVENTQLQNEKLYLYYLQNGRDMYVDQELDINRLSDYDVDHIVPQSFLKDDSIDNKVLTRSDKARGKSDNVPSEEVVKKMKNYWRQLLNAKLITQRKFDNLTKAERGGLSELDKAGFIKRQLVETRQITKHVAQILDSRMNTKYDENDKLIREVKVITLKSKLVSDFRKDFQFYKVREINNYHHAHDAYLNAVVGTALIKKYPKLESEFVYGDYKVYDVRKMIAKSEQEIGKATAKYFFYSNIMNFFKTEITLANGEIRKRPLIETNGETGEIVWDKGRDFATVRKVLSMPQVNIVKKTEVQTGGFSKESILPKRNSDKLIARKKDWDPKKYGGFDSPTVAYSVLVVAKVEKGKSKKLKSVKELLGITIMERSSFEKNPIDFLEAKGYKEVKKDLIIKLPKYSLFELENGRKRMLASAGELQKGNELALPSKYVNFLYLASHYEKLKGSPEDNEQKQLFVEQHKHYLDEIIEQISEFSKRVILADANLDKVLSAYNKHRDKPIREQAENIIHLFTLTNLGAPAAFKYFDTTIDRKRYTSTKEVLDATLIHQSITGLYETRIDLSQLGGDGGPAPGSSGGGGGWVQEISDSRPMLHIYLNGRRFLGLLNTGADKTCIAGRDWPANWPIHQTESSLQGLGMACGVARSSQPLRWQHEDKSGIIHPFVIPTLPFTLWGRDIMKDIKVRLMTDSPDDSQDLMIGAIESNLFADQISWKSDQPVWLNQWPLKQEKLQALQQLVTEQLQLGHLEESNSPWNTPVFVIKKKSGKWRLLQDLRAVNATMHDMGALQPGLPSPVAVPKGWEIIIIDLQDCFFNIKLHPEDCKRFAFSVPSPNFKRPYQRFQWKVLPQGMKNSPTLCQKFVDKAILTVRDKYQDSYIVHYMDDILLAHPSRSIVDEILTSMIQALNKHGLVVSTEKIQKYDNLKYLGTHIQGDSVSYQKLQIRTDKLRTLNDFQKLLGNINWIRPFLKLTTGELKPLFEILNGDSNPISTRKLTPEACKALQLMNERLSTARVKRLDLSQPWSLCILKTEYTPTACLWQDGVVEWIHLPHISPKVITPYDIFCTQLIIKGRHRSKELFSKDPDYIVVPYTKVQFDLLLQEKEDWPISLLGFLGEVHFHLPKDPLLTFTLQTAIIFPHMTSTTPLEKGIVIFTDGSANGRSVTYIQGREPIIKENTQNTAQQAEIVAVITAFEEVSQPFNLYTDSKYVTGLFPEIETATLSPRTKIYTELKHLQRLIHKRQEKFYIGHIRGHTGLPGPLAQGNAYADSLTRILTAGKRTADGSEFEKRTADGSEFESPKKKAKVE

SEQ ID NO: 3189 - protein, 2116 aa, synthetic construct
MPAAKRVKLDGGDKKYSIGLDIGTNSVGWAVITDEYKVPSKKFKVLGNTDRHSIKKNLIGALLFDSGETAEATRLKRTARRRYTRRKNRICYLQEIFSNEMAKVDDSFFHRLEESFLVEEDKKHERHPIFGNIVDEVAYHEKYPTIYHLRKKLVDSTDKADLRLIYLALAHMIKFRGHFLIEGDLNPDNSDVDKLFIQLVQTYNQLFEENPINASGVDAKAILSARLSKSRRLENLIAQLPGEKKNGLFGNLIALSLGLTPNFKSNFDLAEDAKLQLSKDTYDDDLDNLLAQIGDQYADLFLAAKNLSDAILLSDILRVNTEITKAPLSASMIKRYDEHHQDLTLLKALVRQQLPEKYKEIFFDQSKNGYAGYIDGGASQEEFYKFIKPILEKMDGTEELLVKLNREDLLRKQRTFDNGSIPHQIHLGELHAILRRQEDFYPFLKDNREKIEKILTFRIPYYVGPLARGNSRFAWMTRKSEETITPWNFEEVVDKGASAQSFIERMTNFDKNLPNEKVLPKHSLLYEYFTVYNELTKVKYVTEGMRKPAFLSGEQKKAIVDLLFKTNRKVTVKQLKEDYFKKIECFDSVEISGVEDRFNASLGTYHDLLKIIKDKDFLDNEENEDILEDIVLTLTLFEDREMIEERLKTYAHLFDDKVMKQLKRRRYTGWGRLSRKLINGIRDKQSGKTILDFLKSDGFANRNFMQLIHDDSLTFKEDIQKAQVSGQGDSLHEHIANLAGSPAIKKGILQTVKVVDELVKVMGRHKPENIVIEMARENQTTQKGQKNSRERMKRIEEGIKELGSQILKEHPVENTQLQNEKLYLYYLQNGRDMYVDQELDINRLSDYDVDHIVPQSFLKDDSIDNKVLTRSDKARGKSDNVPSEEVVKKMKNYWRQLLNAKLITQRKFDNLTKAERGGLSELDKAGFIKRQLVETRQITKHVAQILDSRMNTKYDENDKLIREVKVITLKSKLVSDFRKDFQFYKVREINNYHHAHDAYLNAVVGTALIKKYPKLESEFVYGDYKVYDVRKMIAKSEQEIGKATAKYFFYSNIMNFFKTEITLANGEIRKRPLIETNGETGEIVWDKGRDFATVRKVLSMPQVNIVKKTEVQTGGFSKESILPKRNSDKLIARKKDWDPKKYGGFDSPTVAYSVLVVAKVEKGKSKKLKSVKELLGITIMERSSFEKNPIDFLEAKGYKEVKKDLIIKLPKYSLFELENGRKRMLASAGELQKGNELALPSKYVNFLYLASHYEKLKGSPEDNEQKQLFVEQHKHYLDEIIEQISEFSKRVILADANLDKVLSAYNKHRDKPIREQAENIIHLFTLTNLGAPAAFKYFDTTIDRKRYTSTKEVLDATLIHQSITGLYETRIDLSQLGGDGGEAAAKGGSPAPGGWVQEISDSRPMLHIYLNGRRFLGLLNTGADKTCIAGRDWPANWPIHQTESSLQGLGMACGVARSSQPLRWQHEDKSGIIHPFVIPTLPFTLWGRDIMKDIKVRLMTDSPDDSQDLMIGAIESNLFADQISWKSDQPVWLNQWPLKQEKLQALQQLVTEQLQLGHLEESNSPWNTPVFVIKKKSGKWRLLQDLRAVNATMHDMGALQPGLPSPVAVPKGWEIIIIDLQDCFFNIKLHPEDCKRFAFSVPSPNFKRPYQRFQWKVLPQGMKNSPTLCQKFVDKAILTVRDKYQDSYIVHYMDDILLAHPSRSIVDEILTSMIQALNKHGLVVSTEKIQKYDNLKYLGTHIQGDSVSYQKLQIRTDKLRTLNDFQKLLGNINWIRPFLKLTTGELKPLFEILNGDSNPISTRKLTPEACKALQLMNERLSTARVKRLDLSQPWSLCILKTEYTPTACLWQDGVVEWIHLPHISPKVITPYDIFCTQLIIKGRHRSKELFSKDPDYIVVPYTKVQFDLLLQEKEDWPISLLGFLGEVHFHLPKDPLLTFTLQTAIIFPHMTSTTPLEKGIVIFTDGSANGRSVTYIQGREPIIKENTQNTAQQAEIVAVITAFEEVSQPFNLYTDSKYVTGLFPEIETATLSPRTKIYTELKHLQRLIHKRQEKFYIGHIRGHTGLPGPLAQGNAYADSLTRILTAGKRTADGSEFEKRTADGSEFESPKKKAKVE

SEQ ID NO: 3190 - protein, 2114 aa, synthetic construct
MPAAKRVKLDGGDKKYSIGLDIGTNSVGWAVITDEYKVPSKKFKVLGNTDRHSIKKNLIGALLFDSGETAEATRLKRTARRRYTRRKNRICYLQEIFSNEMAKVDDSFFHRLEESFLVEEDKKHERHPIFGNIVDEVAYHEKYPTIYHLRKKLVDSTDKADLRLIYLALAHMIKFRGHFLIEGDLNPDNSDVDKLFIQLVQTYNQLFEENPINASGVDAKAILSARLSKSRRLENLIAQLPGEKKNGLFGNLIALSLGLTPNFKSNFDLAEDAKLQLSKDTYDDDLDNLLAQIGDQYADLFLAAKNLSDAILLSDILRVNTEITKAPLSASMIKRYDEHHQDLTLLKALVRQQLPEKYKEIFFDQSKNGYAGYIDGGASQEEFYKFIKPILEKMDGTEELLVKLNREDLLRKQRTFDNGSIPHQIHLGELHAILRRQEDFYPFLKDNREKIEKILTFRIPYYVGPLARGNSRFAWMTRKSEETITPWNFEEVVDKGASAQSFIERMTNFDKNLPNEKVLPKHSLLYEYFTVYNELTKVKYVTEGMRKPAFLSGEQKKAIVDLLFKTNRKVTVKQLKEDYFKKIECFDSVEISGVEDRFNASLGTYHDLLKIIKDKDFLDNEENEDILEDIVLTLTLFEDREMIEERLKTYAHLFDDKVMKQLKRRRYTGWGRLSRKLINGIRDKQSGKTILDFLKSDGFANRNFMQLIHDDSLTFKEDIQKAQVSGQGDSLHEHIANLAGSPAIKKGILQTVKVVDELVKVMGRHKPENIVIEMARENQTTQKGQKNSRERMKRIEEGIKELGSQILKEHPVENTQLQNEKLYLYYLQNGRDMYVDQELDINRLSDYDVDHIVPQSFLKDDSIDNKVLTRSDKARGKSDNVPSEEVVKKMKNYWRQLLNAKLITQRKFDNLTKAERGGLSELDKAGFIKRQLVETRQITKHVAQILDSRMNTKYDENDKLIREVKVITLKSKLVSDFRKDFQFYKVREINNYHHAHDAYLNAVVGTALIKKYPKLESEFVYGDYKVYDVRKMIAKSEQEIGKATAKYFFYSNIMNFFKTEITLANGEIRKRPLIETNGETGEIVWDKGRDFATVRKVLSMPQVNIVKKTEVQTGGFSKESILPKRNSDKLIARKKDWDPKKYGGFDSPTVAYSVLVVAKVEKGKSKKLKSVKELLGITIMERSSFEKNPIDFLEAKGYKEVKKDLIIKLPKYSLFELENGRKRMLASAGELQKGNELALPSKYVNFLYLASHYEKLKGSPEDNEQKQLFVEQHKHYLDEIIEQISEFSKRVILADANLDKVLSAYNKHRDKPIREQAENIIHLFTLTNLGAPAAFKYFDTTIDRKRYTSTKEVLDATLIHQSITGLYETRIDLSQLGGDGGGSSGGSGGGGGWVQEISDSRPMLHIYLNGRRFLGLLNTGADKTCIAGRDWPANWPIHQTESSLQGLGMACGVARSSQPLRWQHEDKSGIIHPFVIPTLPFTLWGRDIMKDIKVRLMTDSPDDSQDLMIGAIESNLFADQISWKSDQPVWLNQWPLKQEKLQALQQLVTEQLQLGHLEESNSPWNTPVFVIKKKSGKWRLLQDLRAVNATMHDMGALQPGLPSPVAVPKGWEIIIIDLQDCFFNIKLHPEDCKRFAFSVPSPNFKRPYQRFQWKVLPQGMKNSPTLCQKFVDKAILTVRDKYQDSYIVHYMDDILLAHPSRSIVDEILTSMIQALNKHGLVVSTEKIQKYDNLKYLGTHIQGDSVSYQKLQIRTDKLRTLNDFQKLLGNINWIRPFLKLTTGELKPLFEILNGDSNPISTRKLTPEACKALQLMNERLSTARVKRLDLSQPWSLCILKTEYTPTACLWQDGVVEWIHLPHISPKVITPYDIFCTQLIIKGRHRSKELFSKDPDYIVVPYTKVQFDLLLQEKEDWPISLLGFLGEVHFHLPKDPLLTFTLQTAIIFPHMTSTTPLEKGIVIFTDGSANGRSVTYIQGREPIIKENTQNTAQQAEIVAVITAFEEVSQPFNLYTDSKYVTGLFPEIETATLSPRTKIYTELKHLQRLIHKRQEKFYIGHIRGHTGLPGPLAQGNAYADSLTRILTAGKRTADGSEFEKRTADGSEFESPKKKAKVE

SEQ ID NO: 3191 - protein, 2116 aa, synthetic construct
MPAAKRVKLDGGDKKYSIGLDIGTNSVGWAVITDEYKVPSKKFKVLGNTDRHSIKKNLIGALLFDSGETAEATRLKRTARRRYTRRKNRICYLQEIFSNEMAKVDDSFFHRLEESFLVEEDKKHERHPIFGNIVDEVAYHEKYPTIYHLRKKLVDSTDKADLRLIYLALAHMIKFRGHFLIEGDLNPDNSDVDKLFIQLVQTYNQLFEENPINASGVDAKAILSARLSKSRRLENLIAQLPGEKKNGLFGNLIALSLGLTPNFKSNFDLAEDAKLQLSKDTYDDDLDNLLAQIGDQYADLFLAAKNLSDAILLSDILRVNTEITKAPLSASMIKRYDEHHQDLTLLKALVRQQLPEKYKEIFFDQSKNGYAGYIDGGASQEEFYKFIKPILEKMDGTEELLVKLNREDLLRKQRTFDNGSIPHQIHLGELHAILRRQEDFYPFLKDNREKIEKILTFRIPYYVGPLARGNSRFAWMTRKSEETITPWNFEEVVDKGASAQSFIERMTNFDKNLPNEKVLPKHSLLYEYFTVYNELTKVKYVTEGMRKPAFLSGEQKKAIVDLLFKTNRKVTVKQLKEDYFKKIECFDSVEISGVEDRFNASLGTYHDLLKIIKDKDFLDNEENEDILEDIVLTLTLFEDREMIEERLKTYAHLFDDKVMKQLKRRRYTGWGRLSRKLINGIRDKQSGKTILDFLKSDGFANRNFMQLIHDDSLTFKEDIQKAQVSGQGDSLHEHIANLAGSPAIKKGILQTVKVVDELVKVMGRHKPENIVIEMARENQTTQKGQKNSRERMKRIEEGIKELGSQILKEHPVENTQLQNEKLYLYYLQNGRDMYVDQELDINRLSDYDVDHIVPQSFLKDDSIDNKVLTRSDKARGKSDNVPSEEVVKKMKNYWRQLLNAKLITQRKFDNLTKAERGGLSELDKAGFIKRQLVETRQITKHVAQILDSRMNTKYDENDKLIREVKVITLKSKLVSDFRKDFQFYKVREINNYHHAHDAYLNAVVGTALIKKYPKLESEFVYGDYKVYDVRKMIAKSEQEIGKATAKYFFYSNIMNFFKTEITLANGEIRKRPLIETNGETGEIVWDKGRDFATVRKVLSMPQVNIVKKTEVQTGGFSKESILPKRNSDKLIARKKDWDPKKYGGFDSPTVAYSVLVVAKVEKGKSKKLKSVKELLGITIMERSSFEKNPIDFLEAKGYKEVKKDLIIKLPKYSLFELENGRKRMLASAGELQKGNELALPSKYVNFLYLASHYEKLKGSPEDNEQKQLFVEQHKHYLDEIIEQISEFSKRVILADANLDKVLSAYNKHRDKPIREQAENIIHLFTLTNLGAPAAFKYFDTTIDRKRYTSTKEVLDATLIHQSITGLYETRIDLSQLGGDGGGGGEAAAKPAPGGWVQEISDSRPMLHIYLNGRRFLGLLNTGADKTCIAGRDWPANWPIHQTESSLQGLGMACGVARSSQPLRWQHEDKSGIIHPFVIPTLPFTLWGRDIMKDIKVRLMTDSPDDSQDLMIGAIESNLFADQISWKSDQPVWLNQWPLKQEKLQALQQLVTEQLQLGHLEESNSPWNTPVFVIKKKSGKWRLLQDLRAVNATMHDMGALQPGLPSPVAVPKGWEIIIIDLQDCFFNIKLHPEDCKRFAFSVPSPNFKRPYQRFQWKVLPQGMKNSPTLCQKFVDKAILTVRDKYQDSYIVHYMDDILLAHPSRSIVDEILTSMIQALNKHGLVVSTEKIQKYDNLKYLGTHIQGDSVSYQKLQIRTDKLRTLNDFQKLLGNINWIRPFLKLTTGELKPLFEILNGDSNPISTRKLTPEACKALQLMNERLSTARVKRLDLSQPWSLCILKTEYTPTACLWQDGVVEWIHLPHISPKVITPYDIFCTQLIIKGRHRSKELFSKDPDYIVVPYTKVQFDLLLQEKEDWPISLLGFLGEVHFHLPKDPLLTFTLQTAIIFPHMTSTTPLEKGIVIFTDGSANGRSVTYIQGREPIIKENTQNTAQQAEIVAVITAFEEVSQPFNLYTDSKYVTGLFPEIETATLSPRTKIYTELKHLQRLIHKRQEKFYIGHIRGHTGLPGPLAQGNAYADSLTRILTAGKRTADGSEFEKRTADGSEFESPKKKAKVE

SEQ ID NO: 3192 - protein, 2116 aa, synthetic construct
MPAAKRVKLDGGDKKYSIGLDIGTNSVGWAVITDEYKVPSKKFKVLGNTDRHSIKKNLIGALLFDSGETAEATRLKRTARRRYTRRKNRICYLQEIFSNEMAKVDDSFFHRLEESFLVEEDKKHERHPIFGNIVDEVAYHEKYPTIYHLRKKLVDSTDKADLRLIYLALAHMIKFRGHFLIEGDLNPDNSDVDKLFIQLVQTYNQLFEENPINASGVDAKAILSARLSKSRRLENLIAQLPGEKKNGLFGNLIALSLGLTPNFKSNFDLAEDAKLQLSKDTYDDDLDNLLAQIGDQYADLFLAAKNLSDAILLSDILRVNTEITKAPLSASMIKRYDEHHQDLTLLKALVRQQLPEKYKEIFFDQSKNGYAGYIDGGASQEEFYKFIKPILEKMDGTEELLVKLNREDLLRKQRTFDNGSIPHQIHLGELHAILRRQEDFYPFLKDNREKIEKILTFRIPYYVGPLARGNSRFAWMTRKSEETITPWNFEEVVDKGASAQSFIERMTNFDKNLPNEKVLPKHSLLYEYFTVYNELTKVKYVTEGMRKPAFLSGEQKKAIVDLLFKTNRKVTVKQLKEDYFKKIECFDSVEISGVEDRFNASLGTYHDLLKIIKDKDFLDNEENEDILEDIVLTLTLFEDREMIEERLKTYAHLFDDKVMKQLKRRRYTGWGRLSRKLINGIRDKQSGKTILDFLKSDGFANRNFMQLIHDDSLTFKEDIQKAQVSGQGDSLHEHIANLAGSPAIKKGILQTVKVVDELVKVMGRHKPENIVIEMARENQTTQKGQKNSRERMKRIEEGIKELGSQILKEHPVENTQLQNEKLYLYYLQNGRDMYVDQELDINRLSDYDVDHIVPQSFLKDDSIDNKVLTRSDKARGKSDNVPSEEVVKKMKNYWRQLLNAKLITQRKFDNLTKAERGGLSELDKAGFIKRQLVETRQITKHVAQILDSRMNTKYDENDKLIREVKVITLKSKLVSDFRKDFQFYKVREINNYHHAHDAYLNAVVGTALIKKYPKLESEFVYGDYKVYDVRKMIAKSEQEIGKATAKYFFYSNIMNFFKTEITLANGEIRKRPLIETNGETGEIVWDKGRDFATVRKVLSMPQVNIVKKTEVQTGGFSKESILPKRNSDKLIARKKDWDPKKYGGFDSPTVAYSVLVVAKVEKGKSKKLKSVKELLGITIMERSSFEKNPIDFLEAKGYKEVKKDLIIKLPKYSLFELENGRKRMLASAGELQKGNELALPSKYVNFLYLASHYEKLKGSPEDNEQKQLFVEQHKHYLDEIIEQISEFSKRVILADANLDKVLSAYNKHRDKPIREQAENIIHLFTLTNLGAPAAFKYFDTTIDRKRYTSTKEVLDATLIHQSITGLYETRIDLSQLGGDGGGSSEAAAKGGSGGWVQEISDSRPMLHIYLNGRRFLGLLNTGADKTCIAGRDWPANWPIHQTESSLQGLGMACGVARSSQPLRWQHEDKSGIIHPFVIPTLPFTLWGRDIMKDIKVRLMTDSPDDSQDLMIGAIESNLFADQISWKSDQPVWLNQWPLKQEKLQALQQLVTEQLQLGHLEESNSPWNTPVFVIKKKSGKWRLLQDLRAVNATMHDMGALQPGLPSPVAVPKGWEIIIIDLQDCFFNIKLHPEDCKRFAFSVPSPNFKRPYQRFQWKVLPQGMKNSPTLCQKFVDKAILTVRDKYQDSYIVHYMDDILLAHPSRSIVDEILTSMIQALNKHGLVVSTEKIQKYDNLKYLGTHIQGDSVSYQKLQIRTDKLRTLNDFQKLLGNINWIRPFLKLTTGELKPLFEILNGDSNPISTRKLTPEACKALQLMNERLSTARVKRLDLSQPWSLCILKTEYTPTACLWQDGVVEWIHLPHISPKVITPYDIFCTQLIIKGRHRSKELFSKDPDYIVVPYTKVQFDLLLQEKEDWPISLLGFLGEVHFHLPKDPLLTFTLQTAIIFPHMTSTTPLEKGIVIFTDGSANGRSVTYIQGREPIIKENTQNTAQQAEIVAVITAFEEVSQPFNLYTDSKYVTGLFPEIETATLSPRTKIYTELKHLQRLIHKRQEKFYIGHIRGHTGLPGPLAQGNAYADSLTRILTAGKRTADGSEFEKRTADGSEFESPKKKAKVE

SEQ ID NO: 3193 - protein, 2125 aa, synthetic construct
MPAAKRVKLDGGDKKYSIGLDIGTNSVGWAVITDEYKVPSKKFKVLGNTDRHSIKKNLIGALLFDSGETAEATRLKRTARRRYTRRKNRICYLQEIFSNEMAKVDDSFFHRLEESFLVEEDKKHERHPIFGNIVDEVAYHEKYPTIYHLRKKLVDSTDKADLRLIYLALAHMIKFRGHFLIEGDLNPDNSDVDKLFIQLVQTYNQLFEENPINASGVDAKAILSARLSKSRRLENLIAQLPGEKKNGLFGNLIALSLGLTPNFKSNFDLAEDAKLQLSKDTYDDDLDNLLAQIGDQYADLFLAAKNLSDAILLSDILRVNTEITKAPLSASMIKRYDEHHQDLTLLKALVRQQLPEKYKEIFFDQSKNGYAGYIDGGASQEEFYKFIKPILEKMDGTEELLVKLNREDLLRKQRTFDNGSIPHQIHLGELHAILRRQEDFYPFLKDNREKIEKILTFRIPYYVGPLARGNSRFAWMTRKSEETITPWNFEEVVDKGASAQSFIERMTNFDKNLPNEKVLPKHSLLYEYFTVYNELTKVKYVTEGMRKPAFLSGEQKKAIVDLLFKTNRKVTVKQLKEDYFKKIECFDSVEISGVEDRFNASLGTYHDLLKIIKDKDFLDNEENEDILEDIVLTLTLFEDREMIEERLKTYAHLFDDKVMKQLKRRRYTGWGRLSRKLINGIRDKQSGKTILDFLKSDGFANRNFMQLIHDDSLTFKEDIQKAQVSGQGDSLHEHIANLAGSPAIKKGILQTVKVVDELVKVMGRHKPENIVIEMARENQTTQKGQKNSRERMKRIEEGIKELGSQILKEHPVENTQLQNEKLYLYYLQNGRDMYVDQELDINRLSDYDVDHIVPQSFLKDDSIDNKVLTRSDKARGKSDNVPSEEVVKKMKNYWRQLLNAKLITQRKFDNLTKAERGGLSELDKAGFIKRQLVETRQITKHVAQILDSRMNTKYDENDKLIREVKVITLKSKLVSDFRKDFQFYKVREINNYHHAHDAYLNAVVGTALIKKYPKLESEFVYGDYKVYDVRKMIAKSEQEIGKATAKYFFYSNIMNFFKTEITLANGEIRKRPLIETNGETGEIVWDKGRDFATVRKVLSMPQVNIVKKTEVQTGGFSKESILPKRNSDKLIARKKDWDPKKYGGFDSPTVAYSVLVVAKVEKGKSKKLKSVKELLGITIMERSSFEKNPIDFLEAKGYKEVKKDLIIKLPKYSLFELENGRKRMLASAGELQKGNELALPSKYVNFLYLASHYEKLKGSPEDNEQKQLFVEQHKHYLDEIIEQISEFSKRVILADANLDKVLSAYNKHRDKPIREQAENIIHLFTLTNLGAPAAFKYFDTTIDRKRYTSTKEVLDATLIHQSITGLYETRIDLSQLGGDGGGGGGSGGGGSGGGGSGGGGSGGWVQEISDSRPMLHIYLNGRRFLGLLNTGADKTCIAGRDWPANWPIHQTESSLQGLGMACGVARSSQPLRWQHEDKSGIIHPFVIPTLPFTLWGRDIMKDIKVRLMTDSPDDSQDLMIGAIESNLFADQISWKSDQPVWLNQWPLKQEKLQALQQLVTEQLQLGHLEESNSPWNTPVFVIKKKSGKWRLLQDLRAVNATMHDMGALQPGLPSPVAVPKGWEIIIIDLQDCFFNIKLHPEDCKRFAFSVPSPNFKRPYQRFQWKVLPQGMKNSPTLCQKFVDKAILTVRDKYQDSYIVHYMDDILLAHPSRSIVDEILTSMIQALNKHGLVVSTEKIQKYDNLKYLGTHIQGDSVSYQKLQIRTDKLRTLNDFQKLLGNINWIRPFLKLTTGELKPLFEILNGDSNPISTRKLTPEACKALQLMNERLSTARVKRLDLSQPWSLCILKTEYTPTACLWQDGVVEWIHLPHISPKVITPYDIFCTQLIIKGRHRSKELFSKDPDYIVVPYTKVQFDLLLQEKEDWPISLLGFLGEVHFHLPKDPLLTFTLQTAIIFPHMTSTTPLEKGIVIFTDGSANGRSVTYIQGREPIIKENTQNTAQQAEIVAVITAFEEVSQPFNLYTDSKYVTGLFPEIETATLSPRTKIYTELKHLQRLIHKRQEKFYIGHIRGHTGLPGPLAQGNAYADSLTRILTAGKRTADGSEFEKRTADGSEFESPKKKAKVE

SEQ ID NO: 3194 - protein, 2115 aa, synthetic construct
MPAAKRVKLDGGDKKYSIGLDIGTNSVGWAVITDEYKVPSKKFKVLGNTDRHSIKKNLIGALLFDSGETAEATRLKRTARRRYTRRKNRICYLQEIFSNEMAKVDDSFFHRLEESFLVEEDKKHERHPIFGNIVDEVAYHEKYPTIYHLRKKLVDSTDKADLRLIYLALAHMIKFRGHFLIEGDLNPDNSDVDKLFIQLVQTYNQLFEENPINASGVDAKAILSARLSKSRRLENLIAQLPGEKKNGLFGNLIALSLGLTPNFKSNFDLAEDAKLQLSKDTYDDDLDNLLAQIGDQYADLFLAAKNLSDAILLSDILRVNTEITKAPLSASMIKRYDEHHQDLTLLKALVRQQLPEKYKEIFFDQSKNGYAGYIDGGASQEEFYKFIKPILEKMDGTEELLVKLNREDLLRKQRTFDNGSIPHQIHLGELHAILRRQEDFYPFLKDNREKIEKILTFRIPYYVGPLARGNSRFAWMTRKSEETITPWNFEEVVDKGASAQSFIERMTNFDKNLPNEKVLPKHSLLYEYFTVYNELTKVKYVTEGMRKPAFLSGEQKKAIVDLLFKTNRKVTVKQLKEDYFKKIECFDSVEISGVEDRFNASLGTYHDLLKIIKDKDFLDNEENEDILEDIVLTLTLFEDREMIEERLKTYAHLFDDKVMKQLKRRRYTGWGRLSRKLINGIRDKQSGKTILDFLKSDGFANRNFMQLIHDDSLTFKEDIQKAQVSGQGDSLHEHIANLAGSPAIKKGILQTVKVVDELVKVMGRHKPENIVIEMARENQTTQKGQKNSRERMKRIEEGIKELGSQILKEHPVENTQLQNEKLYLYYLQNGRDMYVDQELDINRLSDYDVDHIVPQSFLKDDSIDNKVLTRSDKARGKSDNVPSEEVVKKMKNYWRQLLNAKLITQRKFDNLTKAERGGLSELDKAGFIKRQLVETRQITKHVAQILDSRMNTKYDENDKLIREVKVITLKSKLVSDFRKDFQFYKVREINNYHHAHDAYLNAVVGTALIKKYPKLESEFVYGDYKVYDVRKMIAKSEQEIGKATAKYFFYSNIMNFFKTEITLANGEIRKRPLIETNGETGEIVWDKGRDFATVRKVLSMPQVNIVKKTEVQTGGFSKESILPKRNSDKLIARKKDWDPKKYGGFDSPTVAYSVLVVAKVEKGKSKKLKSVKELLGITIMERSSFEKNPIDFLEAKGYKEVKKDLIIKLPKYSLFELENGRKRMLASAGELQKGNELALPSKYVNFLYLASHYEKLKGSPEDNEQKQLFVEQHKHYLDEIIEQISEFSKRVILADANLDKVLSAYNKHRDKPIREQAENIIHLFTLTNLGAPAAFKYFDTTIDRKRYTSTKEVLDATLIHQSITGLYETRIDLSQLGGDGGGGGGSGGGGSGGWVQEISDSRPMLHIYLNGRRFLGLLNTGADKTCIAGRDWPANWPIHQTESSLQGLGMACGVARSSQPLRWQHEDKSGIIHPFVIPTLPFTLWGRDIMKDIKVRLMTDSPDDSQDLMIGAIESNLFADQISWKSDQPVWLNQWPLKQEKLQALQQLVTEQLQLGHLEESNSPWNTPVFVIKKKSGKWRLLQDLRAVNATMHDMGALQPGLPSPVAVPKGWEIIIIDLQDCFFNIKLHPEDCKRFAFSVPSPNFKRPYQRFQWKVLPQGMKNSPTLCQKFVDKAILTVRDKYQDSYIVHYMDDILLAHPSRSIVDEILTSMIQALNKHGLVVSTEKIQKYDNLKYLGTHIQGDSVSYQKLQIRTDKLRTLNDFQKLLGNINWIRPFLKLTTGELKPLFEILNGDSNPISTRKLTPEACKALQLMNERLSTARVKRLDLSQPWSLCILKTEYTPTACLWQDGVVEWIHLPHISPKVITPYDIFCTQLIIKGRHRSKELFSKDPDYIVVPYTKVQFDLLLQEKEDWPISLLGFLGEVHFHLPKDPLLTFTLQTAIIFPHMTSTTPLEKGIVIFTDGSANGRSVTYIQGREPIIKENTQNTAQQAEIVAVITAFEEVSQPFNLYTDSKYVTGLFPEIETATLSPRTKIYTELKHLQRLIHKRQEKFYIGHIRGHTGLPGPLAQGNAYADSLTRILTAGKRTADGSEFEKRTADGSEFESPKKKAKVE

SEQ ID NO: 3195 - protein, 2114 aa, synthetic construct
MPAAKRVKLDGGDKKYSIGLDIGTNSVGWAVITDEYKVPSKKFKVLGNTDRHSIKKNLIGALLFDSGETAEATRLKRTARRRYTRRKNRICYLQEIFSNEMAKVDDSFFHRLEESFLVEEDKKHERHPIFGNIVDEVAYHEKYPTIYHLRKKLVDSTDKADLRLIYLALAHMIKFRGHFLIEGDLNPDNSDVDKLFIQLVQTYNQLFEENPINASGVDAKAILSARLSKSRRLENLIAQLPGEKKNGLFGNLIALSLGLTPNFKSNFDLAEDAKLQLSKDTYDDDLDNLLAQIGDQYADLFLAAKNLSDAILLSDILRVNTEITKAPLSASMIKRYDEHHQDLTLLKALVRQQLPEKYKEIFFDQSKNGYAGYIDGGASQEEFYKFIKPILEKMDGTEELLVKLNREDLLRKQRTFDNGSIPHQIHLGELHAILRRQEDFYPFLKDNREKIEKILTFRIPYYVGPLARGNSRFAWMTRKSEETITPWNFEEVVDKGASAQSFIERMTNFDKNLPNEKVLPKHSLLYEYFTVYNELTKVKYVTEGMRKPAFLSGEQKKAIVDLLFKTNRKVTVKQLKEDYFKKIECFDSVEISGVEDRFNASLGTYHDLLKIIKDKDFLDNEENEDILEDIVLTLTLFEDREMIEERLKTYAHLFDDKVMKQLKRRRYTGWGRLSRKLINGIRDKQSGKTILDFLKSDGFANRNFMQLIHDDSLTFKEDIQKAQVSGQGDSLHEHIANLAGSPAIKKGILQTVKVVDELVKVMGRHKPENIVIEMARENQTTQKGQKNSRERMKRIEEGIKELGSQILKEHPVENTQLQNEKLYLYYLQNGRDMYVDQELDINRLSDYDVDHIVPQSFLKDDSIDNKVLTRSDKARGKSDNVPSEEVVKKMKNYWRQLLNAKLITQRKFDNLTKAERGGLSELDKAGFIKRQLVETRQITKHVAQILDSRMNTKYDENDKLIREVKVITLKSKLVSDFRKDFQFYKVREINNYHHAHDAYLNAVVGTALIKKYPKLESEFVYGDYKVYDVRKMIAKSEQEIGKATAKYFFYSNIMNFFKTEITLANGEIRKRPLIETNGETGEIVWDKGRDFATVRKVLSMPQVNIVKKTEVQTGGFSKESILPKRNSDKLIARKKDWDPKKYGGFDSPTVAYSVLVVAKVEKGKSKKLKSVKELLGITIMERSSFEKNPIDFLEAKGYKEVKKDLIIKLPKYSLFELENGRKRMLASAGELQKGNELALPSKYVNFLYLASHYEKLKGSPEDNEQKQLFVEQHKHYLDEIIEQISEFSKRVILADANLDKVLSAYNKHRDKPIREQAENIIHLFTLTNLGAPAAFKYFDTTIDRKRYTSTKEVLDATLIHQSITGLYETRIDLSQLGGDGGPAPGGGGSSGGWVQEISDSRPMLHIYLNGRRFLGLLNTGADKTCIAGRDWPANWPIHQTESSLQGLGMACGVARSSQPLRWQHEDKSGIIHPFVIPTLPFTLWGRDIMKDIKVRLMTDSPDDSQDLMIGAIESNLFADQISWKSDQPVWLNQWPLKQEKLQALQQLVTEQLQLGHLEESNSPWNTPVFVIKKKSGKWRLLQDLRAVNATMHDMGALQPGLPSPVAVPKGWEIIIIDLQDCFFNIKLHPEDCKRFAFSVPSPNFKRPYQRFQWKVLPQGMKNSPTLCQKFVDKAILTVRDKYQDSYIVHYMDDILLAHPSRSIVDEILTSMIQALNKHGLVVSTEKIQKYDNLKYLGTHIQGDSVSYQKLQIRTDKLRTLNDFQKLLGNINWIRPFLKLTTGELKPLFEILNGDSNPISTRKLTPEACKALQLMNERLSTARVKRLDLSQPWSLCILKTEYTPTACLWQDGVVEWIHLPHISPKVITPYDIFCTQLIIKGRHRSKELFSKDPDYIVVPYTKVQFDLLLQEKEDWPISLLGFLGEVHFHLPKDPLLTFTLQTAIIFPHMTSTTPLEKGIVIFTDGSANGRSVTYIQGREPIIKENTQNTAQQAEIVAVITAFEEVSQPFNLYTDSKYVTGLFPEIETATLSPRTKIYTELKHLQRLIHKRQEKFYIGHIRGHTGLPGPLAQGNAYADSLTRILTAGKRTADGSEFEKRTADGSEFESPKKKAKVE

SEQ ID NO: 3196 - protein, 2024 aa, synthetic construct
MPAAKRVKLDGGDKKYSIGLDIGTNSVGWAVITDEYKVPSKKFKVLGNTDRHSIKKNLIGALLFDSGETAEATRLKRTARRRYTRRKNRICYLQEIFSNEMAKVDDSFFHRLEESFLVEEDKKHERHPIFGNIVDEVAYHEKYPTIYHLRKKLVDSTDKADLRLIYLALAHMIKFRGHFLIEGDLNPDNSDVDKLFIQLVQTYNQLFEENPINASGVDAKAILSARLSKSRRLENLIAQLPGEKKNGLFGNLIALSLGLTPNFKSNFDLAEDAKLQLSKDTYDDDLDNLLAQIGDQYADLFLAAKNLSDAILLSDILRVNTEITKAPLSASMIKRYDEHHQDLTLLKALVRQQLPEKYKEIFFDQSKNGYAGYIDGGASQEEFYKFIKPILEKMDGTEELLVKLNREDLLRKQRTFDNGSIPHQIHLGELHAILRRQEDFYPFLKDNREKIEKILTFRIPYYVGPLARGNSRFAWMTRKSEETITPWNFEEVVDKGASAQSFIERMTNFDKNLPNEKVLPKHSLLYEYFTVYNELTKVKYVTEGMRKPAFLSGEQKKAIVDLLFKTNRKVTVKQLKEDYFKKIECFDSVEISGVEDRFNASLGTYHDLLKIIKDKDFLDNEENEDILEDIVLTLTLFEDREMIEERLKTYAHLFDDKVMKQLKRRRYTGWGRLSRKLINGIRDKQSGKTILDFLKSDGFANRNFMQLIHDDSLTFKEDIQKAQVSGQGDSLHEHIANLAGSPAIKKGILQTVKVVDELVKVMGRHKPENIVIEMARENQTTQKGQKNSRERMKRIEEGIKELGSQILKEHPVENTQLQNEKLYLYYLQNGRDMYVDQELDINRLSDYDVDHIVPQSFLKDDSIDNKVLTRSDKARGKSDNVPSEEVVKKMKNYWRQLLNAKLITQRKFDNLTKAERGGLSELDKAGFIKRQLVETRQITKHVAQILDSRMNTKYDENDKLIREVKVITLKSKLVSDFRKDFQFYKVREINNYHHAHDAYLNAVVGTALIKKYPKLESEFVYGDYKVYDVRKMIAKSEQEIGKATAKYFFYSNIMNFFKTEITLANGEIRKRPLIETNGETGEIVWDKGRDFATVRKVLSMPQVNIVKKTEVQTGGFSKESILPKRNSDKLIARKKDWDPKKYGGFDSPTVAYSVLVVAKVEKGKSKKLKSVKELLGITIMERSSFEKNPIDFLEAKGYKEVKKDLIIKLPKYSLFELENGRKRMLASAGELQKGNELALPSKYVNFLYLASHYEKLKGSPEDNEQKQLFVEQHKHYLDEIIEQISEFSKRVILADANLDKVLSAYNKHRDKPIREQAENIIHLFTLTNLGAPAAFKYFDTTIDRKRYTSTKEVLDATLIHQSITGLYETRIDLSQLGGDGGGGGPAPEAAAKGGGRDIMKDIKVRLMTDSPDDSQDLMIGAIESNLFADQISWKSDQPVWLNQWPLKQEKLQALQQLVTEQLQLGHLEESNSPWNTPVFVIKKKSGKWRLLQDLRAVNATMHDMGALQPGLPSPVAVPKGWEIIIIDLQDCFFNIKLHPEDCKRFAFSVPSPNFKRPYQRFQWKVLPQGMKNSPTLCQKFVDKAILTVRDKYQDSYIVHYMDDILLAHPSRSIVDEILTSMIQALNKHGLVVSTEKIQKYDNLKYLGTHIQGDSVSYQKLQIRTDKLRTLNDFQKLLGNINWIRPFLKLTTGELKPLFEILNGDSNPISTRKLTPEACKALQLMNERLSTARVKRLDLSQPWSLCILKTEYTPTACLWQDGVVEWIHLPHISPKVITPYDIFCTQLIIKGRHRSKELFSKDPDYIVVPYTKVQFDLLLQEKEDWPISLLGFLGEVHFHLPKDPLLTFTLQTAIIFPHMTSTTPLEKGIVIFTDGSANGRSVTYIQGREPIIKENTQNTAQQAEIVAVITAFEEVSQPFNLYTDSKYVTGLFPEIETATLSPRTKIYTELKHLQRLIHKRQEKFYIGHIRGHTGLPGPLAQGNAYADSLTRILTAGKRTADGSEFEKRTADGSEFESPKKKAKVE

SEQ ID NO: 3197 - protein, 2059 aa, synthetic construct
MPAAKRVKLDGGDKKYSIGLDIGTNSVGWAVITDEYKVPSKKFKVLGNTDRHSIKKNLIGALLFDSGETAEATRLKRTARRRYTRRKNRICYLQEIFSNEMAKVDDSFFHRLEESFLVEEDKKHERHPIFGNIVDEVAYHEKYPTIYHLRKKLVDSTDKADLRLIYLALAHMIKFRGHFLIEGDLNPDNSDVDKLFIQLVQTYNQLFEENPINASGVDAKAILSARLSKSRRLENLIAQLPGEKKNGLFGNLIALSLGLTPNFKSNFDLAEDAKLQLSKDTYDDDLDNLLAQIGDQYADLFLAAKNLSDAILLSDILRVNTEITKAPLSASMIKRYDEHHQDLTLLKALVRQQLPEKYKEIFFDQSKNGYAGYIDGGASQEEFYKFIKPILEKMDGTEELLVKLNREDLLRKQRTFDNGSIPHQIHLGELHAILRRQEDFYPFLKDNREKIEKILTFRIPYYVGPLARGNSRFAWMTRKSEETITPWNFEEVVDKGASAQSFIERMTNFDKNLPNEKVLPKHSLLYEYFTVYNELTKVKYVTEGMRKPAFLSGEQKKAIVDLLFKTNRKVTVKQLKEDYFKKIECFDSVEISGVEDRFNASLGTYHDLLKIIKDKDFLDNEENEDILEDIVLTLTLFEDREMIEERLKTYAHLFDDKVMKQLKRRRYTGWGRLSRKLINGIRDKQSGKTILDFLKSDGFANRNFMQLIHDDSLTFKEDIQKAQVSGQGDSLHEHIANLAGSPAIKKGILQTVKVVDELVKVMGRHKPENIVIEMARENQTTQKGQKNSRERMKRIEEGIKELGSQILKEHPVENTQLQNEKLYLYYLQNGRDMYVDQELDINRLSDYDVDHIVPQSFLKDDSIDNKVLTRSDKARGKSDNVPSEEVVKKMKNYWRQLLNAKLITQRKFDNLTKAERGGLSELDKAGFIKRQLVETRQITKHVAQILDSRMNTKYDENDKLIREVKVITLKSKLVSDFRKDFQFYKVREINNYHHAHDAYLNAVVGTALIKKYPKLESEFVYGDYKVYDVRKMIAKSEQEIGKATAKYFFYSNIMNFFKTEITLANGEIRKRPLIETNGETGEIVWDKGRDFATVRKVLSMPQVNIVKKTEVQTGGFSKESILPKRNSDKLIARKKDWDPKKYGGFDSPTVAYSVLVVAKVEKGKSKKLKSVKELLGITIMERSSFEKNPIDFLEAKGYKEVKKDLIIKLPKYSLFELENGRKRMLASAGELQKGNELALPSKYVNFLYLASHYEKLKGSPEDNEQKQLFVEQHKHYLDEIIEQISEFSKRVILADANLDKVLSAYNKHRDKPIREQAENIIHLFTLTNLGAPAAFKYFDTTIDRKRYTSTKEVLDATLIHQSITGLYETRIDLSQLGGDGGAEAAAKEAAAKEAAAKEAAAKALEAEAAAKEAAAKEAAAKEAAAKAGGGRDIMKDIKVRLMTDSPDDSQDLMIGAIESNLFADQISWKSDQPVWLNQWPLKQEKLQALQQLVTEQLQLGHLEESNSPWNTPVFVIKKKSGKWRLLQDLRAVNATMHDMGALQPGLPSPVAVPKGWEIIIIDLQDCFFNIKLHPEDCKRFAFSVPSPNFKRPYQRFQWKVLPQGMKNSPTLCQKFVDKAILTVRDKYQDSYIVHYMDDILLAHPSRSIVDEILTSMIQALNKHGLVVSTEKIQKYDNLKYLGTHIQGDSVSYQKLQIRTDKLRTLNDFQKLLGNINWIRPFLKLTTGELKPLFEILNGDSNPISTRKLTPEACKALQLMNERLSTARVKRLDLSQPWSLCILKTEYTPTACLWQDGVVEWIHLPHISPKVITPYDIFCTQLIIKGRHRSKELFSKDPDYIVVPYTKVQFDLLLQEKEDWPISLLGFLGEVHFHLPKDPLLTFTLQTAIIFPHMTSTTPLEKGIVIFTDGSANGRSVTYIQGREPIIKENTQNTAQQAEIVAVITAFEEVSQPFNLYTDSKYVTGLFPEIETATLSPRTKIYTELKHLQRLIHKRQEKFYIGHIRGHTGLPGPLAQGNAYADSLTRILTAGKRTADGSEFEKRTADGSEFESPKKKAKVE

SEQ ID NO: 3198 - protein, 2024 aa, synthetic construct
MPAAKRVKLDGGDKKYSIGLDIGTNSVGWAVITDEYKVPSKKFKVLGNTDRHSIKKNLIGALLFDSGETAEATRLKRTARRRYTRRKNRICYLQEIFSNEMAKVDDSFFHRLEESFLVEEDKKHERHPIFGNIVDEVAYHEKYPTIYHLRKKLVDSTDKADLRLIYLALAHMIKFRGHFLIEGDLNPDNSDVDKLFIQLVQTYNQLFEENPINASGVDAKAILSARLSKSRRLENLIAQLPGEKKNGLFGNLIALSLGLTPNFKSNFDLAEDAKLQLSKDTYDDDLDNLLAQIGDQYADLFLAAKNLSDAILLSDILRVNTEITKAPLSASMIKRYDEHHQDLTLLKALVRQQLPEKYKEIFFDQSKNGYAGYIDGGASQEEFYKFIKPILEKMDGTEELLVKLNREDLLRKQRTFDNGSIPHQIHLGELHAILRRQEDFYPFLKDNREKIEKILTFRIPYYVGPLARGNSRFAWMTRKSEETITPWNFEEVVDKGASAQSFIERMTNFDKNLPNEKVLPKHSLLYEYFTVYNELTKVKYVTEGMRKPAFLSGEQKKAIVDLLFKTNRKVTVKQLKEDYFKKIECFDSVEISGVEDRFNASLGTYHDLLKIIKDKDFLDNEENEDILEDIVLTLTLFEDREMIEERLKTYAHLFDDKVMKQLKRRRYTGWGRLSRKLINGIRDKQSGKTILDFLKSDGFANRNFMQLIHDDSLTFKEDIQKAQVSGQGDSLHEHIANLAGSPAIKKGILQTVKVVDELVKVMGRHKPENIVIEMARENQTTQKGQKNSRERMKRIEEGIKELGSQILKEHPVENTQLQNEKLYLYYLQNGRDMYVDQELDINRLSDYDVDHIVPQSFLKDDSIDNKVLTRSDKARGKSDNVPSEEVVKKMKNYWRQLLNAKLITQRKFDNLTKAERGGLSELDKAGFIKRQLVETRQITKHVAQILDSRMNTKYDENDKLIREVKVITLKSKLVSDFRKDFQFYKVREINNYHHAHDAYLNAVVGTALIKKYPKLESEFVYGDYKVYDVRKMIAKSEQEIGKATAKYFFYSNIMNFFKTEITLANGEIRKRPLIETNGETGEIVWDKGRDFATVRKVLSMPQVNIVKKTEVQTGGFSKESILPKRNSDKLIARKKDWDPKKYGGFDSPTVAYSVLVVAKVEKGKSKKLKSVKELLGITIMERSSFEKNPIDFLEAKGYKEVKKDLIIKLPKYSLFELENGRKRMLASAGELQKGNELALPSKYVNFLYLASHYEKLKGSPEDNEQKQLFVEQHKHYLDEIIEQISEFSKRVILADANLDKVLSAYNKHRDKPIREQAENIIHLFTLTNLGAPAAFKYFDTTIDRKRYTSTKEVLDATLIHQSITGLYETRIDLSQLGGDGGPAPGSSEAAAKGGGRDIMKDIKVRLMTDSPDDSQDLMIGAIESNLFADQISWKSDQPVWLNQWPLKQEKLQALQQLVTEQLQLGHLEESNSPWNTPVFVIKKKSGKWRLLQDLRAVNATMHDMGALQPGLPSPVAVPKGWEIIIIDLQDCFFNIKLHPEDCKRFAFSVPSPNFKRPYQRFQWKVLPQGMKNSPTLCQKFVDKAILTVRDKYQDSYIVHYMDDILLAHPSRSIVDEILTSMIQALNKHGLVVSTEKIQKYDNLKYLGTHIQGDSVSYQKLQIRTDKLRTLNDFQKLLGNINWIRPFLKLTTGELKPLFEILNGDSNPISTRKLTPEACKALQLMNERLSTARVKRLDLSQPWSLCILKTEYTPTACLWQDGVVEWIHLPHISPKVITPYDIFCTQLIIKGRHRSKELFSKDPDYIVVPYTKVQFDLLLQEKEDWPISLLGFLGEVHFHLPKDPLLTFTLQTAIIFPHMTSTTPLEKGIVIFTDGSANGRSVTYIQGREPIIKENTQNTAQQAEIVAVITAFEEVSQPFNLYTDSKYVTGLFPEIETATLSPRTKIYTELKHLQRLIHKRQEKFYIGHIRGHTGLPGPLAQGNAYADSLTRILTAGKRTADGSEFEKRTADGSEFESPKKKAKVE

SEQ ID NO: 3199 - protein, 2022 aa, synthetic construct
MPAAKRVKLDGGDKKYSIGLDIGTNSVGWAVITDEYKVPSKKFKVLGNTDRHSIKKNLIGALLFDSGETAEATRLKRTARRRYTRRKNRICYLQEIFSNEMAKVDDSFFHRLEESFLVEEDKKHERHPIFGNIVDEVAYHEKYPTIYHLRKKLVDSTDKADLRLIYLALAHMIKFRGHFLIEGDLNPDNSDVDKLFIQLVQTYNQLFEENPINASGVDAKAILSARLSKSRRLENLIAQLPGEKKNGLFGNLIALSLGLTPNFKSNFDLAEDAKLQLSKDTYDDDLDNLLAQIGDQYADLFLAAKNLSDAILLSDILRVNTEITKAPLSASMIKRYDEHHQDLTLLKALVRQQLPEKYKEIFFDQSKNGYAGYIDGGASQEEFYKFIKPILEKMDGTEELLVKLNREDLLRKQRTFDNGSIPHQIHLGELHAILRRQEDFYPFLKDNREKIEKILTFRIPYYVGPLARGNSRFAWMTRKSEETITPWNFEEVVDKGASAQSFIERMTNFDKNLPNEKVLPKHSLLYEYFTVYNELTKVKYVTEGMRKPAFLSGEQKKAIVDLLFKTNRKVTVKQLKEDYFKKIECFDSVEISGVEDRFNASLGTYHDLLKIIKDKDFLDNEENEDILEDIVLTLTLFEDREMIEERLKTYAHLFDDKVMKQLKRRRYTGWGRLSRKLINGIRDKQSGKTILDFLKSDGFANRNFMQLIHDDSLTFKEDIQKAQVSGQGDSLHEHIANLAGSPAIKKGILQTVKVVDELVKVMGRHKPENIVIEMARENQTTQKGQKNSRERMKRIEEGIKELGSQILKEHPVENTQLQNEKLYLYYLQNGRDMYVDQELDINRLSDYDVDHIVPQSFLKDDSIDNKVLTRSDKARGKSDNVPSEEVVKKMKNYWRQLLNAKLITQRKFDNLTKAERGGLSELDKAGFIKRQLVETRQITKHVAQILDSRMNTKYDENDKLIREVKVITLKSKLVSDFRKDFQFYKVREINNYHHAHDAYLNAVVGTALIKKYPKLESEFVYGDYKVYDVRKMIAKSEQEIGKATAKYFFYSNIMNFFKTEITLANGEIRKRPLIETNGETGEIVWDKGRDFATVRKVLSMPQVNIVKKTEVQTGGFSKESILPKRNSDKLIARKKDWDPKKYGGFDSPTVAYSVLVVAKVEKGKSKKLKSVKELLGITIMERSSFEKNPIDFLEAKGYKEVKKDLIIKLPKYSLFELENGRKRMLASAGELQKGNELALPSKYVNFLYLASHYEKLKGSPEDNEQKQLFVEQHKHYLDEIIEQISEFSKRVILADANLDKVLSAYNKHRDKPIREQAENIIHLFTLTNLGAPAAFKYFDTTIDRKRYTSTKEVLDATLIHQSITGLYETRIDLSQLGGDGGGGSGGGGSSGGGRDIMKDIKVRLMTDSPDDSQDLMIGAIESNLFADQISWKSDQPVWLNQWPLKQEKLQALQQLVTEQLQLGHLEESNSPWNTPVFVIKKKSGKWRLLQDLRAVNATMHDMGALQPGLPSPVAVPKGWEIIIIDLQDCFFNIKLHPEDCKRFAFSVPSPNFKRPYQRFQWKVLPQGMKNSPTLCQKFVDKAILTVRDKYQDSYIVHYMDDILLAHPSRSIVDEILTSMIQALNKHGLVVSTEKIQKYDNLKYLGTHIQGDSVSYQKLQIRTDKLRTLNDFQKLLGNINWIRPFLKLTTGELKPLFEILNGDSNPISTRKLTPEACKALQLMNERLSTARVKRLDLSQPWSLCILKTEYTPTACLWQDGVVEWIHLPHISPKVITPYDIFCTQLIIKGRHRSKELFSKDPDYIVVPYTKVQFDLLLQEKEDWPISLLGFLGEVHFHLPKDPLLTFTLQTAIIFPHMTSTTPLEKGIVIFTDGSANGRSVTYIQGREPIIKENTQNTAQQAEIVAVITAFEEVSQPFNLYTDSKYVTGLFPEIETATLSPRTKIYTELKHLQRLIHKRQEKFYIGHIRGHTGLPGPLAQGNAYADSLTRILTAGKRTADGSEFEKRTADGSEFESPKKKAKVE

SEQ ID NO: 3200 - protein, 2024 aa, synthetic construct
MPAAKRVKLDGGDKKYSIGLDIGTNSVGWAVITDEYKVPSKKFKVLGNTDRHSIKKNLIGALLFDSGETAEATRLKRTARRRYTRRKNRICYLQEIFSNEMAKVDDSFFHRLEESFLVEEDKKHERHPIFGNIVDEVAYHEKYPTIYHLRKKLVDSTDKADLRLIYLALAHMIKFRGHFLIEGDLNPDNSDVDKLFIQLVQTYNQLFEENPINASGVDAKAILSARLSKSRRLENLIAQLPGEKKNGLFGNLIALSLGLTPNFKSNFDLAEDAKLQLSKDTYDDDLDNLLAQIGDQYADLFLAAKNLSDAILLSDILRVNTEITKAPLSASMIKRYDEHHQDLTLLKALVRQQLPEKYKEIFFDQSKNGYAGYIDGGASQEEFYKFIKPILEKMDGTEELLVKLNREDLLRKQRTFDNGSIPHQIHLGELHAILRRQEDFYPFLKDNREKIEKILTFRIPYYVGPLARGNSRFAWMTRKSEETITPWNFEEVVDKGASAQSFIERMTNFDKNLPNEKVLPKHSLLYEYFTVYNELTKVKYVTEGMRKPAFLSGEQKKAIVDLLFKTNRKVTVKQLKEDYFKKIECFDSVEISGVEDRFNASLGTYHDLLKIIKDKDFLDNEENEDILEDIVLTLTLFEDREMIEERLKTYAHLFDDKVMKQLKRRRYTGWGRLSRKLINGIRDKQSGKTILDFLKSDGFANRNFMQLIHDDSLTFKEDIQKAQVSGQGDSLHEHIANLAGSPAIKKGILQTVKVVDELVKVMGRHKPENIVIEMARENQTTQKGQKNSRERMKRIEEGIKELGSQILKEHPVENTQLQNEKLYLYYLQNGRDMYVDQELDINRLSDYDVDHIVPQSFLKDDSIDNKVLTRSDKARGKSDNVPSEEVVKKMKNYWRQLLNAKLITQRKFDNLTKAERGGLSELDKAGFIKRQLVETRQITKHVAQILDSRMNTKYDENDKLIREVKVITLKSKLVSDFRKDFQFYKVREINNYHHAHDAYLNAVVGTALIKKYPKLESEFVYGDYKVYDVRKMIAKSEQEIGKATAKYFFYSNIMNFFKTEITLANGEIRKRPLIETNGETGEIVWDKGRDFATVRKVLSMPQVNIVKKTEVQTGGFSKESILPKRNSDKLIARKKDWDPKKYGGFDSPTVAYSVLVVAKVEKGKSKKLKSVKELLGITIMERSSFEKNPIDFLEAKGYKEVKKDLIIKLPKYSLFELENGRKRMLASAGELQKGNELALPSKYVNFLYLASHYEKLKGSPEDNEQKQLFVEQHKHYLDEIIEQISEFSKRVILADANLDKVLSAYNKHRDKPIREQAENIIHLFTLTNLGAPAAFKYFDTTIDRKRYTSTKEVLDATLIHQSITGLYETRIDLSQLGGDGGPAPEAAAKGGGGGGRDIMKDIKVRLMTDSPDDSQDLMIGAIESNLFADQISWKSDQPVWLNQWPLKQEKLQALQQLVTEQLQLGHLEESNSPWNTPVFVIKKKSGKWRLLQDLRAVNATMHDMGALQPGLPSPVAVPKGWEIIIIDLQDCFFNIKLHPEDCKRFAFSVPSPNFKRPYQRFQWKVLPQGMKNSPTLCQKFVDKAILTVRDKYQDSYIVHYMDDILLAHPSRSIVDEILTSMIQALNKHGLVVSTEKIQKYDNLKYLGTHIQGDSVSYQKLQIRTDKLRTLNDFQKLLGNINWIRPFLKLTTGELKPLFEILNGDSNPISTRKLTPEACKALQLMNERLSTARVKRLDLSQPWSLCILKTEYTPTACLWQDGVVEWIHLPHISPKVITPYDIFCTQLIIKGRHRSKELFSKDPDYIVVPYTKVQFDLLLQEKEDWPISLLGFLGEVHFHLPKDPLLTFTLQTAIIFPHMTSTTPLEKGIVIFTDGSANGRSVTYIQGREPIIKENTQNTAQQAEIVAVITAFEEVSQPFNLYTDSKYVTGLFPEIETATLSPRTKIYTELKHLQRLIHKRQEKFYIGHIRGHTGLPGPLAQGNAYADSLTRILTAGKRTADGSEFEKRTADGSEFESPKKKAKVE

SEQ ID NO: 3201 - protein, 2028 aa, synthetic construct
MPAAKRVKLDGGDKKYSIGLDIGTNSVGWAVITDEYKVPSKKFKVLGNTDRHSIKKNLIGALLFDSGETAEATRLKRTARRRYTRRKNRICYLQEIFSNEMAKVDDSFFHRLEESFLVEEDKKHERHPIFGNIVDEVAYHEKYPTIYHLRKKLVDSTDKADLRLIYLALAHMIKFRGHFLIEGDLNPDNSDVDKLFIQLVQTYNQLFEENPINASGVDAKAILSARLSKSRRLENLIAQLPGEKKNGLFGNLIALSLGLTPNFKSNFDLAEDAKLQLSKDTYDDDLDNLLAQIGDQYADLFLAAKNLSDAILLSDILRVNTEITKAPLSASMIKRYDEHHQDLTLLKALVRQQLPEKYKEIFFDQSKNGYAGYIDGGASQEEFYKFIKPILEKMDGTEELLVKLNREDLLRKQRTFDNGSIPHQIHLGELHAILRRQEDFYPFLKDNREKIEKILTFRIPYYVGPLARGNSRFAWMTRKSEETITPWNFEEVVDKGASAQSFIERMTNFDKNLPNEKVLPKHSLLYEYFTVYNELTKVKYVTEGMRKPAFLSGEQKKAIVDLLFKTNRKVTVKQLKEDYFKKIECFDSVEISGVEDRFNASLGTYHDLLKIIKDKDFLDNEENEDILEDIVLTLTLFEDREMIEERLKTYAHLFDDKVMKQLKRRRYTGWGRLSRKLINGIRDKQSGKTILDFLKSDGFANRNFMQLIHDDSLTFKEDIQKAQVSGQGDSLHEHIANLAGSPAIKKGILQTVKVVDELVKVMGRHKPENIVIEMARENQTTQKGQKNSRERMKRIEEGIKELGSQILKEHPVENTQLQNEKLYLYYLQNGRDMYVDQELDINRLSDYDVDHIVPQSFLKDDSIDNKVLTRSDKARGKSDNVPSEEVVKKMKNYWRQLLNAKLITQRKFDNLTKAERGGLSELDKAGFIKRQLVETRQITKHVAQILDSRMNTKYDENDKLIREVKVITLKSKLVSDFRKDFQFYKVREINNYHHAHDAYLNAVVGTALIKKYPKLESEFVYGDYKVYDVRKMIAKSEQEIGKATAKYFFYSNIMNFFKTEITLANGEIRKRPLIETNGETGEIVWDKGRDFATVRKVLSMPQVNIVKKTEVQTGGFSKESILPKRNSDKLIARKKDWDPKKYGGFDSPTVAYSVLVVAKVEKGKSKKLKSVKELLGITIMERSSFEKNPIDFLEAKGYKEVKKDLIIKLPKYSLFELENGRKRMLASAGELQKGNELALPSKYVNFLYLASHYEKLKGSPEDNEQKQLFVEQHKHYLDEIIEQISEFSKRVILADANLDKVLSAYNKHRDKPIREQAENIIHLFTLTNLGAPAAFKYFDTTIDRKRYTSTKEVLDATLIHQSITGLYETRIDLSQLGGDGGEAAAKGGGGSEAAAKGGGRDIMKDIKVRLMTDSPDDSQDLMIGAIESNLFADQISWKSDQPVWLNQWPLKQEKLQALQQLVTEQLQLGHLEESNSPWNTPVFVIKKKSGKWRLLQDLRAVNATMHDMGALQPGLPSPVAVPKGWEIIIIDLQDCFFNIKLHPEDCKRFAFSVPSPNFKRPYQRFQWKVLPQGMKNSPTLCQKFVDKAILTVRDKYQDSYIVHYMDDILLAHPSRSIVDEILTSMIQALNKHGLVVSTEKIQKYDNLKYLGTHIQGDSVSYQKLQIRTDKLRTLNDFQKLLGNINWIRPFLKLTTGELKPLFEILNGDSNPISTRKLTPEACKALQLMNERLSTARVKRLDLSQPWSLCILKTEYTPTACLWQDGVVEWIHLPHISPKVITPYDIFCTQLIIKGRHRSKELFSKDPDYIVVPYTKVQFDLLLQEKEDWPISLLGFLGEVHFHLPKDPLLTFTLQTAIIFPHMTSTTPLEKGIVIFTDGSANGRSVTYIQGREPIIKENTQNTAQQAEIVAVITAFEEVSQPFNLYTDSKYVTGLFPEIETATLSPRTKIYTELKHLQRLIHKRQEKFYIGHIRGHTGLPGPLAQGNAYADSLTRILTAGKRTADGSEFEKRTADGSEFESPKKKAKVE

SEQ ID NO: 3202 - protein, 2019 aa, synthetic construct
MPAAKRVKLDGGDKKYSIGLDIGTNSVGWAVITDEYKVPSKKFKVLGNTDRHSIKKNLIGALLFDSGETAEATRLKRTARRRYTRRKNRICYLQEIFSNEMAKVDDSFFHRLEESFLVEEDKKHERHPIFGNIVDEVAYHEKYPTIYHLRKKLVDSTDKADLRLIYLALAHMIKFRGHFLIEGDLNPDNSDVDKLFIQLVQTYNQLFEENPINASGVDAKAILSARLSKSRRLENLIAQLPGEKKNGLFGNLIALSLGLTPNFKSNFDLAEDAKLQLSKDTYDDDLDNLLAQIGDQYADLFLAAKNLSDAILLSDILRVNTEITKAPLSASMIKRYDEHHQDLTLLKALVRQQLPEKYKEIFFDQSKNGYAGYIDGGASQEEFYKFIKPILEKMDGTEELLVKLNREDLLRKQRTFDNGSIPHQIHLGELHAILRRQEDFYPFLKDNREKIEKILTFRIPYYVGPLARGNSRFAWMTRKSEETITPWNFEEVVDKGASAQSFIERMTNFDKNLPNEKVLPKHSLLYEYFTVYNELTKVKYVTEGMRKPAFLSGEQKKAIVDLLFKTNRKVTVKQLKEDYFKKIECFDSVEISGVEDRFNASLGTYHDLLKIIKDKDFLDNEENEDILEDIVLTLTLFEDREMIEERLKTYAHLFDDKVMKQLKRRRYTGWGRLSRKLINGIRDKQSGKTILDFLKSDGFANRNFMQLIHDDSLTFKEDIQKAQVSGQGDSLHEHIANLAGSPAIKKGILQTVKVVDELVKVMGRHKPENIVIEMARENQTTQKGQKNSRERMKRIEEGIKELGSQILKEHPVENTQLQNEKLYLYYLQNGRDMYVDQELDINRLSDYDVDHIVPQSFLKDDSIDNKVLTRSDKARGKSDNVPSEEVVKKMKNYWRQLLNAKLITQRKFDNLTKAERGGLSELDKAGFIKRQLVETRQITKHVAQILDSRMNTKYDENDKLIREVKVITLKSKLVSDFRKDFQFYKVREINNYHHAHDAYLNAVVGTALIKKYPKLESEFVYGDYKVYDVRKMIAKSEQEIGKATAKYFFYSNIMNFFKTEITLANGEIRKRPLIETNGETGEIVWDKGRDFATVRKVLSMPQVNIVKKTEVQTGGFSKESILPKRNSDKLIARKKDWDPKKYGGFDSPTVAYSVLVVAKVEKGKSKKLKSVKELLGITIMERSSFEKNPIDFLEAKGYKEVKKDLIIKLPKYSLFELENGRKRMLASAGELQKGNELALPSKYVNFLYLASHYEKLKGSPEDNEQKQLFVEQHKHYLDEIIEQISEFSKRVILADANLDKVLSAYNKHRDKPIREQAENIIHLFTLTNLGAPAAFKYFDTTIDRKRYTSTKEVLDATLIHQSITGLYETRIDLSQLGGDGGGGGPAPGGGRDIMKDIKVRLMTDSPDDSQDLMIGAIESNLFADQISWKSDQPVWLNQWPLKQEKLQALQQLVTEQLQLGHLEESNSPWNTPVFVIKKKSGKWRLLQDLRAVNATMHDMGALQPGLPSPVAVPKGWEIIIIDLQDCFFNIKLHPEDCKRFAFSVPSPNFKRPYQRFQWKVLPQGMKNSPTLCQKFVDKAILTVRDKYQDSYIVHYMDDILLAHPSRSIVDEILTSMIQALNKHGLVVSTEKIQKYDNLKYLGTHIQGDSVSYQKLQIRTDKLRTLNDFQKLLGNINWIRPFLKLTTGELKPLFEILNGDSNPISTRKLTPEACKALQLMNERLSTARVKRLDLSQPWSLCILKTEYTPTACLWQDGVVEWIHLPHISPKVITPYDIFCTQLIIKGRHRSKELFSKDPDYIVVPYTKVQFDLLLQEKEDWPISLLGFLGEVHFHLPKDPLLTFTLQTAIIFPHMTSTTPLEKGIVIFTDGSANGRSVTYIQGREPIIKENTQNTAQQAEIVAVITAFEEVSQPFNLYTDSKYVTGLFPEIETATLSPRTKIYTELKHLQRLIHKRQEKFYIGHIRGHTGLPGPLAQGNAYADSLTRILTAGKRTADGSEFEKRTADGSEFESPKKKAKVE

SEQ ID NO: 3203 - protein, 2028 aa, synthetic construct
MPAAKRVKLDGGDKKYSIGLDIGTNSVGWAVITDEYKVPSKKFKVLGNTDRHSIKKNLIGALLFDSGETAEATRLKRTARRRYTRRKNRICYLQEIFSNEMAKVDDSFFHRLEESFLVEEDKKHERHPIFGNIVDEVAYHEKYPTIYHLRKKLVDSTDKADLRLIYLALAHMIKFRGHFLIEGDLNPDNSDVDKLFIQLVQTYNQLFEENPINASGVDAKAILSARLSKSRRLENLIAQLPGEKKNGLFGNLIALSLGLTPNFKSNFDLAEDAKLQLSKDTYDDDLDNLLAQIGDQYADLFLAAKNLSDAILLSDILRVNTEITKAPLSASMIKRYDEHHQDLTLLKALVRQQLPEKYKEIFFDQSKNGYAGYIDGGASQEEFYKFIKPILEKMDGTEELLVKLNREDLLRKQRTFDNGSIPHQIHLGELHAILRRQEDFYPFLKDNREKIEKILTFRIPYYVGPLARGNSRFAWMTRKSEETITPWNFEEVVDKGASAQSFIERMTNFDKNLPNEKVLPKHSLLYEYFTVYNELTKVKYVTEGMRKPAFLSGEQKKAIVDLLFKTNRKVTVKQLKEDYFKKIECFDSVEISGVEDRFNASLGTYHDLLKIIKDKDFLDNEENEDILEDIVLTLTLFEDREMIEERLKTYAHLFDDKVMKQLKRRRYTGWGRLSRKLINGIRDKQSGKTILDFLKSDGFANRNFMQLIHDDSLTFKEDIQKAQVSGQGDSLHEHIANLAGSPAIKKGILQTVKVVDELVKVMGRHKPENIVIEMARENQTTQKGQKNSRERMKRIEEGIKELGSQILKEHPVENTQLQNEKLYLYYLQNGRDMYVDQELDINRLSDYDVDHIVPQSFLKDDSIDNKVLTRSDKARGKSDNVPSEEVVKKMKNYWRQLLNAKLITQRKFDNLTKAERGGLSELDKAGFIKRQLVETRQITKHVAQILDSRMNTKYDENDKLIREVKVITLKSKLVSDFRKDFQFYKVREINNYHHAHDAYLNAVVGTALIKKYPKLESEFVYGDYKVYDVRKMIAKSEQEIGKATAKYFFYSNIMNFFKTEITLANGEIRKRPLIETNGETGEIVWDKGRDFATVRKVLSMPQVNIVKKTEVQTGGFSKESILPKRNSDKLIARKKDWDPKKYGGFDSPTVAYSVLVVAKVEKGKSKKLKSVKELLGITIMERSSFEKNPIDFLEAKGYKEVKKDLIIKLPKYSLFELENGRKRMLASAGELQKGNELALPSKYVNFLYLASHYEKLKGSPEDNEQKQLFVEQHKHYLDEIIEQISEFSKRVILADANLDKVLSAYNKHRDKPIREQAENIIHLFTLTNLGAPAAFKYFDTTIDRKRYTSTKEVLDATLIHQSITGLYETRIDLSQLGGDGGGGGGSGGGGSGGGGSGGGRDIMKDIKVRLMTDSPDDSQDLMIGAIESNLFADQISWKSDQPVWLNQWPLKQEKLQALQQLVTEQLQLGHLEESNSPWNTPVFVIKKKSGKWRLLQDLRAVNATMHDMGALQPGLPSPVAVPKGWEIIIIDLQDCFFNIKLHPEDCKRFAFSVPSPNFKRPYQRFQWKVLPQGMKNSPTLCQKFVDKAILTVRDKYQDSYIVHYMDDILLAHPSRSIVDEILTSMIQALNKHGLVVSTEKIQKYDNLKYLGTHIQGDSVSYQKLQIRTDKLRTLNDFQKLLGNINWIRPFLKLTTGELKPLFEILNGDSNPISTRKLTPEACKALQLMNERLSTARVKRLDLSQPWSLCILKTEYTPTACLWQDGVVEWIHLPHISPKVITPYDIFCTQLIIKGRHRSKELFSKDPDYIVVPYTKVQFDLLLQEKEDWPISLLGFLGEVHFHLPKDPLLTFTLQTAIIFPHMTSTTPLEKGIVIFTDGSANGRSVTYIQGREPIIKENTQNTAQQAEIVAVITAFEEVSQPFNLYTDSKYVTGLFPEIETATLSPRTKIYTELKHLQRLIHKRQEKFYIGHIRGHTGLPGPLAQGNAYADSLTRILTAGKRTADGSEFEKRTADGSEFESPKKKAKVE

SEQ ID NO: 3204 - protein, 2022 aa, synthetic construct
MPAAKRVKLDGGDKKYSIGLDIGTNSVGWAVITDEYKVPSKKFKVLGNTDRHSIKKNLIGALLFDSGETAEATRLKRTARRRYTRRKNRICYLQEIFSNEMAKVDDSFFHRLEESFLVEEDKKHERHPIFGNIVDEVAYHEKYPTIYHLRKKLVDSTDKADLRLIYLALAHMIKFRGHFLIEGDLNPDNSDVDKLFIQLVQTYNQLFEENPINASGVDAKAILSARLSKSRRLENLIAQLPGEKKNGLFGNLIALSLGLTPNFKSNFDLAEDAKLQLSKDTYDDDLDNLLAQIGDQYADLFLAAKNLSDAILLSDILRVNTEITKAPLSASMIKRYDEHHQDLTLLKALVRQQLPEKYKEIFFDQSKNGYAGYIDGGASQEEFYKFIKPILEKMDGTEELLVKLNREDLLRKQRTFDNGSIPHQIHLGELHAILRRQEDFYPFLKDNREKIEKILTFRIPYYVGPLARGNSRFAWMTRKSEETITPWNFEEVVDKGASAQSFIERMTNFDKNLPNEKVLPKHSLLYEYFTVYNELTKVKYVTEGMRKPAFLSGEQKKAIVDLLFKTNRKVTVKQLKEDYFKKIECFDSVEISGVEDRFNASLGTYHDLLKIIKDKDFLDNEENEDILEDIVLTLTLFEDREMIEERLKTYAHLFDDKVMKQLKRRRYTGWGRLSRKLINGIRDKQSGKTILDFLKSDGFANRNFMQLIHDDSLTFKEDIQKAQVSGQGDSLHEHIANLAGSPAIKKGILQTVKVVDELVKVMGRHKPENIVIEMARENQTTQKGQKNSRERMKRIEEGIKELGSQILKEHPVENTQLQNEKLYLYYLQNGRDMYVDQELDINRLSDYDVDHIVPQSFLKDDSIDNKVLTRSDKARGKSDNVPSEEVVKKMKNYWRQLLNAKLITQRKFDNLTKAERGGLSELDKAGFIKRQLVETRQITKHVAQILDSRMNTKYDENDKLIREVKVITLKSKLVSDFRKDFQFYKVREINNYHHAHDAYLNAVVGTALIKKYPKLESEFVYGDYKVYDVRKMIAKSEQEIGKATAKYFFYSNIMNFFKTEITLANGEIRKRPLIETNGETGEIVWDKGRDFATVRKVLSMPQVNIVKKTEVQTGGFSKESILPKRNSDKLIARKKDWDPKKYGGFDSPTVAYSVLVVAKVEKGKSKKLKSVKELLGITIMERSSFEKNPIDFLEAKGYKEVKKDLIIKLPKYSLFELENGRKRMLASAGELQKGNELALPSKYVNFLYLASHYEKLKGSPEDNEQKQLFVEQHKHYLDEIIEQISEFSKRVILADANLDKVLSAYNKHRDKPIREQAENIIHLFTLTNLGAPAAFKYFDTTIDRKRYTSTKEVLDATLIHQSITGLYETRIDLSQLGGDGGGSSGGGPAPGGGRDIMKDIKVRLMTDSPDDSQDLMIGAIESNLFADQISWKSDQPVWLNQWPLKQEKLQALQQLVTEQLQLGHLEESNSPWNTPVFVIKKKSGKWRLLQDLRAVNATMHDMGALQPGLPSPVAVPKGWEIIIIDLQDCFFNIKLHPEDCKRFAFSVPSPNFKRPYQRFQWKVLPQGMKNSPTLCQKFVDKAILTVRDKYQDSYIVHYMDDILLAHPSRSIVDEILTSMIQALNKHGLVVSTEKIQKYDNLKYLGTHIQGDSVSYQKLQIRTDKLRTLNDFQKLLGNINWIRPFLKLTTGELKPLFEILNGDSNPISTRKLTPEACKALQLMNERLSTARVKRLDLSQPWSLCILKTEYTPTACLWQDGVVEWIHLPHISPKVITPYDIFCTQLIIKGRHRSKELFSKDPDYIVVPYTKVQFDLLLQEKEDWPISLLGFLGEVHFHLPKDPLLTFTLQTAIIFPHMTSTTPLEKGIVIFTDGSANGRSVTYIQGREPIIKENTQNTAQQAEIVAVITAFEEVSQPFNLYTDSKYVTGLFPEIETATLSPRTKIYTELKHLQRLIHKRQEKFYIGHIRGHTGLPGPLAQGNAYADSLTRILTAGKRTADGSEFEKRTADGSEFESPKKKAKVE

SEQ ID NO: 3205 - protein, 2022 aa, synthetic construct
MPAAKRVKLDGGDKKYSIGLDIGTNSVGWAVITDEYKVPSKKFKVLGNTDRHSIKKNLIGALLFDSGETAEATRLKRTARRRYTRRKNRICYLQEIFSNEMAKVDDSFFHRLEESFLVEEDKKHERHPIFGNIVDEVAYHEKYPTIYHLRKKLVDSTDKADLRLIYLALAHMIKFRGHFLIEGDLNPDNSDVDKLFIQLVQTYNQLFEENPINASGVDAKAILSARLSKSRRLENLIAQLPGEKKNGLFGNLIALSLGLTPNFKSNFDLAEDAKLQLSKDTYDDDLDNLLAQIGDQYADLFLAAKNLSDAILLSDILRVNTEITKAPLSASMIKRYDEHHQDLTLLKALVRQQLPEKYKEIFFDQSKNGYAGYIDGGASQEEFYKFIKPILEKMDGTEELLVKLNREDLLRKQRTFDNGSIPHQIHLGELHAILRRQEDFYPFLKDNREKIEKILTFRIPYYVGPLARGNSRFAWMTRKSEETITPWNFEEVVDKGASAQSFIERMTNFDKNLPNEKVLPKHSLLYEYFTVYNELTKVKYVTEGMRKPAFLSGEQKKAIVDLLFKTNRKVTVKQLKEDYFKKIECFDSVEISGVEDRFNASLGTYHDLLKIIKDKDFLDNEENEDILEDIVLTLTLFEDREMIEERLKTYAHLFDDKVMKQLKRRRYTGWGRLSRKLINGIRDKQSGKTILDFLKSDGFANRNFMQLIHDDSLTFKEDIQKAQVSGQGDSLHEHIANLAGSPAIKKGILQTVKVVDELVKVMGRHKPENIVIEMARENQTTQKGQKNSRERMKRIEEGIKELGSQILKEHPVENTQLQNEKLYLYYLQNGRDMYVDQELDINRLSDYDVDHIVPQSFLKDDSIDNKVLTRSDKARGKSDNVPSEEVVKKMKNYWRQLLNAKLITQRKFDNLTKAERGGLSELDKAGFIKRQLVETRQITKHVAQILDSRMNTKYDENDKLIREVKVITLKSKLVSDFRKDFQFYKVREINNYHHAHDAYLNAVVGTALIKKYPKLESEFVYGDYKVYDVRKMIAKSEQEIGKATAKYFFYSNIMNFFKTEITLANGEIRKRPLIETNGETGEIVWDKGRDFATVRKVLSMPQVNIVKKTEVQTGGFSKESILPKRNSDKLIARKKDWDPKKYGGFDSPTVAYSVLVVAKVEKGKSKKLKSVKELLGITIMERSSFEKNPIDFLEAKGYKEVKKDLIIKLPKYSLFELENGRKRMLASAGELQKGNELALPSKYVNFLYLASHYEKLKGSPEDNEQKQLFVEQHKHYLDEIIEQISEFSKRVILADANLDKVLSAYNKHRDKPIREQAENIIHLFTLTNLGAPAAFKYFDTTIDRKRYTSTKEVLDATLIHQSITGLYETRIDLSQLGGDGGGSSGGSGGGGGGRDIMKDIKVRLMTDSPDDSQDLMIGAIESNLFADQISWKSDQPVWLNQWPLKQEKLQALQQLVTEQLQLGHLEESNSPWNTPVFVIKKKSGKWRLLQDLRAVNATMHDMGALQPGLPSPVAVPKGWEIIIIDLQDCFFNIKLHPEDCKRFAFSVPSPNFKRPYQRFQWKVLPQGMKNSPTLCQKFVDKAILTVRDKYQDSYIVHYMDDILLAHPSRSIVDEILTSMIQALNKHGLVVSTEKIQKYDNLKYLGTHIQGDSVSYQKLQIRTDKLRTLNDFQKLLGNINWIRPFLKLTTGELKPLFEILNGDSNPISTRKLTPEACKALQLMNERLSTARVKRLDLSQPWSLCILKTEYTPTACLWQDGVVEWIHLPHISPKVITPYDIFCTQLIIKGRHRSKELFSKDPDYIVVPYTKVQFDLLLQEKEDWPISLLGFLGEVHFHLPKDPLLTFTLQTAIIFPHMTSTTPLEKGIVIFTDGSANGRSVTYIQGREPIIKENTQNTAQQAEIVAVITAFEEVSQPFNLYTDSKYVTGLFPEIETATLSPRTKIYTELKHLQRLIHKRQEKFYIGHIRGHTGLPGPLAQGNAYADSLTRILTAGKRTADGSEFEKRTADGSEFESPKKKAKVE

SEQ ID NO: 3206 - protein, 2021 aa, synthetic construct
MPAAKRVKLDGGDKKYSIGLDIGTNSVGWAVITDEYKVPSKKFKVLGNTDRHSIKKNLIGALLFDSGETAEATRLKRTARRRYTRRKNRICYLQEIFSNEMAKVDDSFFHRLEESFLVEEDKKHERHPIFGNIVDEVAYHEKYPTIYHLRKKLVDSTDKADLRLIYLALAHMIKFRGHFLIEGDLNPDNSDVDKLFIQLVQTYNQLFEENPINASGVDAKAILSARLSKSRRLENLIAQLPGEKKNGLFGNLIALSLGLTPNFKSNFDLAEDAKLQLSKDTYDDDLDNLLAQIGDQYADLFLAAKNLSDAILLSDILRVNTEITKAPLSASMIKRYDEHHQDLTLLKALVRQQLPEKYKEIFFDQSKNGYAGYIDGGASQEEFYKFIKPILEKMDGTEELLVKLNREDLLRKQRTFDNGSIPHQIHLGELHAILRRQEDFYPFLKDNREKIEKILTFRIPYYVGPLARGNSRFAWMTRKSEETITPWNFEEVVDKGASAQSFIERMTNFDKNLPNEKVLPKHSLLYEYFTVYNELTKVKYVTEGMRKPAFLSGEQKKAIVDLLFKTNRKVTVKQLKEDYFKKIECFDSVEISGVEDRFNASLGTYHDLLKIIKDKDFLDNEENEDILEDIVLTLTLFEDREMIEERLKTYAHLFDDKVMKQLKRRRYTGWGRLSRKLINGIRDKQSGKTILDFLKSDGFANRNFMQLIHDDSLTFKEDIQKAQVSGQGDSLHEHIANLAGSPAIKKGILQTVKVVDELVKVMGRHKPENIVIEMARENQTTQKGQKNSRERMKRIEEGIKELGSQILKEHPVENTQLQNEKLYLYYLQNGRDMYVDQELDINRLSDYDVDHIVPQSFLKDDSIDNKVLTRSDKARGKSDNVPSEEVVKKMKNYWRQLLNAKLITQRKFDNLTKAERGGLSELDKAGFIKRQLVETRQITKHVAQILDSRMNTKYDENDKLIREVKVITLKSKLVSDFRKDFQFYKVREINNYHHAHDAYLNAVVGTALIKKYPKLESEFVYGDYKVYDVRKMIAKSEQEIGKATAKYFFYSNIMNFFKTEITLANGEIRKRPLIETNGETGEIVWDKGRDFATVRKVLSMPQVNIVKKTEVQTGGFSKESILPKRNSDKLIARKKDWDPKKYGGFDSPTVAYSVLVVAKVEKGKSKKLKSVKELLGITIMERSSFEKNPIDFLEAKGYKEVKKDLIIKLPKYSLFELENGRKRMLASAGELQKGNELALPSKYVNFLYLASHYEKLKGSPEDNEQKQLFVEQHKHYLDEIIEQISEFSKRVILADANLDKVLSAYNKHRDKPIREQAENIIHLFTLTNLGAPAAFKYFDTTIDRKRYTSTKEVLDATLIHQSITGLYETRIDLSQLGGDGGEAAAKGGSGGGRDIMKDIKVRLMTDSPDDSQDLMIGAIESNLFADQISWKSDQPVWLNQWPLKQEKLQALQQLVTEQLQLGHLEESNSPWNTPVFVIKKKSGKWRLLQDLRAVNATMHDMGALQPGLPSPVAVPKGWEIIIIDLQDCFFNIKLHPEDCKRFAFSVPSPNFKRPYQRFQWKVLPQGMKNSPTLCQKFVDKAILTVRDKYQDSYIVHYMDDILLAHPSRSIVDEILTSMIQALNKHGLVVSTEKIQKYDNLKYLGTHIQGDSVSYQKLQIRTDKLRTLNDFQKLLGNINWIRPFLKLTTGELKPLFEILNGDSNPISTRKLTPEACKALQLMNERLSTARVKRLDLSQPWSLCILKTEYTPTACLWQDGVVEWIHLPHISPKVITPYDIFCTQLIIKGRHRSKELFSKDPDYIVVPYTKVQFDLLLQEKEDWPISLLGFLGEVHFHLPKDPLLTFTLQTAIIFPHMTSTTPLEKGIVIFTDGSANGRSVTYIQGREPIIKENTQNTAQQAEIVAVITAFEEVSQPFNLYTDSKYVTGLFPEIETATLSPRTKIYTELKHLQRLIHKRQEKFYIGHIRGHTGLPGPLAQGNAYADSLTRILTAGKRTADGSEFEKRTADGSEFESPKKKAKVE

SEQ ID NO: 3207 - protein, 2024 aa, synthetic construct
MPAAKRVKLDGGDKKYSIGLDIGTNSVGWAVITDEYKVPSKKFKVLGNTDRHSIKKNLIGALLFDSGETAEATRLKRTARRRYTRRKNRICYLQEIFSNEMAKVDDSFFHRLEESFLVEEDKKHERHPIFGNIVDEVAYHEKYPTIYHLRKKLVDSTDKADLRLIYLALAHMIKFRGHFLIEGDLNPDNSDVDKLFIQLVQTYNQLFEENPINASGVDAKAILSARLSKSRRLENLIAQLPGEKKNGLFGNLIALSLGLTPNFKSNFDLAEDAKLQLSKDTYDDDLDNLLAQIGDQYADLFLAAKNLSDAILLSDILRVNTEITKAPLSASMIKRYDEHHQDLTLLKALVRQQLPEKYKEIFFDQSKNGYAGYIDGGASQEEFYKFIKPILEKMDGTEELLVKLNREDLLRKQRTFDNGSIPHQIHLGELHAILRRQEDFYPFLKDNREKIEKILTFRIPYYVGPLARGNSRFAWMTRKSEETITPWNFEEVVDKGASAQSFIERMTNFDKNLPNEKVLPKHSLLYEYFTVYNELTKVKYVTEGMRKPAFLSGEQKKAIVDLLFKTNRKVTVKQLKEDYFKKIECFDSVEISGVEDRFNASLGTYHDLLKIIKDKDFLDNEENEDILEDIVLTLTLFEDREMIEERLKTYAHLFDDKVMKQLKRRRYTGWGRLSRKLINGIRDKQSGKTILDFLKSDGFANRNFMQLIHDDSLTFKEDIQKAQVSGQGDSLHEHIANLAGSPAIKKGILQTVKVVDELVKVMGRHKPENIVIEMARENQTTQKGQKNSRERMKRIEEGIKELGSQILKEHPVENTQLQNEKLYLYYLQNGRDMYVDQELDINRLSDYDVDHIVPQSFLKDDSIDNKVLTRSDKARGKSDNVPSEEVVKKMKNYWRQLLNAKLITQRKFDNLTKAERGGLSELDKAGFIKRQLVETRQITKHVAQILDSRMNTKYDENDKLIREVKVITLKSKLVSDFRKDFQFYKVREINNYHHAHDAYLNAVVGTALIKKYPKLESEFVYGDYKVYDVRKMIAKSEQEIGKATAKYFFYSNIMNFFKTEITLANGEIRKRPLIETNGETGEIVWDKGRDFATVRKVLSMPQVNIVKKTEVQTGGFSKESILPKRNSDKLIARKKDWDPKKYGGFDSPTVAYSVLVVAKVEKGKSKKLKSVKELLGITIMERSSFEKNPIDFLEAKGYKEVKKDLIIKLPKYSLFELENGRKRMLASAGELQKGNELALPSKYVNFLYLASHYEKLKGSPEDNEQKQLFVEQHKHYLDEIIEQISEFSKRVILADANLDKVLSAYNKHRDKPIREQAENIIHLFTLTNLGAPAAFKYFDTTIDRKRYTSTKEVLDATLIHQSITGLYETRIDLSQLGGDGGGSSEAAAKPAPGGGRDIMKDIKVRLMTDSPDDSQDLMIGAIESNLFADQISWKSDQPVWLNQWPLKQEKLQALQQLVTEQLQLGHLEESNSPWNTPVFVIKKKSGKWRLLQDLRAVNATMHDMGALQPGLPSPVAVPKGWEIIIIDLQDCFFNIKLHPEDCKRFAFSVPSPNFKRPYQRFQWKVLPQGMKNSPTLCQKFVDKAILTVRDKYQDSYIVHYMDDILLAHPSRSIVDEILTSMIQALNKHGLVVSTEKIQKYDNLKYLGTHIQGDSVSYQKLQIRTDKLRTLNDFQKLLGNINWIRPFLKLTTGELKPLFEILNGDSNPISTRKLTPEACKALQLMNERLSTARVKRLDLSQPWSLCILKTEYTPTACLWQDGVVEWIHLPHISPKVITPYDIFCTQLIIKGRHRSKELFSKDPDYIVVPYTKVQFDLLLQEKEDWPISLLGFLGEVHFHLPKDPLLTFTLQTAIIFPHMTSTTPLEKGIVIFTDGSANGRSVTYIQGREPIIKENTQNTAQQAEIVAVITAFEEVSQPFNLYTDSKYVTGLFPEIETATLSPRTKIYTELKHLQRLIHKRQEKFYIGHIRGHTGLPGPLAQGNAYADSLTRILTAGKRTADGSEFEKRTADGSEFESPKKKAKVE

SEQ ID NO: 3208 - protein, 2021 aa, synthetic construct
MPAAKRVKLDGGDKKYSIGLDIGTNSVGWAVITDEYKVPSKKFKVLGNTDRHSIKKNLIGALLFDSGETAEATRLKRTARRRYTRRKNRICYLQEIFSNEMAKVDDSFFHRLEESFLVEEDKKHERHPIFGNIVDEVAYHEKYPTIYHLRKKLVDSTDKADLRLIYLALAHMIKFRGHFLIEGDLNPDNSDVDKLFIQLVQTYNQLFEENPINASGVDAKAILSARLSKSRRLENLIAQLPGEKKNGLFGNLIALSLGLTPNFKSNFDLAEDAKLQLSKDTYDDDLDNLLAQIGDQYADLFLAAKNLSDAILLSDILRVNTEITKAPLSASMIKRYDEHHQDLTLLKALVRQQLPEKYKEIFFDQSKNGYAGYIDGGASQEEFYKFIKPILEKMDGTEELLVKLNREDLLRKQRTFDNGSIPHQIHLGELHAILRRQEDFYPFLKDNREKIEKILTFRIPYYVGPLARGNSRFAWMTRKSEETITPWNFEEVVDKGASAQSFIERMTNFDKNLPNEKVLPKHSLLYEYFTVYNELTKVKYVTEGMRKPAFLSGEQKKAIVDLLFKTNRKVTVKQLKEDYFKKIECFDSVEISGVEDRFNASLGTYHDLLKIIKDKDFLDNEENEDILEDIVLTLTLFEDREMIEERLKTYAHLFDDKVMKQLKRRRYTGWGRLSRKLINGIRDKQSGKTILDFLKSDGFANRNFMQLIHDDSLTFKEDIQKAQVSGQGDSLHEHIANLAGSPAIKKGILQTVKVVDELVKVMGRHKPENIVIEMARENQTTQKGQKNSRERMKRIEEGIKELGSQILKEHPVENTQLQNEKLYLYYLQNGRDMYVDQELDINRLSDYDVDHIVPQSFLKDDSIDNKVLTRSDKARGKSDNVPSEEVVKKMKNYWRQLLNAKLITQRKFDNLTKAERGGLSELDKAGFIKRQLVETRQITKHVAQILDSRMNTKYDENDKLIREVKVITLKSKLVSDFRKDFQFYKVREINNYHHAHDAYLNAVVGTALIKKYPKLESEFVYGDYKVYDVRKMIAKSEQEIGKATAKYFFYSNIMNFFKTEITLANGEIRKRPLIETNGETGEIVWDKGRDFATVRKVLSMPQVNIVKKTEVQTGGFSKESILPKRNSDKLIARKKDWDPKKYGGFDSPTVAYSVLVVAKVEKGKSKKLKSVKELLGITIMERSSFEKNPIDFLEAKGYKEVKKDLIIKLPKYSLFELENGRKRMLASAGELQKGNELALPSKYVNFLYLASHYEKLKGSPEDNEQKQLFVEQHKHYLDEIIEQISEFSKRVILADANLDKVLSAYNKHRDKPIREQAENIIHLFTLTNLGAPAAFKYFDTTIDRKRYTSTKEVLDATLIHQSITGLYETRIDLSQLGGDGGGGGEAAAKGGGRDIMKDIKVRLMTDSPDDSQDLMIGAIESNLFADQISWKSDQPVWLNQWPLKQEKLQALQQLVTEQLQLGHLEESNSPWNTPVFVIKKKSGKWRLLQDLRAVNATMHDMGALQPGLPSPVAVPKGWEIIIIDLQDCFFNIKLHPEDCKRFAFSVPSPNFKRPYQRFQWKVLPQGMKNSPTLCQKFVDKAILTVRDKYQDSYIVHYMDDILLAHPSRSIVDEILTSMIQALNKHGLVVSTEKIQKYDNLKYLGTHIQGDSVSYQKLQIRTDKLRTLNDFQKLLGNINWIRPFLKLTTGELKPLFEILNGDSNPISTRKLTPEACKALQLMNERLSTARVKRLDLSQPWSLCILKTEYTPTACLWQDGVVEWIHLPHISPKVITPYDIFCTQLIIKGRHRSKELFSKDPDYIVVPYTKVQFDLLLQEKEDWPISLLGFLGEVHFHLPKDPLLTFTLQTAIIFPHMTSTTPLEKGIVIFTDGSANGRSVTYIQGREPIIKENTQNTAQQAEIVAVITAFEEVSQPFNLYTDSKYVTGLFPEIETATLSPRTKIYTELKHLQRLIHKRQEKFYIGHIRGHTGLPGPLAQGNAYADSLTRILTAGKRTADGSEFEKRTADGSEFESPKKKAKVE

SEQ ID NO: 3209 - protein, 2022 aa, synthetic construct
MPAAKRVKLDGGDKKYSIGLDIGTNSVGWAVITDEYKVPSKKFKVLGNTDRHSIKKNLIGALLFDSGETAEATRLKRTARRRYTRRKNRICYLQEIFSNEMAKVDDSFFHRLEESFLVEEDKKHERHPIFGNIVDEVAYHEKYPTIYHLRKKLVDSTDKADLRLIYLALAHMIKFRGHFLIEGDLNPDNSDVDKLFIQLVQTYNQLFEENPINASGVDAKAILSARLSKSRRLENLIAQLPGEKKNGLFGNLIALSLGLTPNFKSNFDLAEDAKLQLSKDTYDDDLDNLLAQIGDQYADLFLAAKNLSDAILLSDILRVNTEITKAPLSASMIKRYDEHHQDLTLLKALVRQQLPEKYKEIFFDQSKNGYAGYIDGGASQEEFYKFIKPILEKMDGTEELLVKLNREDLLRKQRTFDNGSIPHQIHLGELHAILRRQEDFYPFLKDNREKIEKILTFRIPYYVGPLARGNSRFAWMTRKSEETITPWNFEEVVDKGASAQSFIERMTNFDKNLPNEKVLPKHSLLYEYFTVYNELTKVKYVTEGMRKPAFLSGEQKKAIVDLLFKTNRKVTVKQLKEDYFKKIECFDSVEISGVEDRFNASLGTYHDLLKIIKDKDFLDNEENEDILEDIVLTLTLFEDREMIEERLKTYAHLFDDKVMKQLKRRRYTGWGRLSRKLINGIRDKQSGKTILDFLKSDGFANRNFMQLIHDDSLTFKEDIQKAQVSGQGDSLHEHIANLAGSPAIKKGILQTVKVVDELVKVMGRHKPENIVIEMARENQTTQKGQKNSRERMKRIEEGIKELGSQILKEHPVENTQLQNEKLYLYYLQNGRDMYVDQELDINRLSDYDVDHIVPQSFLKDDSIDNKVLTRSDKARGKSDNVPSEEVVKKMKNYWRQLLNAKLITQRKFDNLTKAERGGLSELDKAGFIKRQLVETRQITKHVAQILDSRMNTKYDENDKLIREVKVITLKSKLVSDFRKDFQFYKVREINNYHHAHDAYLNAVVGTALIKKYPKLESEFVYGDYKVYDVRKMIAKSEQEIGKATAKYFFYSNIMNFFKTEITLANGEIRKRPLIETNGETGEIVWDKGRDFATVRKVLSMPQVNIVKKTEVQTGGFSKESILPKRNSDKLIARKKDWDPKKYGGFDSPTVAYSVLVVAKVEKGKSKKLKSVKELLGITIMERSSFEKNPIDFLEAKGYKEVKKDLIIKLPKYSLFELENGRKRMLASAGELQKGNELALPSKYVNFLYLASHYEKLKGSPEDNEQKQLFVEQHKHYLDEIIEQISEFSKRVILADANLDKVLSAYNKHRDKPIREQAENIIHLFTLTNLGAPAAFKYFDTTIDRKRYTSTKEVLDATLIHQSITGLYETRIDLSQLGGDGGPAPGGSGSSGGGRDIMKDIKVRLMTDSPDDSQDLMIGAIESNLFADQISWKSDQPVWLNQWPLKQEKLQALQQLVTEQLQLGHLEESNSPWNTPVFVIKKKSGKWRLLQDLRAVNATMHDMGALQPGLPSPVAVPKGWEIIIIDLQDCFFNIKLHPEDCKRFAFSVPSPNFKRPYQRFQWKVLPQGMKNSPTLCQKFVDKAILTVRDKYQDSYIVHYMDDILLAHPSRSIVDEILTSMIQALNKHGLVVSTEKIQKYDNLKYLGTHIQGDSVSYQKLQIRTDKLRTLNDFQKLLGNINWIRPFLKLTTGELKPLFEILNGDSNPISTRKLTPEACKALQLMNERLSTARVKRLDLSQPWSLCILKTEYTPTACLWQDGVVEWIHLPHISPKVITPYDIFCTQLIIKGRHRSKELFSKDPDYIVVPYTKVQFDLLLQEKEDWPISLLGFLGEVHFHLPKDPLLTFTLQTAIIFPHMTSTTPLEKGIVIFTDGSANGRSVTYIQGREPIIKENTQNTAQQAEIVAVITAFEEVSQPFNLYTDSKYVTGLFPEIETATLSPRTKIYTELKHLQRLIHKRQEKFYIGHIRGHTGLPGPLAQGNAYADSLTRILTAGKRTADGSEFEKRTADGSEFESPKKKAKVE

SEQ ID NO: 3210 - protein, 2016 aa, synthetic construct
MPAAKRVKLDGGDKKYSIGLDIGTNSVGWAVITDEYKVPSKKFKVLGNTDRHSIKKNLIGALLFDSGETAEATRLKRTARRRYTRRKNRICYLQEIFSNEMAKVDDSFFHRLEESFLVEEDKKHERHPIFGNIVDEVAYHEKYPTIYHLRKKLVDSTDKADLRLIYLALAHMIKFRGHFLIEGDLNPDNSDVDKLFIQLVQTYNQLFEENPINASGVDAKAILSARLSKSRRLENLIAQLPGEKKNGLFGNLIALSLGLTPNFKSNFDLAEDAKLQLSKDTYDDDLDNLLAQIGDQYADLFLAAKNLSDAILLSDILRVNTEITKAPLSASMIKRYDEHHQDLTLLKALVRQQLPEKYKEIFFDQSKNGYAGYIDGGASQEEFYKFIKPILEKMDGTEELLVKLNREDLLRKQRTFDNGSIPHQIHLGELHAILRRQEDFYPFLKDNREKIEKILTFRIPYYVGPLARGNSRFAWMTRKSEETITPWNFEEVVDKGASAQSFIERMTNFDKNLPNEKVLPKHSLLYEYFTVYNELTKVKYVTEGMRKPAFLSGEQKKAIVDLLFKTNRKVTVKQLKEDYFKKIECFDSVEISGVEDRFNASLGTYHDLLKIIKDKDFLDNEENEDILEDIVLTLTLFEDREMIEERLKTYAHLFDDKVMKQLKRRRYTGWGRLSRKLINGIRDKQSGKTILDFLKSDGFANRNFMQLIHDDSLTFKEDIQKAQVSGQGDSLHEHIANLAGSPAIKKGILQTVKVVDELVKVMGRHKPENIVIEMARENQTTQKGQKNSRERMKRIEEGIKELGSQILKEHPVENTQLQNEKLYLYYLQNGRDMYVDQELDINRLSDYDVDHIVPQSFLKDDSIDNKVLTRSDKARGKSDNVPSEEVVKKMKNYWRQLLNAKLITQRKFDNLTKAERGGLSELDKAGFIKRQLVETRQITKHVAQILDSRMNTKYDENDKLIREVKVITLKSKLVSDFRKDFQFYKVREINNYHHAHDAYLNAVVGTALIKKYPKLESEFVYGDYKVYDVRKMIAKSEQEIGKATAKYFFYSNIMNFFKTEITLANGEIRKRPLIETNGETGEIVWDKGRDFATVRKVLSMPQVNIVKKTEVQTGGFSKESILPKRNSDKLIARKKDWDPKKYGGFDSPTVAYSVLVVAKVEKGKSKKLKSVKELLGITIMERSSFEKNPIDFLEAKGYKEVKKDLIIKLPKYSLFELENGRKRMLASAGELQKGNELALPSKYVNFLYLASHYEKLKGSPEDNEQKQLFVEQHKHYLDEIIEQISEFSKRVILADANLDKVLSAYNKHRDKPIREQAENIIHLFTLTNLGAPAAFKYFDTTIDRKRYTSTKEVLDATLIHQSITGLYETRIDLSQLGGDGGGGGGGGRDIMKDIKVRLMTDSPDDSQDLMIGAIESNLFADQISWKSDQPVWLNQWPLKQEKLQALQQLVTEQLQLGHLEESNSPWNTPVFVIKKKSGKWRLLQDLRAVNATMHDMGALQPGLPSPVAVPKGWEIIIIDLQDCFFNIKLHPEDCKRFAFSVPSPNFKRPYQRFQWKVLPQGMKNSPTLCQKFVDKAILTVRDKYQDSYIVHYMDDILLAHPSRSIVDEILTSMIQALNKHGLVVSTEKIQKYDNLKYLGTHIQGDSVSYQKLQIRTDKLRTLNDFQKLLGNINWIRPFLKLTTGELKPLFEILNGDSNPISTRKLTPEACKALQLMNERLSTARVKRLDLSQPWSLCILKTEYTPTACLWQDGVVEWIHLPHISPKVITPYDIFCTQLIIKGRHRSKELFSKDPDYIVVPYTKVQFDLLLQEKEDWPISLLGFLGEVHFHLPKDPLLTFTLQTAIIFPHMTSTTPLEKGIVIFTDGSANGRSVTYIQGREPIIKENTQNTAQQAEIVAVITAFEEVSQPFNLYTDSKYVTGLFPEIETATLSPRTKIYTELKHLQRLIHKRQEKFYIGHIRGHTGLPGPLAQGNAYADSLTRILTAGKRTADGSEFEKRTADGSEFESPKKKAKVE

SEQ ID NO: 3211 - protein, 2019 aa, synthetic construct
MPAAKRVKLDGGDKKYSIGLDIGTNSVGWAVITDEYKVPSKKFKVLGNTDRHSIKKNLIGALLFDSGETAEATRLKRTARRRYTRRKNRICYLQEIFSNEMAKVDDSFFHRLEESFLVEEDKKHERHPIFGNIVDEVAYHEKYPTIYHLRKKLVDSTDKADLRLIYLALAHMIKFRGHFLIEGDLNPDNSDVDKLFIQLVQTYNQLFEENPINASGVDAKAILSARLSKSRRLENLIAQLPGEKKNGLFGNLIALSLGLTPNFKSNFDLAEDAKLQLSKDTYDDDLDNLLAQIGDQYADLFLAAKNLSDAILLSDILRVNTEITKAPLSASMIKRYDEHHQDLTLLKALVRQQLPEKYKEIFFDQSKNGYAGYIDGGASQEEFYKFIKPILEKMDGTEELLVKLNREDLLRKQRTFDNGSIPHQIHLGELHAILRRQEDFYPFLKDNREKIEKILTFRIPYYVGPLARGNSRFAWMTRKSEETITPWNFEEVVDKGASAQSFIERMTNFDKNLPNEKVLPKHSLLYEYFTVYNELTKVKYVTEGMRKPAFLSGEQKKAIVDLLFKTNRKVTVKQLKEDYFKKIECFDSVEISGVEDRFNASLGTYHDLLKIIKDKDFLDNEENEDILEDIVLTLTLFEDREMIEERLKTYAHLFDDKVMKQLKRRRYTGWGRLSRKLINGIRDKQSGKTILDFLKSDGFANRNFMQLIHDDSLTFKEDIQKAQVSGQGDSLHEHIANLAGSPAIKKGILQTVKVVDELVKVMGRHKPENIVIEMARENQTTQKGQKNSRERMKRIEEGIKELGSQILKEHPVENTQLQNEKLYLYYLQNGRDMYVDQELDINRLSDYDVDHIVPQSFLKDDSIDNKVLTRSDKARGKSDNVPSEEVVKKMKNYWRQLLNAKLITQRKFDNLTKAERGGLSELDKAGFIKRQLVETRQITKHVAQILDSRMNTKYDENDKLIREVKVITLKSKLVSDFRKDFQFYKVREINNYHHAHDAYLNAVVGTALIKKYPKLESEFVYGDYKVYDVRKMIAKSEQEIGKATAKYFFYSNIMNFFKTEITLANGEIRKRPLIETNGETGEIVWDKGRDFATVRKVLSMPQVNIVKKTEVQTGGFSKESILPKRNSDKLIARKKDWDPKKYGGFDSPTVAYSVLVVAKVEKGKSKKLKSVKELLGITIMERSSFEKNPIDFLEAKGYKEVKKDLIIKLPKYSLFELENGRKRMLASAGELQKGNELALPSKYVNFLYLASHYEKLKGSPEDNEQKQLFVEQHKHYLDEIIEQISEFSKRVILADANLDKVLSAYNKHRDKPIREQAENIIHLFTLTNLGAPAAFKYFDTTIDRKRYTSTKEVLDATLIHQSITGLYETRIDLSQLGGDGGGSSGGGGGGRDIMKDIKVRLMTDSPDDSQDLMIGAIESNLFADQISWKSDQPVWLNQWPLKQEKLQALQQLVTEQLQLGHLEESNSPWNTPVFVIKKKSGKWRLLQDLRAVNATMHDMGALQPGLPSPVAVPKGWEIIIIDLQDCFFNIKLHPEDCKRFAFSVPSPNFKRPYQRFQWKVLPQGMKNSPTLCQKFVDKAILTVRDKYQDSYIVHYMDDILLAHPSRSIVDEILTSMIQALNKHGLVVSTEKIQKYDNLKYLGTHIQGDSVSYQKLQIRTDKLRTLNDFQKLLGNINWIRPFLKLTTGELKPLFEILNGDSNPISTRKLTPEACKALQLMNERLSTARVKRLDLSQPWSLCILKTEYTPTACLWQDGVVEWIHLPHISPKVITPYDIFCTQLIIKGRHRSKELFSKDPDYIVVPYTKVQFDLLLQEKEDWPISLLGFLGEVHFHLPKDPLLTFTLQTAIIFPHMTSTTPLEKGIVIFTDGSANGRSVTYIQGREPIIKENTQNTAQQAEIVAVITAFEEVSQPFNLYTDSKYVTGLFPEIETATLSPRTKIYTELKHLQRLIHKRQEKFYIGHIRGHTGLPGPLAQGNAYADSLTRILTAGKRTADGSEFEKRTADGSEFESPKKKAKVE

SEQ ID NO: 3212 - protein, 2020 aa, synthetic construct
MPAAKRVKLDGGDKKYSIGLDIGTNSVGWAVITDEYKVPSKKFKVLGNTDRHSIKKNLIGALLFDSGETAEATRLKRTARRRYTRRKNRICYLQEIFSNEMAKVDDSFFHRLEESFLVEEDKKHERHPIFGNIVDEVAYHEKYPTIYHLRKKLVDSTDKADLRLIYLALAHMIKFRGHFLIEGDLNPDNSDVDKLFIQLVQTYNQLFEENPINASGVDAKAILSARLSKSRRLENLIAQLPGEKKNGLFGNLIALSLGLTPNFKSNFDLAEDAKLQLSKDTYDDDLDNLLAQIGDQYADLFLAAKNLSDAILLSDILRVNTEITKAPLSASMIKRYDEHHQDLTLLKALVRQQLPEKYKEIFFDQSKNGYAGYIDGGASQEEFYKFIKPILEKMDGTEELLVKLNREDLLRKQRTFDNGSIPHQIHLGELHAILRRQEDFYPFLKDNREKIEKILTFRIPYYVGPLARGNSRFAWMTRKSEETITPWNFEEVVDKGASAQSFIERMTNFDKNLPNEKVLPKHSLLYEYFTVYNELTKVKYVTEGMRKPAFLSGEQKKAIVDLLFKTNRKVTVKQLKEDYFKKIECFDSVEISGVEDRFNASLGTYHDLLKIIKDKDFLDNEENEDILEDIVLTLTLFEDREMIEERLKTYAHLFDDKVMKQLKRRRYTGWGRLSRKLINGIRDKQSGKTILDFLKSDGFANRNFMQLIHDDSLTFKEDIQKAQVSGQGDSLHEHIANLAGSPAIKKGILQTVKVVDELVKVMGRHKPENIVIEMARENQTTQKGQKNSRERMKRIEEGIKELGSQILKEHPVENTQLQNEKLYLYYLQNGRDMYVDQELDINRLSDYDVDHIVPQSFLKDDSIDNKVLTRSDKARGKSDNVPSEEVVKKMKNYWRQLLNAKLITQRKFDNLTKAERGGLSELDKAGFIKRQLVETRQITKHVAQILDSRMNTKYDENDKLIREVKVITLKSKLVSDFRKDFQFYKVREINNYHHAHDAYLNAVVGTALIKKYPKLESEFVYGDYKVYDVRKMIAKSEQEIGKATAKYFFYSNIMNFFKTEITLANGEIRKRPLIETNGETGEIVWDKGRDFATVRKVLSMPQVNIVKKTEVQTGGFSKESILPKRNSDKLIARKKDWDPKKYGGFDSPTVAYSVLVVAKVEKGKSKKLKSVKELLGITIMERSSFEKNPIDFLEAKGYKEVKKDLIIKLPKYSLFELENGRKRMLASAGELQKGNELALPSKYVNFLYLASHYEKLKGSPEDNEQKQLFVEQHKHYLDEIIEQISEFSKRVILADANLDKVLSAYNKHRDKPIREQAENIIHLFTLTNLGAPAAFKYFDTTIDRKRYTSTKEVLDATLIHQSITGLYETRIDLSQLGGDGGGGGGGGGGGGRDIMKDIKVRLMTDSPDDSQDLMIGAIESNLFADQISWKSDQPVWLNQWPLKQEKLQALQQLVTEQLQLGHLEESNSPWNTPVFVIKKKSGKWRLLQDLRAVNATMHDMGALQPGLPSPVAVPKGWEIIIIDLQDCFFNIKLHPEDCKRFAFSVPSPNFKRPYQRFQWKVLPQGMKNSPTLCQKFVDKAILTVRDKYQDSYIVHYMDDILLAHPSRSIVDEILTSMIQALNKHGLVVSTEKIQKYDNLKYLGTHIQGDSVSYQKLQIRTDKLRTLNDFQKLLGNINWIRPFLKLTTGELKPLFEILNGDSNPISTRKLTPEACKALQLMNERLSTARVKRLDLSQPWSLCILKTEYTPTACLWQDGVVEWIHLPHISPKVITPYDIFCTQLIIKGRHRSKELFSKDPDYIVVPYTKVQFDLLLQEKEDWPISLLGFLGEVHFHLPKDPLLTFTLQTAIIFPHMTSTTPLEKGIVIFTDGSANGRSVTYIQGREPIIKENTQNTAQQAEIVAVITAFEEVSQPFNLYTDSKYVTGLFPEIETATLSPRTKIYTELKHLQRLIHKRQEKFYIGHIRGHTGLPGPLAQGNAYADSLTRILTAGKRTADGSEFEKRTADGSEFESPKKKAKVE

SEQ ID NO: 3213 - protein, 2024 aa, synthetic construct
MPAAKRVKLDGGDKKYSIGLDIGTNSVGWAVITDEYKVPSKKFKVLGNTDRHSIKKNLIGALLFDSGETAEATRLKRTARRRYTRRKNRICYLQEIFSNEMAKVDDSFFHRLEESFLVEEDKKHERHPIFGNIVDEVAYHEKYPTIYHLRKKLVDSTDKADLRLIYLALAHMIKFRGHFLIEGDLNPDNSDVDKLFIQLVQTYNQLFEENPINASGVDAKAILSARLSKSRRLENLIAQLPGEKKNGLFGNLIALSLGLTPNFKSNFDLAEDAKLQLSKDTYDDDLDNLLAQIGDQYADLFLAAKNLSDAILLSDILRVNTEITKAPLSASMIKRYDEHHQDLTLLKALVRQQLPEKYKEIFFDQSKNGYAGYIDGGASQEEFYKFIKPILEKMDGTEELLVKLNREDLLRKQRTFDNGSIPHQIHLGELHAILRRQEDFYPFLKDNREKIEKILTFRIPYYVGPLARGNSRFAWMTRKSEETITPWNFEEVVDKGASAQSFIERMTNFDKNLPNEKVLPKHSLLYEYFTVYNELTKVKYVTEGMRKPAFLSGEQKKAIVDLLFKTNRKVTVKQLKEDYFKKIECFDSVEISGVEDRFNASLGTYHDLLKIIKDKDFLDNEENEDILEDIVLTLTLFEDREMIEERLKTYAHLFDDKVMKQLKRRRYTGWGRLSRKLINGIRDKQSGKTILDFLKSDGFANRNFMQLIHDDSLTFKEDIQKAQVSGQGDSLHEHIANLAGSPAIKKGILQTVKVVDELVKVMGRHKPENIVIEMARENQTTQKGQKNSRERMKRIEEGIKELGSQILKEHPVENTQLQNEKLYLYYLQNGRDMYVDQELDINRLSDYDVDHIVPQSFLKDDSIDNKVLTRSDKARGKSDNVPSEEVVKKMKNYWRQLLNAKLITQRKFDNLTKAERGGLSELDKAGFIKRQLVETRQITKHVAQILDSRMNTKYDENDKLIREVKVITLKSKLVSDFRKDFQFYKVREINNYHHAHDAYLNAVVGTALIKKYPKLESEFVYGDYKVYDVRKMIAKSEQEIGKATAKYFFYSNIMNFFKTEITLANGEIRKRPLIETNGETGEIVWDKGRDFATVRKVLSMPQVNIVKKTEVQTGGFSKESILPKRNSDKLIARKKDWDPKKYGGFDSPTVAYSVLVVAKVEKGKSKKLKSVKELLGITIMERSSFEKNPIDFLEAKGYKEVKKDLIIKLPKYSLFELENGRKRMLASAGELQKGNELALPSKYVNFLYLASHYEKLKGSPEDNEQKQLFVEQHKHYLDEIIEQISEFSKRVILADANLDKVLSAYNKHRDKPIREQAENIIHLFTLTNLGAPAAFKYFDTTIDRKRYTSTKEVLDATLIHQSITGLYETRIDLSQLGGDGGGGGEAAAKPAPGGGRDIMKDIKVRLMTDSPDDSQDLMIGAIESNLFADQISWKSDQPVWLNQWPLKQEKLQALQQLVTEQLQLGHLEESNSPWNTPVFVIKKKSGKWRLLQDLRAVNATMHDMGALQPGLPSPVAVPKGWEIIIIDLQDCFFNIKLHPEDCKRFAFSVPSPNFKRPYQRFQWKVLPQGMKNSPTLCQKFVDKAILTVRDKYQDSYIVHYMDDILLAHPSRSIVDEILTSMIQALNKHGLVVSTEKIQKYDNLKYLGTHIQGDSVSYQKLQIRTDKLRTLNDFQKLLGNINWIRPFLKLTTGELKPLFEILNGDSNPISTRKLTPEACKALQLMNERLSTARVKRLDLSQPWSLCILKTEYTPTACLWQDGVVEWIHLPHISPKVITPYDIFCTQLIIKGRHRSKELFSKDPDYIVVPYTKVQFDLLLQEKEDWPISLLGFLGEVHFHLPKDPLLTFTLQTAIIFPHMTSTTPLEKGIVIFTDGSANGRSVTYIQGREPIIKENTQNTAQQAEIVAVITAFEEVSQPFNLYTDSKYVTGLFPEIETATLSPRTKIYTELKHLQRLIHKRQEKFYIGHIRGHTGLPGPLAQGNAYADSLTRILTAGKRTADGSEFEKRTADGSEFESPKKKAKVE

SEQ ID NO: 3214 - protein, 2024 aa, synthetic construct
MPAAKRVKLDGGDKKYSIGLDIGTNSVGWAVITDEYKVPSKKFKVLGNTDRHSIKKNLIGALLFDSGETAEATRLKRTARRRYTRRKNRICYLQEIFSNEMAKVDDSFFHRLEESFLVEEDKKHERHPIFGNIVDEVAYHEKYPTIYHLRKKLVDSTDKADLRLIYLALAHMIKFRGHFLIEGDLNPDNSDVDKLFIQLVQTYNQLFEENPINASGVDAKAILSARLSKSRRLENLIAQLPGEKKNGLFGNLIALSLGLTPNFKSNFDLAEDAKLQLSKDTYDDDLDNLLAQIGDQYADLFLAAKNLSDAILLSDILRVNTEITKAPLSASMIKRYDEHHQDLTLLKALVRQQLPEKYKEIFFDQSKNGYAGYIDGGASQEEFYKFIKPILEKMDGTEELLVKLNREDLLRKQRTFDNGSIPHQIHLGELHAILRRQEDFYPFLKDNREKIEKILTFRIPYYVGPLARGNSRFAWMTRKSEETITPWNFEEVVDKGASAQSFIERMTNFDKNLPNEKVLPKHSLLYEYFTVYNELTKVKYVTEGMRKPAFLSGEQKKAIVDLLFKTNRKVTVKQLKEDYFKKIECFDSVEISGVEDRFNASLGTYHDLLKIIKDKDFLDNEENEDILEDIVLTLTLFEDREMIEERLKTYAHLFDDKVMKQLKRRRYTGWGRLSRKLINGIRDKQSGKTILDFLKSDGFANRNFMQLIHDDSLTFKEDIQKAQVSGQGDSLHEHIANLAGSPAIKKGILQTVKVVDELVKVMGRHKPENIVIEMARENQTTQKGQKNSRERMKRIEEGIKELGSQILKEHPVENTQLQNEKLYLYYLQNGRDMYVDQELDINRLSDYDVDHIVPQSFLKDDSIDNKVLTRSDKARGKSDNVPSEEVVKKMKNYWRQLLNAKLITQRKFDNLTKAERGGLSELDKAGFIKRQLVETRQITKHVAQILDSRMNTKYDENDKLIREVKVITLKSKLVSDFRKDFQFYKVREINNYHHAHDAYLNAVVGTALIKKYPKLESEFVYGDYKVYDVRKMIAKSEQEIGKATAKYFFYSNIMNFFKTEITLANGEIRKRPLIETNGETGEIVWDKGRDFATVRKVLSMPQVNIVKKTEVQTGGFSKESILPKRNSDKLIARKKDWDPKKYGGFDSPTVAYSVLVVAKVEKGKSKKLKSVKELLGITIMERSSFEKNPIDFLEAKGYKEVKKDLIIKLPKYSLFELENGRKRMLASAGELQKGNELALPSKYVNFLYLASHYEKLKGSPEDNEQKQLFVEQHKHYLDEIIEQISEFSKRVILADANLDKVLSAYNKHRDKPIREQAENIIHLFTLTNLGAPAAFKYFDTTIDRKRYTSTKEVLDATLIHQSITGLYETRIDLSQLGGDGGGGGEAAAKGGSGGGRDIMKDIKVRLMTDSPDDSQDLMIGAIESNLFADQISWKSDQPVWLNQWPLKQEKLQALQQLVTEQLQLGHLEESNSPWNTPVFVIKKKSGKWRLLQDLRAVNATMHDMGALQPGLPSPVAVPKGWEIIIIDLQDCFFNIKLHPEDCKRFAFSVPSPNFKRPYQRFQWKVLPQGMKNSPTLCQKFVDKAILTVRDKYQDSYIVHYMDDILLAHPSRSIVDEILTSMIQALNKHGLVVSTEKIQKYDNLKYLGTHIQGDSVSYQKLQIRTDKLRTLNDFQKLLGNINWIRPFLKLTTGELKPLFEILNGDSNPISTRKLTPEACKALQLMNERLSTARVKRLDLSQPWSLCILKTEYTPTACLWQDGVVEWIHLPHISPKVITPYDIFCTQLIIKGRHRSKELFSKDPDYIVVPYTKVQFDLLLQEKEDWPISLLGFLGEVHFHLPKDPLLTFTLQTAIIFPHMTSTTPLEKGIVIFTDGSANGRSVTYIQGREPIIKENTQNTAQQAEIVAVITAFEEVSQPFNLYTDSKYVTGLFPEIETATLSPRTKIYTELKHLQRLIHKRQEKFYIGHIRGHTGLPGPLAQGNAYADSLTRILTAGKRTADGSEFEKRTADGSEFESPKKKAKVE

SEQ ID NO: 3215 - protein, 2022 aa, synthetic construct
MPAAKRVKLDGGDKKYSIGLDIGTNSVGWAVITDEYKVPSKKFKVLGNTDRHSIKKNLIGALLFDSGETAEATRLKRTARRRYTRRKNRICYLQEIFSNEMAKVDDSFFHRLEESFLVEEDKKHERHPIFGNIVDEVAYHEKYPTIYHLRKKLVDSTDKADLRLIYLALAHMIKFRGHFLIEGDLNPDNSDVDKLFIQLVQTYNQLFEENPINASGVDAKAILSARLSKSRRLENLIAQLPGEKKNGLFGNLIALSLGLTPNFKSNFDLAEDAKLQLSKDTYDDDLDNLLAQIGDQYADLFLAAKNLSDAILLSDILRVNTEITKAPLSASMIKRYDEHHQDLTLLKALVRQQLPEKYKEIFFDQSKNGYAGYIDGGASQEEFYKFIKPILEKMDGTEELLVKLNREDLLRKQRTFDNGSIPHQIHLGELHAILRRQEDFYPFLKDNREKIEKILTFRIPYYVGPLARGNSRFAWMTRKSEETITPWNFEEVVDKGASAQSFIERMTNFDKNLPNEKVLPKHSLLYEYFTVYNELTKVKYVTEGMRKPAFLSGEQKKAIVDLLFKTNRKVTVKQLKEDYFKKIECFDSVEISGVEDRFNASLGTYHDLLKIIKDKDFLDNEENEDILEDIVLTLTLFEDREMIEERLKTYAHLFDDKVMKQLKRRRYTGWGRLSRKLINGIRDKQSGKTILDFLKSDGFANRNFMQLIHDDSLTFKEDIQKAQVSGQGDSLHEHIANLAGSPAIKKGILQTVKVVDELVKVMGRHKPENIVIEMARENQTTQKGQKNSRERMKRIEEGIKELGSQILKEHPVENTQLQNEKLYLYYLQNGRDMYVDQELDINRLSDYDVDHIVPQSFLKDDSIDNKVLTRSDKARGKSDNVPSEEVVKKMKNYWRQLLNAKLITQRKFDNLTKAERGGLSELDKAGFIKRQLVETRQITKHVAQILDSRMNTKYDENDKLIREVKVITLKSKLVSDFRKDFQFYKVREINNYHHAHDAYLNAVVGTALIKKYPKLESEFVYGDYKVYDVRKMIAKSEQEIGKATAKYFFYSNIMNFFKTEITLANGEIRKRPLIETNGETGEIVWDKGRDFATVRKVLSMPQVNIVKKTEVQTGGFSKESILPKRNSDKLIARKKDWDPKKYGGFDSPTVAYSVLVVAKVEKGKSKKLKSVKELLGITIMERSSFEKNPIDFLEAKGYKEVKKDLIIKLPKYSLFELENGRKRMLASAGELQKGNELALPSKYVNFLYLASHYEKLKGSPEDNEQKQLFVEQHKHYLDEIIEQISEFSKRVILADANLDKVLSAYNKHRDKPIREQAENIIHLFTLTNLGAPAAFKYFDTTIDRKRYTSTKEVLDATLIHQSITGLYETRIDLSQLGGDGGPAPGSSGGSGGGRDIMKDIKVRLMTDSPDDSQDLMIGAIESNLFADQISWKSDQPVWLNQWPLKQEKLQALQQLVTEQLQLGHLEESNSPWNTPVFVIKKKSGKWRLLQDLRAVNATMHDMGALQPGLPSPVAVPKGWEIIIIDLQDCFFNIKLHPEDCKRFAFSVPSPNFKRPYQRFQWKVLPQGMKNSPTLCQKFVDKAILTVRDKYQDSYIVHYMDDILLAHPSRSIVDEILTSMIQALNKHGLVVSTEKIQKYDNLKYLGTHIQGDSVSYQKLQIRTDKLRTLNDFQKLLGNINWIRPFLKLTTGELKPLFEILNGDSNPISTRKLTPEACKALQLMNERLSTARVKRLDLSQPWSLCILKTEYTPTACLWQDGVVEWIHLPHISPKVITPYDIFCTQLIIKGRHRSKELFSKDPDYIVVPYTKVQFDLLLQEKEDWPISLLGFLGEVHFHLPKDPLLTFTLQTAIIFPHMTSTTPLEKGIVIFTDGSANGRSVTYIQGREPIIKENTQNTAQQAEIVAVITAFEEVSQPFNLYTDSKYVTGLFPEIETATLSPRTKIYTELKHLQRLIHKRQEKFYIGHIRGHTGLPGPLAQGNAYADSLTRILTAGKRTADGSEFEKRTADGSEFESPKKKAKVE

SEQ ID NO: 3216 - protein, 2043 aa, synthetic construct
MPAAKRVKLDGGDKKYSIGLDIGTNSVGWAVITDEYKVPSKKFKVLGNTDRHSIKKNLIGALLFDSGETAEATRLKRTARRRYTRRKNRICYLQEIFSNEMAKVDDSFFHRLEESFLVEEDKKHERHPIFGNIVDEVAYHEKYPTIYHLRKKLVDSTDKADLRLIYLALAHMIKFRGHFLIEGDLNPDNSDVDKLFIQLVQTYNQLFEENPINASGVDAKAILSARLSKSRRLENLIAQLPGEKKNGLFGNLIALSLGLTPNFKSNFDLAEDAKLQLSKDTYDDDLDNLLAQIGDQYADLFLAAKNLSDAILLSDILRVNTEITKAPLSASMIKRYDEHHQDLTLLKALVRQQLPEKYKEIFFDQSKNGYAGYIDGGASQEEFYKFIKPILEKMDGTEELLVKLNREDLLRKQRTFDNGSIPHQIHLGELHAILRRQEDFYPFLKDNREKIEKILTFRIPYYVGPLARGNSRFAWMTRKSEETITPWNFEEVVDKGASAQSFIERMTNFDKNLPNEKVLPKHSLLYEYFTVYNELTKVKYVTEGMRKPAFLSGEQKKAIVDLLFKTNRKVTVKQLKEDYFKKIECFDSVEISGVEDRFNASLGTYHDLLKIIKDKDFLDNEENEDILEDIVLTLTLFEDREMIEERLKTYAHLFDDKVMKQLKRRRYTGWGRLSRKLINGIRDKQSGKTILDFLKSDGFANRNFMQLIHDDSLTFKEDIQKAQVSGQGDSLHEHIANLAGSPAIKKGILQTVKVVDELVKVMGRHKPENIVIEMARENQTTQKGQKNSRERMKRIEEGIKELGSQILKEHPVENTQLQNEKLYLYYLQNGRDMYVDQELDINRLSDYDVDHIVPQSFLKDDSIDNKVLTRSDKARGKSDNVPSEEVVKKMKNYWRQLLNAKLITQRKFDNLTKAERGGLSELDKAGFIKRQLVETRQITKHVAQILDSRMNTKYDENDKLIREVKVITLKSKLVSDFRKDFQFYKVREINNYHHAHDAYLNAVVGTALIKKYPKLESEFVYGDYKVYDVRKMIAKSEQEIGKATAKYFFYSNIMNFFKTEITLANGEIRKRPLIETNGETGEIVWDKGRDFATVRKVLSMPQVNIVKKTEVQTGGFSKESILPKRNSDKLIARKKDWDPKKYGGFDSPTVAYSVLVVAKVEKGKSKKLKSVKELLGITIMERSSFEKNPIDFLEAKGYKEVKKDLIIKLPKYSLFELENGRKRMLASAGELQKGNELALPSKYVNFLYLASHYEKLKGSPEDNEQKQLFVEQHKHYLDEIIEQISEFSKRVILADANLDKVLSAYNKHRDKPIREQAENIIHLFTLTNLGAPAAFKYFDTTIDRKRYTSTKEVLDATLIHQSITGLYETRIDLSQLGGDGGGGGGSGGGGSGGGGSGGGGSGGGGSGGGGSGGGRDIMKDIKVRLMTDSPDDSQDLMIGAIESNLFADQISWKSDQPVWLNQWPLKQEKLQALQQLVTEQLQLGHLEESNSPWNTPVFVIKKKSGKWRLLQDLRAVNATMHDMGALQPGLPSPVAVPKGWEIIIIDLQDCFFNIKLHPEDCKRFAFSVPSPNFKRPYQRFQWKVLPQGMKNSPTLCQKFVDKAILTVRDKYQDSYIVHYMDDILLAHPSRSIVDEILTSMIQALNKHGLVVSTEKIQKYDNLKYLGTHIQGDSVSYQKLQIRTDKLRTLNDFQKLLGNINWIRPFLKLTTGELKPLFEILNGDSNPISTRKLTPEACKALQLMNERLSTARVKRLDLSQPWSLCILKTEYTPTACLWQDGVVEWIHLPHISPKVITPYDIFCTQLIIKGRHRSKELFSKDPDYIVVPYTKVQFDLLLQEKEDWPISLLGFLGEVHFHLPKDPLLTFTLQTAIIFPHMTSTTPLEKGIVIFTDGSANGRSVTYIQGREPIIKENTQNTAQQAEIVAVITAFEEVSQPFNLYTDSKYVTGLFPEIETATLSPRTKIYTELKHLQRLIHKRQEKFYIGHIRGHTGLPGPLAQGNAYADSLTRILTAGKRTADGSEFEKRTADGSEFESPKKKAKVE
